United States Patent Application Publication US 2024/0252682 A1 - sequence listing, part 3

SEQ ID NO: 1442 - protein, 2098 aa, synthetic construct
MPAAKRVKLDGGDKKYSIGLDIGTNSVGWAVITDEYKVPSKKFKVLGNTDRHSIKKNLIGALLFDSGETAEATRLKRTARRRYTRRKNRICYLQEIFSNEMAKVDDSFFHRLEESFLVEEDKKHERHPIFGNIVDEVAYHEKYPTIYHLRKKLVDSTDKADLRLIYLALAHMIKFRGHFLIEGDLNPDNSDVDKLFIQLVQTYNQLFEENPINASGVDAKAILSARLSKSRRLENLIAQLPGEKKNGLFGNLIALSLGLTPNFKSNFDLAEDAKLQLSKDTYDDDLDNLLAQIGDQYADLFLAAKNLSDAILLSDILRVNTEITKAPLSASMIKRYDEHHQDLTLLKALVRQQLPEKYKEIFFDQSKNGYAGYIDGGASQEEFYKFIKPILEKMDGTEELLVKLNREDLLRKQRTFDNGSIPHQIHLGELHAILRRQEDFYPFLKDNREKIEKILTFRIPYYVGPLARGNSRFAWMTRKSEETITPWNFEEVVDKGASAQSFIERMTNFDKNLPNEKVLPKHSLLYEYFTVYNELTKVKYVTEGMRKPAFLSGEQKKAIVDLLFKTNRKVTVKQLKEDYFKKIECFDSVEISGVEDRFNASLGTYHDLLKIIKDKDFLDNEENEDILEDIVLTLTLFEDREMIEERLKTYAHLFDDKVMKQLKRRRYTGWGRLSRKLINGIRDKQSGKTILDFLKSDGFANRNFMQLIHDDSLTFKEDIQKAQVSGQGDSLHEHIANLAGSPAIKKGILQTVKVVDELVKVMGRHKPENIVIEMARENQTTQKGQKNSRERMKRIEEGIKELGSQILKEHPVENTQLQNEKLYLYYLQNGRDMYVDQELDINRLSDYDVDHIVPQSFLKDDSIDNKVLTRSDKARGKSDNVPSEEVVKKMKNYWRQLLNAKLITQRKFDNLTKAERGGLSELDKAGFIKRQLVETRQITKHVAQILDSRMNTKYDENDKLIREVKVITLKSKLVSDFRKDFQFYKVREINNYHHAHDAYLNAVVGTALIKKYPKLESEFVYGDYKVYDVRKMIAKSEQEIGKATAKYFFYSNIMNFFKTEITLANGEIRKRPLIETNGETGEIVWDKGRDFATVRKVLSMPQVNIVKKTEVQTGGFSKESILPKRNSDKLIARKKDWDPKKYGGFDSPTVAYSVLVVAKVEKGKSKKLKSVKELLGITIMERSSFEKNPIDFLEAKGYKEVKKDLIIKLPKYSLFELENGRKRMLASAGELQKGNELALPSKYVNFLYLASHYEKLKGSPEDNEQKQLFVEQHKHYLDEIIEQISEFSKRVILADANLDKVLSAYNKHRDKPIREQAENIIHLFTLTNLGAPAAFKYFDTTIDRKRYTSTKEVLDATLIHQSITGLYETRIDLSQLGGDGGGGSGGGEAAAKGGTAPLEEEYRLFLEAPIQNVTLLEQWKREIPKVWAEINPPGLASTQAPIHVQLLSTALPVRVRQYPITLEAKRSLRETIRKFRAAGILRPVHSPWNTPLLPVRKSGTSEYRMVQDLREVNKRVETIHPTVPNPYTLLSLLPPDRIWYSVLDLKDAFFCIPLAPESQLIFAFEWADAEEGESGQLTWTRLPQGFKNSPTLFNEALNRDLQGFRLDHPSVSLLQYVDDLLIAADTQAACLSATRDLLMTLAELGYRVSGKKAQLCQEEVTYLGFKIHKGSRSLSNSRTQAILQIPVPKTKRQVREFLGKIGYCRLFIPGFAELAQPLYAATRPGNDPLVWGEKEEEAFQSLKLALTQPPALALPSLDKPFQLFVEETSGAAKGVLTQALGPWKRPVAYLSKRLDPVAAGWPRCLRAIAAAALLTREASKLTFGQDIEITSSHNLESLLRSPPDKWLTNARITQYQVLLLDPPRVRFKQTAALNPATLLPETDDTLPIHHCLDTLDSLTSTRPDLTDQPLAQAEATLFTDGSSYIRDGKRYAGAAVVTLDSVIWAEPLPIGTSAQKAELIALTKALEWSKDKSVNIYTDSRYAFATLHVHGMIYRERGWLTAGGKAIKNAPEILALLTAVWLPKRVAVMHCKGHQKDDAPTSTGNRRADEVAREVAIRPLSTQATISAGKRTADGSEFEKRTADGSEFESPKKKAKVE

SEQ ID NO: 1443 - protein, 2093 aa, synthetic construct
MPAAKRVKLDGGDKKYSIGLDIGTNSVGWAVITDEYKVPSKKFKVLGNTDRHSIKKNLIGALLFDSGETAEATRLKRTARRRYTRRKNRICYLQEIFSNEMAKVDDSFFHRLEESFLVEEDKKHERHPIFGNIVDEVAYHEKYPTIYHLRKKLVDSTDKADLRLIYLALAHMIKFRGHFLIEGDLNPDNSDVDKLFIQLVQTYNQLFEENPINASGVDAKAILSARLSKSRRLENLIAQLPGEKKNGLFGNLIALSLGLTPNFKSNFDLAEDAKLQLSKDTYDDDLDNLLAQIGDQYADLFLAAKNLSDAILLSDILRVNTEITKAPLSASMIKRYDEHHQDLTLLKALVRQQLPEKYKEIFFDQSKNGYAGYIDGGASQEEFYKFIKPILEKMDGTEELLVKLNREDLLRKQRTFDNGSIPHQIHLGELHAILRRQEDFYPFLKDNREKIEKILTFRIPYYVGPLARGNSRFAWMTRKSEETITPWNFEEVVDKGASAQSFIERMTNFDKNLPNEKVLPKHSLLYEYFTVYNELTKVKYVTEGMRKPAFLSGEQKKAIVDLLFKTNRKVTVKQLKEDYFKKIECFDSVEISGVEDRFNASLGTYHDLLKIIKDKDFLDNEENEDILEDIVLTLTLFEDREMIEERLKTYAHLFDDKVMKQLKRRRYTGWGRLSRKLINGIRDKQSGKTILDFLKSDGFANRNFMQLIHDDSLTFKEDIQKAQVSGQGDSLHEHIANLAGSPAIKKGILQTVKVVDELVKVMGRHKPENIVIEMARENQTTQKGQKNSRERMKRIEEGIKELGSQILKEHPVENTQLQNEKLYLYYLQNGRDMYVDQELDINRLSDYDVDHIVPQSFLKDDSIDNKVLTRSDKARGKSDNVPSEEVVKKMKNYWRQLLNAKLITQRKFDNLTKAERGGLSELDKAGFIKRQLVETRQITKHVAQILDSRMNTKYDENDKLIREVKVITLKSKLVSDFRKDFQFYKVREINNYHHAHDAYLNAVVGTALIKKYPKLESEFVYGDYKVYDVRKMIAKSEQEIGKATAKYFFYSNIMNFFKTEITLANGEIRKRPLIETNGETGEIVWDKGRDFATVRKVLSMPQVNIVKKTEVQTGGFSKESILPKRNSDKLIARKKDWDPKKYGGFDSPTVAYSVLVVAKVEKGKSKKLKSVKELLGITIMERSSFEKNPIDFLEAKGYKEVKKDLIIKLPKYSLFELENGRKRMLASAGELQKGNELALPSKYVNFLYLASHYEKLKGSPEDNEQKQLFVEQHKHYLDEIIEQISEFSKRVILADANLDKVLSAYNKHRDKPIREQAENIIHLFTLTNLGAPAAFKYFDTTIDRKRYTSTKEVLDATLIHQSITGLYETRIDLSQLGGDGGGSSGSSGGTAPLEEEYRLFLEAPIQNVTLLEQWKREIPKVWAEINPPGLASTQAPIHVQLLSTALPVRVRQYPITLEAKRSLRETIRKFRAAGILRPVHSPWNTPLLPVRKSGTSEYRMVQDLREVNKRVETIHPTVPNPYTLLSLLPPDRIWYSVLDLKDAFFCIPLAPESQLIFAFEWADAEEGESGQLTWTRLPQGFKNSPTLFNEALNRDLQGFRLDHPSVSLLQYVDDLLIAADTQAACLSATRDLLMTLAELGYRVSGKKAQLCQEEVTYLGFKIHKGSRSLSNSRTQAILQIPVPKTKRQVREFLGKIGYCRLFIPGFAELAQPLYAATRPGNDPLVWGEKEEEAFQSLKLALTQPPALALPSLDKPFQLFVEETSGAAKGVLTQALGPWKRPVAYLSKRLDPVAAGWPRCLRAIAAAALLTREASKLTFGQDIEITSSHNLESLLRSPPDKWLTNARITQYQVLLLDPPRVRFKQTAALNPATLLPETDDTLPIHHCLDTLDSLTSTRPDLTDQPLAQAEATLFTDGSSYIRDGKRYAGAAVVTLDSVIWAEPLPIGTSAQKAELIALTKALEWSKDKSVNIYTDSRYAFATLHVHGMIYRERGWLTAGGKAIKNAPEILALLTAVWLPKRVAVMHCKGHQKDDAPTSTGNRRADEVAREVAIRPLSTQATISAGKRTADGSEFEKRTADGSEFESPKKKAKVE

SEQ ID NO: 1444 - protein, 2093 aa, synthetic construct
MPAAKRVKLDGGDKKYSIGLDIGTNSVGWAVITDEYKVPSKKFKVLGNTDRHSIKKNLIGALLFDSGETAEATRLKRTARRRYTRRKNRICYLQEIFSNEMAKVDDSFFHRLEESFLVEEDKKHERHPIFGNIVDEVAYHEKYPTIYHLRKKLVDSTDKADLRLIYLALAHMIKFRGHFLIEGDLNPDNSDVDKLFIQLVQTYNQLFEENPINASGVDAKAILSARLSKSRRLENLIAQLPGEKKNGLFGNLIALSLGLTPNFKSNFDLAEDAKLQLSKDTYDDDLDNLLAQIGDQYADLFLAAKNLSDAILLSDILRVNTEITKAPLSASMIKRYDEHHQDLTLLKALVRQQLPEKYKEIFFDQSKNGYAGYIDGGASQEEFYKFIKPILEKMDGTEELLVKLNREDLLRKQRTFDNGSIPHQIHLGELHAILRRQEDFYPFLKDNREKIEKILTFRIPYYVGPLARGNSRFAWMTRKSEETITPWNFEEVVDKGASAQSFIERMTNFDKNLPNEKVLPKHSLLYEYFTVYNELTKVKYVTEGMRKPAFLSGEQKKAIVDLLFKTNRKVTVKQLKEDYFKKIECFDSVEISGVEDRFNASLGTYHDLLKIIKDKDFLDNEENEDILEDIVLTLTLFEDREMIEERLKTYAHLFDDKVMKQLKRRRYTGWGRLSRKLINGIRDKQSGKTILDFLKSDGFANRNFMQLIHDDSLTFKEDIQKAQVSGQGDSLHEHIANLAGSPAIKKGILQTVKVVDELVKVMGRHKPENIVIEMARENQTTQKGQKNSRERMKRIEEGIKELGSQILKEHPVENTQLQNEKLYLYYLQNGRDMYVDQELDINRLSDYDVDHIVPQSFLKDDSIDNKVLTRSDKARGKSDNVPSEEVVKKMKNYWRQLLNAKLITQRKFDNLTKAERGGLSELDKAGFIKRQLVETRQITKHVAQILDSRMNTKYDENDKLIREVKVITLKSKLVSDFRKDFQFYKVREINNYHHAHDAYLNAVVGTALIKKYPKLESEFVYGDYKVYDVRKMIAKSEQEIGKATAKYFFYSNIMNFFKTEITLANGEIRKRPLIETNGETGEIVWDKGRDFATVRKVLSMPQVNIVKKTEVQTGGFSKESILPKRNSDKLIARKKDWDPKKYGGFDSPTVAYSVLVVAKVEKGKSKKLKSVKELLGITIMERSSFEKNPIDFLEAKGYKEVKKDLIIKLPKYSLFELENGRKRMLASAGELQKGNELALPSKYVNFLYLASHYEKLKGSPEDNEQKQLFVEQHKHYLDEIIEQISEFSKRVILADANLDKVLSAYNKHRDKPIREQAENIIHLFTLTNLGAPAAFKYFDTTIDRKRYTSTKEVLDATLIHQSITGLYETRIDLSQLGGDGGGGGGSSGGTAPLEEEYRLFLEAPIQNVTLLEQWKREIPKVWAEINPPGLASTQAPIHVQLLSTALPVRVRQYPITLEAKRSLRETIRKFRAAGILRPVHSPWNTPLLPVRKSGTSEYRMVQDLREVNKRVETIHPTVPNPYTLLSLLPPDRIWYSVLDLKDAFFCIPLAPESQLIFAFEWADAEEGESGQLTWTRLPQGFKNSPTLFNEALNRDLQGFRLDHPSVSLLQYVDDLLIAADTQAACLSATRDLLMTLAELGYRVSGKKAQLCQEEVTYLGFKIHKGSRSLSNSRTQAILQIPVPKTKRQVREFLGKIGYCRLFIPGFAELAQPLYAATRPGNDPLVWGEKEEEAFQSLKLALTQPPALALPSLDKPFQLFVEETSGAAKGVLTQALGPWKRPVAYLSKRLDPVAAGWPRCLRAIAAAALLTREASKLTFGQDIEITSSHNLESLLRSPPDKWLTNARITQYQVLLLDPPRVRFKQTAALNPATLLPETDDTLPIHHCLDTLDSLTSTRPDLTDQPLAQAEATLFTDGSSYIRDGKRYAGAAVVTLDSVIWAEPLPIGTSAQKAELIALTKALEWSKDKSVNIYTDSRYAFATLHVHGMIYRERGWLTAGGKAIKNAPEILALLTAVWLPKRVAVMHCKGHQKDDAPTSTGNRRADEVAREVAIRPLSTQATISAGKRTADGSEFEKRTADGSEFESPKKKAKVE

SEQ ID NO: 1445 - protein, 2093 aa, synthetic construct
MPAAKRVKLDGGDKKYSIGLDIGTNSVGWAVITDEYKVPSKKFKVLGNTDRHSIKKNLIGALLFDSGETAEATRLKRTARRRYTRRKNRICYLQEIFSNEMAKVDDSFFHRLEESFLVEEDKKHERHPIFGNIVDEVAYHEKYPTIYHLRKKLVDSTDKADLRLIYLALAHMIKFRGHFLIEGDLNPDNSDVDKLFIQLVQTYNQLFEENPINASGVDAKAILSARLSKSRRLENLIAQLPGEKKNGLFGNLIALSLGLTPNFKSNFDLAEDAKLQLSKDTYDDDLDNLLAQIGDQYADLFLAAKNLSDAILLSDILRVNTEITKAPLSASMIKRYDEHHQDLTLLKALVRQQLPEKYKEIFFDQSKNGYAGYIDGGASQEEFYKFIKPILEKMDGTEELLVKLNREDLLRKQRTFDNGSIPHQIHLGELHAILRRQEDFYPFLKDNREKIEKILTFRIPYYVGPLARGNSRFAWMTRKSEETITPWNFEEVVDKGASAQSFIERMTNFDKNLPNEKVLPKHSLLYEYFTVYNELTKVKYVTEGMRKPAFLSGEQKKAIVDLLFKTNRKVTVKQLKEDYFKKIECFDSVEISGVEDRFNASLGTYHDLLKIIKDKDFLDNEENEDILEDIVLTLTLFEDREMIEERLKTYAHLFDDKVMKQLKRRRYTGWGRLSRKLINGIRDKQSGKTILDFLKSDGFANRNFMQLIHDDSLTFKEDIQKAQVSGQGDSLHEHIANLAGSPAIKKGILQTVKVVDELVKVMGRHKPENIVIEMARENQTTQKGQKNSRERMKRIEEGIKELGSQILKEHPVENTQLQNEKLYLYYLQNGRDMYVDQELDINRLSDYDVDHIVPQSFLKDDSIDNKVLTRSDKARGKSDNVPSEEVVKKMKNYWRQLLNAKLITQRKFDNLTKAERGGLSELDKAGFIKRQLVETRQITKHVAQILDSRMNTKYDENDKLIREVKVITLKSKLVSDFRKDFQFYKVREINNYHHAHDAYLNAVVGTALIKKYPKLESEFVYGDYKVYDVRKMIAKSEQEIGKATAKYFFYSNIMNFFKTEITLANGEIRKRPLIETNGETGEIVWDKGRDFATVRKVLSMPQVNIVKKTEVQTGGFSKESILPKRNSDKLIARKKDWDPKKYGGFDSPTVAYSVLVVAKVEKGKSKKLKSVKELLGITIMERSSFEKNPIDFLEAKGYKEVKKDLIIKLPKYSLFELENGRKRMLASAGELQKGNELALPSKYVNFLYLASHYEKLKGSPEDNEQKQLFVEQHKHYLDEIIEQISEFSKRVILADANLDKVLSAYNKHRDKPIREQAENIIHLFTLTNLGAPAAFKYFDTTIDRKRYTSTKEVLDATLIHQSITGLYETRIDLSQLGGDGGGSSGGSGGTAPLEEEYRLFLEAPIQNVTLLEQWKREIPKVWAEINPPGLASTQAPIHVQLLSTALPVRVRQYPITLEAKRSLRETIRKFRAAGILRPVHSPWNTPLLPVRKSGTSEYRMVQDLREVNKRVETIHPTVPNPYTLLSLLPPDRIWYSVLDLKDAFFCIPLAPESQLIFAFEWADAEEGESGQLTWTRLPQGFKNSPTLFNEALNRDLQGFRLDHPSVSLLQYVDDLLIAADTQAACLSATRDLLMTLAELGYRVSGKKAQLCQEEVTYLGFKIHKGSRSLSNSRTQAILQIPVPKTKRQVREFLGKIGYCRLFIPGFAELAQPLYAATRPGNDPLVWGEKEEEAFQSLKLALTQPPALALPSLDKPFQLFVEETSGAAKGVLTQALGPWKRPVAYLSKRLDPVAAGWPRCLRAIAAAALLTREASKLTFGQDIEITSSHNLESLLRSPPDKWLTNARITQYQVLLLDPPRVRFKQTAALNPATLLPETDDTLPIHHCLDTLDSLTSTRPDLTDQPLAQAEATLFTDGSSYIRDGKRYAGAAVVTLDSVIWAEPLPIGTSAQKAELIALTKALEWSKDKSVNIYTDSRYAFATLHVHGMIYRERGWLTAGGKAIKNAPEILALLTAVWLPKRVAVMHCKGHQKDDAPTSTGNRRADEVAREVAIRPLSTQATISAGKRTADGSEFEKRTADGSEFESPKKKAKVE

SEQ ID NO: 1446 - protein, 2095 aa, synthetic construct
MPAAKRVKLDGGDKKYSIGLDIGTNSVGWAVITDEYKVPSKKFKVLGNTDRHSIKKNLIGALLFDSGETAEATRLKRTARRRYTRRKNRICYLQEIFSNEMAKVDDSFFHRLEESFLVEEDKKHERHPIFGNIVDEVAYHEKYPTIYHLRKKLVDSTDKADLRLIYLALAHMIKFRGHFLIEGDLNPDNSDVDKLFIQLVQTYNQLFEENPINASGVDAKAILSARLSKSRRLENLIAQLPGEKKNGLFGNLIALSLGLTPNFKSNFDLAEDAKLQLSKDTYDDDLDNLLAQIGDQYADLFLAAKNLSDAILLSDILRVNTEITKAPLSASMIKRYDEHHQDLTLLKALVRQQLPEKYKEIFFDQSKNGYAGYIDGGASQEEFYKFIKPILEKMDGTEELLVKLNREDLLRKQRTFDNGSIPHQIHLGELHAILRRQEDFYPFLKDNREKIEKILTFRIPYYVGPLARGNSRFAWMTRKSEETITPWNFEEVVDKGASAQSFIERMTNFDKNLPNEKVLPKHSLLYEYFTVYNELTKVKYVTEGMRKPAFLSGEQKKAIVDLLFKTNRKVTVKQLKEDYFKKIECFDSVEISGVEDRFNASLGTYHDLLKIIKDKDFLDNEENEDILEDIVLTLTLFEDREMIEERLKTYAHLFDDKVMKQLKRRRYTGWGRLSRKLINGIRDKQSGKTILDFLKSDGFANRNFMQLIHDDSLTFKEDIQKAQVSGQGDSLHEHIANLAGSPAIKKGILQTVKVVDELVKVMGRHKPENIVIEMARENQTTQKGQKNSRERMKRIEEGIKELGSQILKEHPVENTQLQNEKLYLYYLQNGRDMYVDQELDINRLSDYDVDHIVPQSFLKDDSIDNKVLTRSDKARGKSDNVPSEEVVKKMKNYWRQLLNAKLITQRKFDNLTKAERGGLSELDKAGFIKRQLVETRQITKHVAQILDSRMNTKYDENDKLIREVKVITLKSKLVSDFRKDFQFYKVREINNYHHAHDAYLNAVVGTALIKKYPKLESEFVYGDYKVYDVRKMIAKSEQEIGKATAKYFFYSNIMNFFKTEITLANGEIRKRPLIETNGETGEIVWDKGRDFATVRKVLSMPQVNIVKKTEVQTGGFSKESILPKRNSDKLIARKKDWDPKKYGGFDSPTVAYSVLVVAKVEKGKSKKLKSVKELLGITIMERSSFEKNPIDFLEAKGYKEVKKDLIIKLPKYSLFELENGRKRMLASAGELQKGNELALPSKYVNFLYLASHYEKLKGSPEDNEQKQLFVEQHKHYLDEIIEQISEFSKRVILADANLDKVLSAYNKHRDKPIREQAENIIHLFTLTNLGAPAAFKYFDTTIDRKRYTSTKEVLDATLIHQSITGLYETRIDLSQLGGDGGGGGEAAAKGGTAPLEEEYRLFLEAPIQNVTLLEQWKREIPKVWAEINPPGLASTQAPIHVQLLSTALPVRVRQYPITLEAKRSLRETIRKFRAAGILRPVHSPWNTPLLPVRKSGTSEYRMVQDLREVNKRVETIHPTVPNPYTLLSLLPPDRIWYSVLDLKDAFFCIPLAPESQLIFAFEWADAEEGESGQLTWTRLPQGFKNSPTLFNEALNRDLQGFRLDHPSVSLLQYVDDLLIAADTQAACLSATRDLLMTLAELGYRVSGKKAQLCQEEVTYLGFKIHKGSRSLSNSRTQAILQIPVPKTKRQVREFLGKIGYCRLFIPGFAELAQPLYAATRPGNDPLVWGEKEEEAFQSLKLALTQPPALALPSLDKPFQLFVEETSGAAKGVLTQALGPWKRPVAYLSKRLDPVAAGWPRCLRAIAAAALLTREASKLTFGQDIEITSSHNLESLLRSPPDKWLTNARITQYQVLLLDPPRVRFKQTAALNPATLLPETDDTLPIHHCLDTLDSLTSTRPDLTDQPLAQAEATLFTDGSSYIRDGKRYAGAAVVTLDSVIWAEPLPIGTSAQKAELIALTKALEWSKDKSVNIYTDSRYAFATLHVHGMIYRERGWLTAGGKAIKNAPEILALLTAVWLPKRVAVMHCKGHQKDDAPTSTGNRRADEVAREVAIRPLSTQATISAGKRTADGSEFEKRTADGSEFESPKKKAKVE

SEQ ID NO: 1447 - protein, 2096 aa, synthetic construct
MPAAKRVKLDGGDKKYSIGLDIGTNSVGWAVITDEYKVPSKKFKVLGNTDRHSIKKNLIGALLFDSGETAEATRLKRTARRRYTRRKNRICYLQEIFSNEMAKVDDSFFHRLEESFLVEEDKKHERHPIFGNIVDEVAYHEKYPTIYHLRKKLVDSTDKADLRLIYLALAHMIKFRGHFLIEGDLNPDNSDVDKLFIQLVQTYNQLFEENPINASGVDAKAILSARLSKSRRLENLIAQLPGEKKNGLFGNLIALSLGLTPNFKSNFDLAEDAKLQLSKDTYDDDLDNLLAQIGDQYADLFLAAKNLSDAILLSDILRVNTEITKAPLSASMIKRYDEHHQDLTLLKALVRQQLPEKYKEIFFDQSKNGYAGYIDGGASQEEFYKFIKPILEKMDGTEELLVKLNREDLLRKQRTFDNGSIPHQIHLGELHAILRRQEDFYPFLKDNREKIEKILTFRIPYYVGPLARGNSRFAWMTRKSEETITPWNFEEVVDKGASAQSFIERMTNFDKNLPNEKVLPKHSLLYEYFTVYNELTKVKYVTEGMRKPAFLSGEQKKAIVDLLFKTNRKVTVKQLKEDYFKKIECFDSVEISGVEDRFNASLGTYHDLLKIIKDKDFLDNEENEDILEDIVLTLTLFEDREMIEERLKTYAHLFDDKVMKQLKRRRYTGWGRLSRKLINGIRDKQSGKTILDFLKSDGFANRNFMQLIHDDSLTFKEDIQKAQVSGQGDSLHEHIANLAGSPAIKKGILQTVKVVDELVKVMGRHKPENIVIEMARENQTTQKGQKNSRERMKRIEEGIKELGSQILKEHPVENTQLQNEKLYLYYLQNGRDMYVDQELDINRLSDYDVDHIVPQSFLKDDSIDNKVLTRSDKARGKSDNVPSEEVVKKMKNYWRQLLNAKLITQRKFDNLTKAERGGLSELDKAGFIKRQLVETRQITKHVAQILDSRMNTKYDENDKLIREVKVITLKSKLVSDFRKDFQFYKVREINNYHHAHDAYLNAVVGTALIKKYPKLESEFVYGDYKVYDVRKMIAKSEQEIGKATAKYFFYSNIMNFFKTEITLANGEIRKRPLIETNGETGEIVWDKGRDFATVRKVLSMPQVNIVKKTEVQTGGFSKESILPKRNSDKLIARKKDWDPKKYGGFDSPTVAYSVLVVAKVEKGKSKKLKSVKELLGITIMERSSFEKNPIDFLEAKGYKEVKKDLIIKLPKYSLFELENGRKRMLASAGELQKGNELALPSKYVNFLYLASHYEKLKGSPEDNEQKQLFVEQHKHYLDEIIEQISEFSKRVILADANLDKVLSAYNKHRDKPIREQAENIIHLFTLTNLGAPAAFKYFDTTIDRKRYTSTKEVLDATLIHQSITGLYETRIDLSQLGGDGGPAPGGGGSSGGTAPLEEEYRLFLEAPIQNVTLLEQWKREIPKVWAEINPPGLASTQAPIHVQLLSTALPVRVRQYPITLEAKRSLRETIRKFRAAGILRPVHSPWNTPLLPVRKSGTSEYRMVQDLREVNKRVETIHPTVPNPYTLLSLLPPDRIWYSVLDLKDAFFCIPLAPESQLIFAFEWADAEEGESGQLTWTRLPQGFKNSPTLFNEALNRDLQGFRLDHPSVSLLQYVDDLLIAADTQAACLSATRDLLMTLAELGYRVSGKKAQLCQEEVTYLGFKIHKGSRSLSNSRTQAILQIPVPKTKRQVREFLGKIGYCRLFIPGFAELAQPLYAATRPGNDPLVWGEKEEEAFQSLKLALTQPPALALPSLDKPFQLFVEETSGAAKGVLTQALGPWKRPVAYLSKRLDPVAAGWPRCLRAIAAAALLTREASKLTFGQDIEITSSHNLESLLRSPPDKWLTNARITQYQVLLLDPPRVRFKQTAALNPATLLPETDDTLPIHHCLDTLDSLTSTRPDLTDQPLAQAEATLFTDGSSYIRDGKRYAGAAVVTLDSVIWAEPLPIGTSAQKAELIALTKALEWSKDKSVNIYTDSRYAFATLHVHGMIYRERGWLTAGGKAIKNAPEILALLTAVWLPKRVAVMHCKGHQKDDAPTSTGNRRADEVAREVAIRPLSTQATISAGKRTADGSEFEKRTADGSEFESPKKKAKVE

SEQ ID NO: 1448 - protein, 2129 aa, synthetic construct
MPAAKRVKLDGGDKKYSIGLDIGTNSVGWAVITDEYKVPSKKFKVLGNTDRHSIKKNLIGALLFDSGETAEATRLKRTARRRYTRRKNRICYLQEIFSNEMAKVDDSFFHRLEESFLVEEDKKHERHPIFGNIVDEVAYHEKYPTIYHLRKKLVDSTDKADLRLIYLALAHMIKFRGHFLIEGDLNPDNSDVDKLFIQLVQTYNQLFEENPINASGVDAKAILSARLSKSRRLENLIAQLPGEKKNGLFGNLIALSLGLTPNFKSNFDLAEDAKLQLSKDTYDDDLDNLLAQIGDQYADLFLAAKNLSDAILLSDILRVNTEITKAPLSASMIKRYDEHHQDLTLLKALVRQQLPEKYKEIFFDQSKNGYAGYIDGGASQEEFYKFIKPILEKMDGTEELLVKLNREDLLRKQRTFDNGSIPHQIHLGELHAILRRQEDFYPFLKDNREKIEKILTFRIPYYVGPLARGNSRFAWMTRKSEETITPWNFEEVVDKGASAQSFIERMTNFDKNLPNEKVLPKHSLLYEYFTVYNELTKVKYVTEGMRKPAFLSGEQKKAIVDLLFKTNRKVTVKQLKEDYFKKIECFDSVEISGVEDRFNASLGTYHDLLKIIKDKDFLDNEENEDILEDIVLTLTLFEDREMIEERLKTYAHLFDDKVMKQLKRRRYTGWGRLSRKLINGIRDKQSGKTILDFLKSDGFANRNFMQLIHDDSLTFKEDIQKAQVSGQGDSLHEHIANLAGSPAIKKGILQTVKVVDELVKVMGRHKPENIVIEMARENQTTQKGQKNSRERMKRIEEGIKELGSQILKEHPVENTQLQNEKLYLYYLQNGRDMYVDQELDINRLSDYDVDHIVPQSFLKDDSIDNKVLTRSDKARGKSDNVPSEEVVKKMKNYWRQLLNAKLITQRKFDNLTKAERGGLSELDKAGFIKRQLVETRQITKHVAQILDSRMNTKYDENDKLIREVKVITLKSKLVSDFRKDFQFYKVREINNYHHAHDAYLNAVVGTALIKKYPKLESEFVYGDYKVYDVRKMIAKSEQEIGKATAKYFFYSNIMNFFKTEITLANGEIRKRPLIETNGETGEIVWDKGRDFATVRKVLSMPQVNIVKKTEVQTGGFSKESILPKRNSDKLIARKKDWDPKKYGGFDSPTVAYSVLVVAKVEKGKSKKLKSVKELLGITIMERSSFEKNPIDFLEAKGYKEVKKDLIIKLPKYSLFELENGRKRMLASAGELQKGNELALPSKYVNFLYLASHYEKLKGSPEDNEQKQLFVEQHKHYLDEIIEQISEFSKRVILADANLDKVLSAYNKHRDKPIREQAENIIHLFTLTNLGAPAAFKYFDTTIDRKRYTSTKEVLDATLIHQSITGLYETRIDLSQLGGDGGAEAAAKEAAAKEAAAKEAAAKALEAEAAAKEAAAKEAAAKEAAAKAGGVLNLEEEYRLHEKPVPSSIDPSWLQLFPTVWAERAGMGLANQVPPVVVELRSGASPVAVRQYPMSKEAREGIRPHIQKFLDLGVLVPCRSPWNTPLLPVKKPGTNDYRPVQDLREINKRVQDIHPTVPNPYNLLSSLPPSYTWYSVLDLKDAFFCLRLHPNSQPLFAFEWKDPEKGNTGQLTWTRLPQGFKNSPTLFNEALHRDLAPFRALNPQVVLLQYVDDLLVAAPTYEDCKKGTQKLLQELSKLGYRVSAKKAQLCQREVTYLGYLLKEGKRWLTPARKATVMKIPVPTTPRQVREFLGKAGFCRLFIPGFASLAAPLYPLTKPSIPFIWTEEHQQAFDHIKKALLSAPALALPDLTKPFTLYIDERAGVARGVLTQTLGPWRRPVAYLSKKLDPVASGWPTCLKAVAAVALLLKDADKLTLGQNVTVIASHSLESIVRQPPDRWMTNARMTHYQSLLLNERVSFAPPAVLNPATLLPVESEATPVHRCSEILAEETGTRRDLEDQPLPGVPTWYTDGSSFITEGKRRAGAPIVDGKRTVWASSLPEGTSAQKAELVALTQALRLAEGKNINIYTDSRYAFATAHIHGAIYKQRGWLTSAGKDIKNKEEILALLEAIHLPRRVAIIHCPGHQRGSNPVATGNRRADEAAKQAALSTRVLAGTTKPAGKRTADGSEFEKRTADGSEFESPKKKAKVE

SEQ ID NO: 1449 - protein, 2092 aa, synthetic construct
MPAAKRVKLDGGDKKYSIGLDIGTNSVGWAVITDEYKVPSKKFKVLGNTDRHSIKKNLIGALLFDSGETAEATRLKRTARRRYTRRKNRICYLQEIFSNEMAKVDDSFFHRLEESFLVEEDKKHERHPIFGNIVDEVAYHEKYPTIYHLRKKLVDSTDKADLRLIYLALAHMIKFRGHFLIEGDLNPDNSDVDKLFIQLVQTYNQLFEENPINASGVDAKAILSARLSKSRRLENLIAQLPGEKKNGLFGNLIALSLGLTPNFKSNFDLAEDAKLQLSKDTYDDDLDNLLAQIGDQYADLFLAAKNLSDAILLSDILRVNTEITKAPLSASMIKRYDEHHQDLTLLKALVRQQLPEKYKEIFFDQSKNGYAGYIDGGASQEEFYKFIKPILEKMDGTEELLVKLNREDLLRKQRTFDNGSIPHQIHLGELHAILRRQEDFYPFLKDNREKIEKILTFRIPYYVGPLARGNSRFAWMTRKSEETITPWNFEEVVDKGASAQSFIERMTNFDKNLPNEKVLPKHSLLYEYFTVYNELTKVKYVTEGMRKPAFLSGEQKKAIVDLLFKTNRKVTVKQLKEDYFKKIECFDSVEISGVEDRFNASLGTYHDLLKIIKDKDFLDNEENEDILEDIVLTLTLFEDREMIEERLKTYAHLFDDKVMKQLKRRRYTGWGRLSRKLINGIRDKQSGKTILDFLKSDGFANRNFMQLIHDDSLTFKEDIQKAQVSGQGDSLHEHIANLAGSPAIKKGILQTVKVVDELVKVMGRHKPENIVIEMARENQTTQKGQKNSRERMKRIEEGIKELGSQILKEHPVENTQLQNEKLYLYYLQNGRDMYVDQELDINRLSDYDVDHIVPQSFLKDDSIDNKVLTRSDKARGKSDNVPSEEVVKKMKNYWRQLLNAKLITQRKFDNLTKAERGGLSELDKAGFIKRQLVETRQITKHVAQILDSRMNTKYDENDKLIREVKVITLKSKLVSDFRKDFQFYKVREINNYHHAHDAYLNAVVGTALIKKYPKLESEFVYGDYKVYDVRKMIAKSEQEIGKATAKYFFYSNIMNFFKTEITLANGEIRKRPLIETNGETGEIVWDKGRDFATVRKVLSMPQVNIVKKTEVQTGGFSKESILPKRNSDKLIARKKDWDPKKYGGFDSPTVAYSVLVVAKVEKGKSKKLKSVKELLGITIMERSSFEKNPIDFLEAKGYKEVKKDLIIKLPKYSLFELENGRKRMLASAGELQKGNELALPSKYVNFLYLASHYEKLKGSPEDNEQKQLFVEQHKHYLDEIIEQISEFSKRVILADANLDKVLSAYNKHRDKPIREQAENIIHLFTLTNLGAPAAFKYFDTTIDRKRYTSTKEVLDATLIHQSITGLYETRIDLSQLGGDGGGGSGGSGGSGGVLNLEEEYRLHEKPVPSSIDPSWLQLFPTVWAERAGMGLANQVPPVVVELRSGASPVAVRQYPMSKEAREGIRPHIQKFLDLGVLVPCRSPWNTPLLPVKKPGTNDYRPVQDLREINKRVQDIHPTVPNPYNLLSSLPPSYTWYSVLDLKDAFFCLRLHPNSQPLFAFEWKDPEKGNTGQLTWTRLPQGFKNSPTLFNEALHRDLAPFRALNPQVVLLQYVDDLLVAAPTYEDCKKGTQKLLQELSKLGYRVSAKKAQLCQREVTYLGYLLKEGKRWLTPARKATVMKIPVPTTPRQVREFLGKAGFCRLFIPGFASLAAPLYPLTKPSIPFIWTEEHQQAFDHIKKALLSAPALALPDLTKPFTLYIDERAGVARGVLTQTLGPWRRPVAYLSKKLDPVASGWPTCLKAVAAVALLLKDADKLTLGQNVTVIASHSLESIVRQPPDRWMTNARMTHYQSLLLNERVSFAPPAVLNPATLLPVESEATPVHRCSEILAEETGTRRDLEDQPLPGVPTWYTDGSSFITEGKRRAGAPIVDGKRTVWASSLPEGTSAQKAELVALTQALRLAEGKNINIYTDSRYAFATAHIHGAIYKQRGWLTSAGKDIKNKEEILALLEAIHLPRRVAIIHCPGHQRGSNPVATGNRRADEAAKQAALSTRVLAGTTKPAGKRTADGSEFEKRTADGSEFESPKKKAKVE

SEQ ID NO: 1450 - protein, 2089 aa, synthetic construct
MPAAKRVKLDGGDKKYSIGLDIGTNSVGWAVITDEYKVPSKKFKVLGNTDRHSIKKNLIGALLFDSGETAEATRLKRTARRRYTRRKNRICYLQEIFSNEMAKVDDSFFHRLEESFLVEEDKKHERHPIFGNIVDEVAYHEKYPTIYHLRKKLVDSTDKADLRLIYLALAHMIKFRGHFLIEGDLNPDNSDVDKLFIQLVQTYNQLFEENPINASGVDAKAILSARLSKSRRLENLIAQLPGEKKNGLFGNLIALSLGLTPNFKSNFDLAEDAKLQLSKDTYDDDLDNLLAQIGDQYADLFLAAKNLSDAILLSDILRVNTEITKAPLSASMIKRYDEHHQDLTLLKALVRQQLPEKYKEIFFDQSKNGYAGYIDGGASQEEFYKFIKPILEKMDGTEELLVKLNREDLLRKQRTFDNGSIPHQIHLGELHAILRRQEDFYPFLKDNREKIEKILTFRIPYYVGPLARGNSRFAWMTRKSEETITPWNFEEVVDKGASAQSFIERMTNFDKNLPNEKVLPKHSLLYEYFTVYNELTKVKYVTEGMRKPAFLSGEQKKAIVDLLFKTNRKVTVKQLKEDYFKKIECFDSVEISGVEDRFNASLGTYHDLLKIIKDKDFLDNEENEDILEDIVLTLTLFEDREMIEERLKTYAHLFDDKVMKQLKRRRYTGWGRLSRKLINGIRDKQSGKTILDFLKSDGFANRNFMQLIHDDSLTFKEDIQKAQVSGQGDSLHEHIANLAGSPAIKKGILQTVKVVDELVKVMGRHKPENIVIEMARENQTTQKGQKNSRERMKRIEEGIKELGSQILKEHPVENTQLQNEKLYLYYLQNGRDMYVDQELDINRLSDYDVDHIVPQSFLKDDSIDNKVLTRSDKARGKSDNVPSEEVVKKMKNYWRQLLNAKLITQRKFDNLTKAERGGLSELDKAGFIKRQLVETRQITKHVAQILDSRMNTKYDENDKLIREVKVITLKSKLVSDFRKDFQFYKVREINNYHHAHDAYLNAVVGTALIKKYPKLESEFVYGDYKVYDVRKMIAKSEQEIGKATAKYFFYSNIMNFFKTEITLANGEIRKRPLIETNGETGEIVWDKGRDFATVRKVLSMPQVNIVKKTEVQTGGFSKESILPKRNSDKLIARKKDWDPKKYGGFDSPTVAYSVLVVAKVEKGKSKKLKSVKELLGITIMERSSFEKNPIDFLEAKGYKEVKKDLIIKLPKYSLFELENGRKRMLASAGELQKGNELALPSKYVNFLYLASHYEKLKGSPEDNEQKQLFVEQHKHYLDEIIEQISEFSKRVILADANLDKVLSAYNKHRDKPIREQAENIIHLFTLTNLGAPAAFKYFDTTIDRKRYTSTKEVLDATLIHQSITGLYETRIDLSQLGGDGGGGSGSSGGVLNLEEEYRLHEKPVPSSIDPSWLQLFPTVWAERAGMGLANQVPPVVVELRSGASPVAVRQYPMSKEAREGIRPHIQKFLDLGVLVPCRSPWNTPLLPVKKPGTNDYRPVQDLREINKRVQDIHPTVPNPYNLLSSLPPSYTWYSVLDLKDAFFCLRLHPNSQPLFAFEWKDPEKGNTGQLTWTRLPQGFKNSPTLFNEALHRDLAPFRALNPQVVLLQYVDDLLVAAPTYEDCKKGTQKLLQELSKLGYRVSAKKAQLCQREVTYLGYLLKEGKRWLTPARKATVMKIPVPTTPRQVREFLGKAGFCRLFIPGFASLAAPLYPLTKPSIPFIWTEEHQQAFDHIKKALLSAPALALPDLTKPFTLYIDERAGVARGVLTQTLGPWRRPVAYLSKKLDPVASGWPTCLKAVAAVALLLKDADKLTLGQNVTVIASHSLESIVRQPPDRWMTNARMTHYQSLLLNERVSFAPPAVLNPATLLPVESEATPVHRCSEILAEETGTRRDLEDQPLPGVPTWYTDGSSFITEGKRRAGAPIVDGKRTVWASSLPEGTSAQKAELVALTQALRLAEGKNINIYTDSRYAFATAHIHGAIYKQRGWLTSAGKDIKNKEEILALLEAIHLPRRVAIIHCPGHQRGSNPVATGNRRADEAAKQAALSTRVLAGTTKPAGKRTADGSEFEKRTADGSEFESPKKKAKVE

SEQ ID NO: 1451 - protein, 2094 aa, synthetic construct
MPAAKRVKLDGGDKKYSIGLDIGTNSVGWAVITDEYKVPSKKFKVLGNTDRHSIKKNLIGALLFDSGETAEATRLKRTARRRYTRRKNRICYLQEIFSNEMAKVDDSFFHRLEESFLVEEDKKHERHPIFGNIVDEVAYHEKYPTIYHLRKKLVDSTDKADLRLIYLALAHMIKFRGHFLIEGDLNPDNSDVDKLFIQLVQTYNQLFEENPINASGVDAKAILSARLSKSRRLENLIAQLPGEKKNGLFGNLIALSLGLTPNFKSNFDLAEDAKLQLSKDTYDDDLDNLLAQIGDQYADLFLAAKNLSDAILLSDILRVNTEITKAPLSASMIKRYDEHHQDLTLLKALVRQQLPEKYKEIFFDQSKNGYAGYIDGGASQEEFYKFIKPILEKMDGTEELLVKLNREDLLRKQRTFDNGSIPHQIHLGELHAILRRQEDFYPFLKDNREKIEKILTFRIPYYVGPLARGNSRFAWMTRKSEETITPWNFEEVVDKGASAQSFIERMTNFDKNLPNEKVLPKHSLLYEYFTVYNELTKVKYVTEGMRKPAFLSGEQKKAIVDLLFKTNRKVTVKQLKEDYFKKIECFDSVEISGVEDRFNASLGTYHDLLKIIKDKDFLDNEENEDILEDIVLTLTLFEDREMIEERLKTYAHLFDDKVMKQLKRRRYTGWGRLSRKLINGIRDKQSGKTILDFLKSDGFANRNFMQLIHDDSLTFKEDIQKAQVSGQGDSLHEHIANLAGSPAIKKGILQTVKVVDELVKVMGRHKPENIVIEMARENQTTQKGQKNSRERMKRIEEGIKELGSQILKEHPVENTQLQNEKLYLYYLQNGRDMYVDQELDINRLSDYDVDHIVPQSFLKDDSIDNKVLTRSDKARGKSDNVPSEEVVKKMKNYWRQLLNAKLITQRKFDNLTKAERGGLSELDKAGFIKRQLVETRQITKHVAQILDSRMNTKYDENDKLIREVKVITLKSKLVSDFRKDFQFYKVREINNYHHAHDAYLNAVVGTALIKKYPKLESEFVYGDYKVYDVRKMIAKSEQEIGKATAKYFFYSNIMNFFKTEITLANGEIRKRPLIETNGETGEIVWDKGRDFATVRKVLSMPQVNIVKKTEVQTGGFSKESILPKRNSDKLIARKKDWDPKKYGGFDSPTVAYSVLVVAKVEKGKSKKLKSVKELLGITIMERSSFEKNPIDFLEAKGYKEVKKDLIIKLPKYSLFELENGRKRMLASAGELQKGNELALPSKYVNFLYLASHYEKLKGSPEDNEQKQLFVEQHKHYLDEIIEQISEFSKRVILADANLDKVLSAYNKHRDKPIREQAENIIHLFTLTNLGAPAAFKYFDTTIDRKRYTSTKEVLDATLIHQSITGLYETRIDLSQLGGDGGEAAAKGGGGGSGGVLNLEEEYRLHEKPVPSSIDPSWLQLFPTVWAERAGMGLANQVPPVVVELRSGASPVAVRQYPMSKEAREGIRPHIQKFLDLGVLVPCRSPWNTPLLPVKKPGTNDYRPVQDLREINKRVQDIHPTVPNPYNLLSSLPPSYTWYSVLDLKDAFFCLRLHPNSQPLFAFEWKDPEKGNTGQLTWTRLPQGFKNSPTLFNEALHRDLAPFRALNPQVVLLQYVDDLLVAAPTYEDCKKGTQKLLQELSKLGYRVSAKKAQLCQREVTYLGYLLKEGKRWLTPARKATVMKIPVPTTPRQVREFLGKAGFCRLFIPGFASLAAPLYPLTKPSIPFIWTEEHQQAFDHIKKALLSAPALALPDLTKPFTLYIDERAGVARGVLTQTLGPWRRPVAYLSKKLDPVASGWPTCLKAVAAVALLLKDADKLTLGQNVTVIASHSLESIVRQPPDRWMTNARMTHYQSLLLNERVSFAPPAVLNPATLLPVESEATPVHRCSEILAEETGTRRDLEDQPLPGVPTWYTDGSSFITEGKRRAGAPIVDGKRTVWASSLPEGTSAQKAELVALTQALRLAEGKNINIYTDSRYAFATAHIHGAIYKQRGWLTSAGKDIKNKEEILALLEAIHLPRRVAIIHCPGHQRGSNPVATGNRRADEAAKQAALSTRVLAGTTKPAGKRTADGSEFEKRTADGSEFESPKKKAKVE

SEQ ID NO: 1452 - protein, 2098 aa, synthetic construct
MPAAKRVKLDGGDKKYSIGLDIGTNSVGWAVITDEYKVPSKKFKVLGNTDRHSIKKNLIGALLFDSGETAEATRLKRTARRRYTRRKNRICYLQEIFSNEMAKVDDSFFHRLEESFLVEEDKKHERHPIFGNIVDEVAYHEKYPTIYHLRKKLVDSTDKADLRLIYLALAHMIKFRGHFLIEGDLNPDNSDVDKLFIQLVQTYNQLFEENPINASGVDAKAILSARLSKSRRLENLIAQLPGEKKNGLFGNLIALSLGLTPNFKSNFDLAEDAKLQLSKDTYDDDLDNLLAQIGDQYADLFLAAKNLSDAILLSDILRVNTEITKAPLSASMIKRYDEHHQDLTLLKALVRQQLPEKYKEIFFDQSKNGYAGYIDGGASQEEFYKFIKPILEKMDGTEELLVKLNREDLLRKQRTFDNGSIPHQIHLGELHAILRRQEDFYPFLKDNREKIEKILTFRIPYYVGPLARGNSRFAWMTRKSEETITPWNFEEVVDKGASAQSFIERMTNFDKNLPNEKVLPKHSLLYEYFTVYNELTKVKYVTEGMRKPAFLSGEQKKAIVDLLFKTNRKVTVKQLKEDYFKKIECFDSVEISGVEDRFNASLGTYHDLLKIIKDKDFLDNEENEDILEDIVLTLTLFEDREMIEERLKTYAHLFDDKVMKQLKRRRYTGWGRLSRKLINGIRDKQSGKTILDFLKSDGFANRNFMQLIHDDSLTFKEDIQKAQVSGQGDSLHEHIANLAGSPAIKKGILQTVKVVDELVKVMGRHKPENIVIEMARENQTTQKGQKNSRERMKRIEEGIKELGSQILKEHPVENTQLQNEKLYLYYLQNGRDMYVDQELDINRLSDYDVDHIVPQSFLKDDSIDNKVLTRSDKARGKSDNVPSEEVVKKMKNYWRQLLNAKLITQRKFDNLTKAERGGLSELDKAGFIKRQLVETRQITKHVAQILDSRMNTKYDENDKLIREVKVITLKSKLVSDFRKDFQFYKVREINNYHHAHDAYLNAVVGTALIKKYPKLESEFVYGDYKVYDVRKMIAKSEQEIGKATAKYFFYSNIMNFFKTEITLANGEIRKRPLIETNGETGEIVWDKGRDFATVRKVLSMPQVNIVKKTEVQTGGFSKESILPKRNSDKLIARKKDWDPKKYGGFDSPTVAYSVLVVAKVEKGKSKKLKSVKELLGITIMERSSFEKNPIDFLEAKGYKEVKKDLIIKLPKYSLFELENGRKRMLASAGELQKGNELALPSKYVNFLYLASHYEKLKGSPEDNEQKQLFVEQHKHYLDEIIEQISEFSKRVILADANLDKVLSAYNKHRDKPIREQAENIIHLFTLTNLGAPAAFKYFDTTIDRKRYTSTKEVLDATLIHQSITGLYETRIDLSQLGGDGGEAAAKEAAAKEAAAKGGVLNLEEEYRLHEKPVPSSIDPSWLQLFPTVWAERAGMGLANQVPPVVVELRSGASPVAVRQYPMSKEAREGIRPHIQKFLDLGVLVPCRSPWNTPLLPVKKPGTNDYRPVQDLREINKRVQDIHPTVPNPYNLLSSLPPSYTWYSVLDLKDAFFCLRLHPNSQPLFAFEWKDPEKGNTGQLTWTRLPQGFKNSPTLFNEALHRDLAPFRALNPQVVLLQYVDDLLVAAPTYEDCKKGTQKLLQELSKLGYRVSAKKAQLCQREVTYLGYLLKEGKRWLTPARKATVMKIPVPTTPRQVREFLGKAGFCRLFIPGFASLAAPLYPLTKPSIPFIWTEEHQQAFDHIKKALLSAPALALPDLTKPFTLYIDERAGVARGVLTQTLGPWRRPVAYLSKKLDPVASGWPTCLKAVAAVALLLKDADKLTLGQNVTVIASHSLESIVRQPPDRWMTNARMTHYQSLLLNERVSFAPPAVLNPATLLPVESEATPVHRCSEILAEETGTRRDLEDQPLPGVPTWYTDGSSFITEGKRRAGAPIVDGKRTVWASSLPEGTSAQKAELVALTQALRLAEGKNINIYTDSRYAFATAHIHGAIYKQRGWLTSAGKDIKNKEEILALLEAIHLPRRVAIIHCPGHQRGSNPVATGNRRADEAAKQAALSTRVLAGTTKPAGKRTADGSEFEKRTADGSEFESPKKKAKVE

SEQ ID NO: 1453 - protein, 2094 aa, synthetic construct
MPAAKRVKLDGGDKKYSIGLDIGTNSVGWAVITDEYKVPSKKFKVLGNTDRHSIKKNLIGALLFDSGETAEATRLKRTARRRYTRRKNRICYLQEIFSNEMAKVDDSFFHRLEESFLVEEDKKHERHPIFGNIVDEVAYHEKYPTIYHLRKKLVDSTDKADLRLIYLALAHMIKFRGHFLIEGDLNPDNSDVDKLFIQLVQTYNQLFEENPINASGVDAKAILSARLSKSRRLENLIAQLPGEKKNGLFGNLIALSLGLTPNFKSNFDLAEDAKLQLSKDTYDDDLDNLLAQIGDQYADLFLAAKNLSDAILLSDILRVNTEITKAPLSASMIKRYDEHHQDLTLLKALVRQQLPEKYKEIFFDQSKNGYAGYIDGGASQEEFYKFIKPILEKMDGTEELLVKLNREDLLRKQRTFDNGSIPHQIHLGELHAILRRQEDFYPFLKDNREKIEKILTFRIPYYVGPLARGNSRFAWMTRKSEETITPWNFEEVVDKGASAQSFIERMTNFDKNLPNEKVLPKHSLLYEYFTVYNELTKVKYVTEGMRKPAFLSGEQKKAIVDLLFKTNRKVTVKQLKEDYFKKIECFDSVEISGVEDRFNASLGTYHDLLKIIKDKDFLDNEENEDILEDIVLTLTLFEDREMIEERLKTYAHLFDDKVMKQLKRRRYTGWGRLSRKLINGIRDKQSGKTILDFLKSDGFANRNFMQLIHDDSLTFKEDIQKAQVSGQGDSLHEHIANLAGSPAIKKGILQTVKVVDELVKVMGRHKPENIVIEMARENQTTQKGQKNSRERMKRIEEGIKELGSQILKEHPVENTQLQNEKLYLYYLQNGRDMYVDQELDINRLSDYDVDHIVPQSFLKDDSIDNKVLTRSDKARGKSDNVPSEEVVKKMKNYWRQLLNAKLITQRKFDNLTKAERGGLSELDKAGFIKRQLVETRQITKHVAQILDSRMNTKYDENDKLIREVKVITLKSKLVSDFRKDFQFYKVREINNYHHAHDAYLNAVVGTALIKKYPKLESEFVYGDYKVYDVRKMIAKSEQEIGKATAKYFFYSNIMNFFKTEITLANGEIRKRPLIETNGETGEIVWDKGRDFATVRKVLSMPQVNIVKKTEVQTGGFSKESILPKRNSDKLIARKKDWDPKKYGGFDSPTVAYSVLVVAKVEKGKSKKLKSVKELLGITIMERSSFEKNPIDFLEAKGYKEVKKDLIIKLPKYSLFELENGRKRMLASAGELQKGNELALPSKYVNFLYLASHYEKLKGSPEDNEQKQLFVEQHKHYLDEIIEQISEFSKRVILADANLDKVLSAYNKHRDKPIREQAENIIHLFTLTNLGAPAAFKYFDTTIDRKRYTSTKEVLDATLIHQSITGLYETRIDLSQLGGDGGPAPAPAPAPAPGGVLNLEEEYRLHEKPVPSSIDPSWLQLFPTVWAERAGMGLANQVPPVVVELRSGASPVAVRQYPMSKEAREGIRPHIQKFLDLGVLVPCRSPWNTPLLPVKKPGTNDYRPVQDLREINKRVQDIHPTVPNPYNLLSSLPPSYTWYSVLDLKDAFFCLRLHPNSQPLFAFEWKDPEKGNTGQLTWTRLPQGFKNSPTLFNEALHRDLAPFRALNPQVVLLQYVDDLLVAAPTYEDCKKGTQKLLQELSKLGYRVSAKKAQLCQREVTYLGYLLKEGKRWLTPARKATVMKIPVPTTPRQVREFLGKAGFCRLFIPGFASLAAPLYPLTKPSIPFIWTEEHQQAFDHIKKALLSAPALALPDLTKPFTLYIDERAGVARGVLTQTLGPWRRPVAYLSKKLDPVASGWPTCLKAVAAVALLLKDADKLTLGQNVTVIASHSLESIVRQPPDRWMTNARMTHYQSLLLNERVSFAPPAVLNPATLLPVESEATPVHRCSEILAEETGTRRDLEDQPLPGVPTWYTDGSSFITEGKRRAGAPIVDGKRTVWASSLPEGTSAQKAELVALTQALRLAEGKNINIYTDSRYAFATAHIHGAIYKQRGWLTSAGKDIKNKEEILALLEAIHLPRRVAIIHCPGHQRGSNPVATGNRRADEAAKQAALSTRVLAGTTKPAGKRTADGSEFEKRTADGSEFESPKKKAKVE

SEQ ID NO: 1454 - protein, 2113 aa, synthetic construct
MPAAKRVKLDGGDKKYSIGLDIGTNSVGWAVITDEYKVPSKKFKVLGNTDRHSIKKNLIGALLFDSGETAEATRLKRTARRRYTRRKNRICYLQEIFSNEMAKVDDSFFHRLEESFLVEEDKKHERHPIFGNIVDEVAYHEKYPTIYHLRKKLVDSTDKADLRLIYLALAHMIKFRGHFLIEGDLNPDNSDVDKLFIQLVQTYNQLFEENPINASGVDAKAILSARLSKSRRLENLIAQLPGEKKNGLFGNLIALSLGLTPNFKSNFDLAEDAKLQLSKDTYDDDLDNLLAQIGDQYADLFLAAKNLSDAILLSDILRVNTEITKAPLSASMIKRYDEHHQDLTLLKALVRQQLPEKYKEIFFDQSKNGYAGYIDGGASQEEFYKFIKPILEKMDGTEELLVKLNREDLLRKQRTFDNGSIPHQIHLGELHAILRRQEDFYPFLKDNREKIEKILTFRIPYYVGPLARGNSRFAWMTRKSEETITPWNFEEVVDKGASAQSFIERMTNFDKNLPNEKVLPKHSLLYEYFTVYNELTKVKYVTEGMRKPAFLSGEQKKAIVDLLFKTNRKVTVKQLKEDYFKKIECFDSVEISGVEDRFNASLGTYHDLLKIIKDKDFLDNEENEDILEDIVLTLTLFEDREMIEERLKTYAHLFDDKVMKQLKRRRYTGWGRLSRKLINGIRDKQSGKTILDFLKSDGFANRNFMQLIHDDSLTFKEDIQKAQVSGQGDSLHEHIANLAGSPAIKKGILQTVKVVDELVKVMGRHKPENIVIEMARENQTTQKGQKNSRERMKRIEEGIKELGSQILKEHPVENTQLQNEKLYLYYLQNGRDMYVDQELDINRLSDYDVDHIVPQSFLKDDSIDNKVLTRSDKARGKSDNVPSEEVVKKMKNYWRQLLNAKLITQRKFDNLTKAERGGLSELDKAGFIKRQLVETRQITKHVAQILDSRMNTKYDENDKLIREVKVITLKSKLVSDFRKDFQFYKVREINNYHHAHDAYLNAVVGTALIKKYPKLESEFVYGDYKVYDVRKMIAKSEQEIGKATAKYFFYSNIMNFFKTEITLANGEIRKRPLIETNGETGEIVWDKGRDFATVRKVLSMPQVNIVKKTEVQTGGFSKESILPKRNSDKLIARKKDWDPKKYGGFDSPTVAYSVLVVAKVEKGKSKKLKSVKELLGITIMERSSFEKNPIDFLEAKGYKEVKKDLIIKLPKYSLFELENGRKRMLASAGELQKGNELALPSKYVNFLYLASHYEKLKGSPEDNEQKQLFVEQHKHYLDEIIEQISEFSKRVILADANLDKVLSAYNKHRDKPIREQAENIIHLFTLTNLGAPAAFKYFDTTIDRKRYTSTKEVLDATLIHQSITGLYETRIDLSQLGGDGGEAAAKEAAAKEAAAKEAAAKEAAAKEAAAKGGVLNLEEEYRLHEKPVPSSIDPSWLQLFPTVWAERAGMGLANQVPPVVVELRSGASPVAVRQYPMSKEAREGIRPHIQKFLDLGVLVPCRSPWNTPLLPVKKPGTNDYRPVQDLREINKRVQDIHPTVPNPYNLLSSLPPSYTWYSVLDLKDAFFCLRLHPNSQPLFAFEWKDPEKGNTGQLTWTRLPQGFKNSPTLFNEALHRDLAPFRALNPQVVLLQYVDDLLVAAPTYEDCKKGTQKLLQELSKLGYRVSAKKAQLCQREVTYLGYLLKEGKRWLTPARKATVMKIPVPTTPRQVREFLGKAGFCRLFIPGFASLAAPLYPLTKPSIPFIWTEEHQQAFDHIKKALLSAPALALPDLTKPFTLYIDERAGVARGVLTQTLGPWRRPVAYLSKKLDPVASGWPTCLKAVAAVALLLKDADKLTLGQNVTVIASHSLESIVRQPPDRWMTNARMTHYQSLLLNERVSFAPPAVLNPATLLPVESEATPVHRCSEILAEETGTRRDLEDQPLPGVPTWYTDGSSFITEGKRRAGAPIVDGKRTVWASSLPEGTSAQKAELVALTQALRLAEGKNINIYTDSRYAFATAHIHGAIYKQRGWLTSAGKDIKNKEEILALLEAIHLPRRVAIIHCPGHQRGSNPVATGNRRADEAAKQAALSTRVLAGTTKPAGKRTADGSEFEKRTADGSEFESPKKKAKVE

SEQ ID NO: 1455 - protein, 2094 aa, synthetic construct
MPAAKRVKLDGGDKKYSIGLDIGTNSVGWAVITDEYKVPSKKFKVLGNTDRHSIKKNLIGALLFDSGETAEATRLKRTARRRYTRRKNRICYLQEIFSNEMAKVDDSFFHRLEESFLVEEDKKHERHPIFGNIVDEVAYHEKYPTIYHLRKKLVDSTDKADLRLIYLALAHMIKFRGHFLIEGDLNPDNSDVDKLFIQLVQTYNQLFEENPINASGVDAKAILSARLSKSRRLENLIAQLPGEKKNGLFGNLIALSLGLTPNFKSNFDLAEDAKLQLSKDTYDDDLDNLLAQIGDQYADLFLAAKNLSDAILLSDILRVNTEITKAPLSASMIKRYDEHHQDLTLLKALVRQQLPEKYKEIFFDQSKNGYAGYIDGGASQEEFYKFIKPILEKMDGTEELLVKLNREDLLRKQRTFDNGSIPHQIHLGELHAILRRQEDFYPFLKDNREKIEKILTFRIPYYVGPLARGNSRFAWMTRKSEETITPWNFEEVVDKGASAQSFIERMTNFDKNLPNEKVLPKHSLLYEYFTVYNELTKVKYVTEGMRKPAFLSGEQKKAIVDLLFKTNRKVTVKQLKEDYFKKIECFDSVEISGVEDRFNASLGTYHDLLKIIKDKDFLDNEENEDILEDIVLTLTLFEDREMIEERLKTYAHLFDDKVMKQLKRRRYTGWGRLSRKLINGIRDKQSGKTILDFLKSDGFANRNFMQLIHDDSLTFKEDIQKAQVSGQGDSLHEHIANLAGSPAIKKGILQTVKVVDELVKVMGRHKPENIVIEMARENQTTQKGQKNSRERMKRIEEGIKELGSQILKEHPVENTQLQNEKLYLYYLQNGRDMYVDQELDINRLSDYDVDHIVPQSFLKDDSIDNKVLTRSDKARGKSDNVPSEEVVKKMKNYWRQLLNAKLITQRKFDNLTKAERGGLSELDKAGFIKRQLVETRQITKHVAQILDSRMNTKYDENDKLIREVKVITLKSKLVSDFRKDFQFYKVREINNYHHAHDAYLNAVVGTALIKKYPKLESEFVYGDYKVYDVRKMIAKSEQEIGKATAKYFFYSNIMNFFKTEITLANGEIRKRPLIETNGETGEIVWDKGRDFATVRKVLSMPQVNIVKKTEVQTGGFSKESILPKRNSDKLIARKKDWDPKKYGGFDSPTVAYSVLVVAKVEKGKSKKLKSVKELLGITIMERSSFEKNPIDFLEAKGYKEVKKDLIIKLPKYSLFELENGRKRMLASAGELQKGNELALPSKYVNFLYLASHYEKLKGSPEDNEQKQLFVEQHKHYLDEIIEQISEFSKRVILADANLDKVLSAYNKHRDKPIREQAENIIHLFTLTNLGAPAAFKYFDTTIDRKRYTSTKEVLDATLIHQSITGLYETRIDLSQLGGDGGEAAAKGGGGSSGGVLNLEEEYRLHEKPVPSSIDPSWLQLFPTVWAERAGMGLANQVPPVVVELRSGASPVAVRQYPMSKEAREGIRPHIQKFLDLGVLVPCRSPWNTPLLPVKKPGTNDYRPVQDLREINKRVQDIHPTVPNPYNLLSSLPPSYTWYSVLDLKDAFFCLRLHPNSQPLFAFEWKDPEKGNTGQLTWTRLPQGFKNSPTLFNEALHRDLAPFRALNPQVVLLQYVDDLLVAAPTYEDCKKGTQKLLQELSKLGYRVSAKKAQLCQREVTYLGYLLKEGKRWLTPARKATVMKIPVPTTPRQVREFLGKAGFCRLFIPGFASLAAPLYPLTKPSIPFIWTEEHQQAFDHIKKALLSAPALALPDLTKPFTLYIDERAGVARGVLTQTLGPWRRPVAYLSKKLDPVASGWPTCLKAVAAVALLLKDADKLTLGQNVTVIASHSLESIVRQPPDRWMTNARMTHYQSLLLNERVSFAPPAVLNPATLLPVESEATPVHRCSEILAEETGTRRDLEDQPLPGVPTWYTDGSSFITEGKRRAGAPIVDGKRTVWASSLPEGTSAQKAELVALTQALRLAEGKNINIYTDSRYAFATAHIHGAIYKQRGWLTSAGKDIKNKEEILALLEAIHLPRRVAIIHCPGHQRGSNPVATGNRRADEAAKQAALSTRVLAGTTKPAGKRTADGSEFEKRTADGSEFESPKKKAKVE

SEQ ID NO: 1456 - protein, 2094 aa, synthetic construct
MPAAKRVKLDGGDKKYSIGLDIGTNSVGWAVITDEYKVPSKKFKVLGNTDRHSIKKNLIGALLFDSGETAEATRLKRTARRRYTRRKNRICYLQEIFSNEMAKVDDSFFHRLEESFLVEEDKKHERHPIFGNIVDEVAYHEKYPTIYHLRKKLVDSTDKADLRLIYLALAHMIKFRGHFLIEGDLNPDNSDVDKLFIQLVQTYNQLFEENPINASGVDAKAILSARLSKSRRLENLIAQLPGEKKNGLFGNLIALSLGLTPNFKSNFDLAEDAKLQLSKDTYDDDLDNLLAQIGDQYADLFLAAKNLSDAILLSDILRVNTEITKAPLSASMIKRYDEHHQDLTLLKALVRQQLPEKYKEIFFDQSKNGYAGYIDGGASQEEFYKFIKPILEKMDGTEELLVKLNREDLLRKQRTFDNGSIPHQIHLGELHAILRRQEDFYPFLKDNREKIEKILTFRIPYYVGPLARGNSRFAWMTRKSEETITPWNFEEVVDKGASAQSFIERMTNFDKNLPNEKVLPKHSLLYEYFTVYNELTKVKYVTEGMRKPAFLSGEQKKAIVDLLFKTNRKVTVKQLKEDYFKKIECFDSVEISGVEDRFNASLGTYHDLLKIIKDKDFLDNEENEDILEDIVLTLTLFEDREMIEERLKTYAHLFDDKVMKQLKRRRYTGWGRLSRKLINGIRDKQSGKTILDFLKSDGFANRNFMQLIHDDSLTFKEDIQKAQVSGQGDSLHEHIANLAGSPAIKKGILQTVKVVDELVKVMGRHKPENIVIEMARENQTTQKGQKNSRERMKRIEEGIKELGSQILKEHPVENTQLQNEKLYLYYLQNGRDMYVDQELDINRLSDYDVDHIVPQSFLKDDSIDNKVLTRSDKARGKSDNVPSEEVVKKMKNYWRQLLNAKLITQRKFDNLTKAERGGLSELDKAGFIKRQLVETRQITKHVAQILDSRMNTKYDENDKLIREVKVITLKSKLVSDFRKDFQFYKVREINNYHHAHDAYLNAVVGTALIKKYPKLESEFVYGDYKVYDVRKMIAKSEQEIGKATAKYFFYSNIMNFFKTEITLANGEIRKRPLIETNGETGEIVWDKGRDFATVRKVLSMPQVNIVKKTEVQTGGFSKESILPKRNSDKLIARKKDWDPKKYGGFDSPTVAYSVLVVAKVEKGKSKKLKSVKELLGITIMERSSFEKNPIDFLEAKGYKEVKKDLIIKLPKYSLFELENGRKRMLASAGELQKGNELALPSKYVNFLYLASHYEKLKGSPEDNEQKQLFVEQHKHYLDEIIEQISEFSKRVILADANLDKVLSAYNKHRDKPIREQAENIIHLFTLTNLGAPAAFKYFDTTIDRKRYTSTKEVLDATLIHQSITGLYETRIDLSQLGGDGGGGGGGSEAAAKGGVLNLEEEYRLHEKPVPSSIDPSWLQLFPTVWAERAGMGLANQVPPVVVELRSGASPVAVRQYPMSKEAREGIRPHIQKFLDLGVLVPCRSPWNTPLLPVKKPGTNDYRPVQDLREINKRVQDIHPTVPNPYNLLSSLPPSYTWYSVLDLKDAFFCLRLHPNSQPLFAFEWKDPEKGNTGQLTWTRLPQGFKNSPTLFNEALHRDLAPFRALNPQVVLLQYVDDLLVAAPTYEDCKKGTQKLLQELSKLGYRVSAKKAQLCQREVTYLGYLLKEGKRWLTPARKATVMKIPVPTTPRQVREFLGKAGFCRLFIPGFASLAAPLYPLTKPSIPFIWTEEHQQAFDHIKKALLSAPALALPDLTKPFTLYIDERAGVARGVLTQTLGPWRRPVAYLSKKLDPVASGWPTCLKAVAAVALLLKDADKLTLGQNVTVIASHSLESIVRQPPDRWMTNARMTHYQSLLLNERVSFAPPAVLNPATLLPVESEATPVHRCSEILAEETGTRRDLEDQPLPGVPTWYTDGSSFITEGKRRAGAPIVDGKRTVWASSLPEGTSAQKAELVALTQALRLAEGKNINIYTDSRYAFATAHIHGAIYKQRGWLTSAGKDIKNKEEILALLEAIHLPRRVAIIHCPGHQRGSNPVATGNRRADEAAKQAALSTRVLAGTTKPAGKRTADGSEFEKRTADGSEFESPKKKAKVE

SEQ ID NO: 1457 - protein, 2094 aa, synthetic construct
MPAAKRVKLDGGDKKYSIGLDIGTNSVGWAVITDEYKVPSKKFKVLGNTDRHSIKKNLIGALLFDSGETAEATRLKRTARRRYTRRKNRICYLQEIFSNEMAKVDDSFFHRLEESFLVEEDKKHERHPIFGNIVDEVAYHEKYPTIYHLRKKLVDSTDKADLRLIYLALAHMIKFRGHFLIEGDLNPDNSDVDKLFIQLVQTYNQLFEENPINASGVDAKAILSARLSKSRRLENLIAQLPGEKKNGLFGNLIALSLGLTPNFKSNFDLAEDAKLQLSKDTYDDDLDNLLAQIGDQYADLFLAAKNLSDAILLSDILRVNTEITKAPLSASMIKRYDEHHQDLTLLKALVRQQLPEKYKEIFFDQSKNGYAGYIDGGASQEEFYKFIKPILEKMDGTEELLVKLNREDLLRKQRTFDNGSIPHQIHLGELHAILRRQEDFYPFLKDNREKIEKILTFRIPYYVGPLARGNSRFAWMTRKSEETITPWNFEEVVDKGASAQSFIERMTNFDKNLPNEKVLPKHSLLYEYFTVYNELTKVKYVTEGMRKPAFLSGEQKKAIVDLLFKTNRKVTVKQLKEDYFKKIECFDSVEISGVEDRFNASLGTYHDLLKIIKDKDFLDNEENEDILEDIVLTLTLFEDREMIEERLKTYAHLFDDKVMKQLKRRRYTGWGRLSRKLINGIRDKQSGKTILDFLKSDGFANRNFMQLIHDDSLTFKEDIQKAQVSGQGDSLHEHIANLAGSPAIKKGILQTVKVVDELVKVMGRHKPENIVIEMARENQTTQKGQKNSRERMKRIEEGIKELGSQILKEHPVENTQLQNEKLYLYYLQNGRDMYVDQELDINRLSDYDVDHIVPQSFLKDDSIDNKVLTRSDKARGKSDNVPSEEVVKKMKNYWRQLLNAKLITQRKFDNLTKAERGGLSELDKAGFIKRQLVETRQITKHVAQILDSRMNTKYDENDKLIREVKVITLKSKLVSDFRKDFQFYKVREINNYHHAHDAYLNAVVGTALIKKYPKLESEFVYGDYKVYDVRKMIAKSEQEIGKATAKYFFYSNIMNFFKTEITLANGEIRKRPLIETNGETGEIVWDKGRDFATVRKVLSMPQVNIVKKTEVQTGGFSKESILPKRNSDKLIARKKDWDPKKYGGFDSPTVAYSVLVVAKVEKGKSKKLKSVKELLGITIMERSSFEKNPIDFLEAKGYKEVKKDLIIKLPKYSLFELENGRKRMLASAGELQKGNELALPSKYVNFLYLASHYEKLKGSPEDNEQKQLFVEQHKHYLDEIIEQISEFSKRVILADANLDKVLSAYNKHRDKPIREQAENIIHLFTLTNLGAPAAFKYFDTTIDRKRYTSTKEVLDATLIHQSITGLYETRIDLSQLGGDGGGSSPAPEAAAKGGVLNLEEEYRLHEKPVPSSIDPSWLQLFPTVWAERAGMGLANQVPPVVVELRSGASPVAVRQYPMSKEAREGIRPHIQKFLDLGVLVPCRSPWNTPLLPVKKPGTNDYRPVQDLREINKRVQDIHPTVPNPYNLLSSLPPSYTWYSVLDLKDAFFCLRLHPNSQPLFAFEWKDPEKGNTGQLTWTRLPQGFKNSPTLFNEALHRDLAPFRALNPQVVLLQYVDDLLVAAPTYEDCKKGTQKLLQELSKLGYRVSAKKAQLCQREVTYLGYLLKEGKRWLTPARKATVMKIPVPTTPRQVREFLGKAGFCRLFIPGFASLAAPLYPLTKPSIPFIWTEEHQQAFDHIKKALLSAPALALPDLTKPFTLYIDERAGVARGVLTQTLGPWRRPVAYLSKKLDPVASGWPTCLKAVAAVALLLKDADKLTLGQNVTVIASHSLESIVRQPPDRWMTNARMTHYQSLLLNERVSFAPPAVLNPATLLPVESEATPVHRCSEILAEETGTRRDLEDQPLPGVPTWYTDGSSFITEGKRRAGAPIVDGKRTVWASSLPEGTSAQKAELVALTQALRLAEGKNINIYTDSRYAFATAHIHGAIYKQRGWLTSAGKDIKNKEEILALLEAIHLPRRVAIIHCPGHQRGSNPVATGNRRADEAAKQAALSTRVLAGTTKPAGKRTADGSEFEKRTADGSEFESPKKKAKVE

SEQ ID NO: 1458 - protein, 2098 aa, synthetic construct
MPAAKRVKLDGGDKKYSIGLDIGTNSVGWAVITDEYKVPSKKFKVLGNTDRHSIKKNLIGALLFDSGETAEATRLKRTARRRYTRRKNRICYLQEIFSNEMAKVDDSFFHRLEESFLVEEDKKHERHPIFGNIVDEVAYHEKYPTIYHLRKKLVDSTDKADLRLIYLALAHMIKFRGHFLIEGDLNPDNSDVDKLFIQLVQTYNQLFEENPINASGVDAKAILSARLSKSRRLENLIAQLPGEKKNGLFGNLIALSLGLTPNFKSNFDLAEDAKLQLSKDTYDDDLDNLLAQIGDQYADLFLAAKNLSDAILLSDILRVNTEITKAPLSASMIKRYDEHHQDLTLLKALVRQQLPEKYKEIFFDQSKNGYAGYIDGGASQEEFYKFIKPILEKMDGTEELLVKLNREDLLRKQRTFDNGSIPHQIHLGELHAILRRQEDFYPFLKDNREKIEKILTFRIPYYVGPLARGNSRFAWMTRKSEETITPWNFEEVVDKGASAQSFIERMTNFDKNLPNEKVLPKHSLLYEYFTVYNELTKVKYVTEGMRKPAFLSGEQKKAIVDLLFKTNRKVTVKQLKEDYFKKIECFDSVEISGVEDRFNASLGTYHDLLKIIKDKDFLDNEENEDILEDIVLTLTLFEDREMIEERLKTYAHLFDDKVMKQLKRRRYTGWGRLSRKLINGIRDKQSGKTILDFLKSDGFANRNFMQLIHDDSLTFKEDIQKAQVSGQGDSLHEHIANLAGSPAIKKGILQTVKVVDELVKVMGRHKPENIVIEMARENQTTQKGQKNSRERMKRIEEGIKELGSQILKEHPVENTQLQNEKLYLYYLQNGRDMYVDQELDINRLSDYDVDHIVPQSFLKDDSIDNKVLTRSDKARGKSDNVPSEEVVKKMKNYWRQLLNAKLITQRKFDNLTKAERGGLSELDKAGFIKRQLVETRQITKHVAQILDSRMNTKYDENDKLIREVKVITLKSKLVSDFRKDFQFYKVREINNYHHAHDAYLNAVVGTALIKKYPKLESEFVYGDYKVYDVRKMIAKSEQEIGKATAKYFFYSNIMNFFKTEITLANGEIRKRPLIETNGETGEIVWDKGRDFATVRKVLSMPQVNIVKKTEVQTGGFSKESILPKRNSDKLIARKKDWDPKKYGGFDSPTVAYSVLVVAKVEKGKSKKLKSVKELLGITIMERSSFEKNPIDFLEAKGYKEVKKDLIIKLPKYSLFELENGRKRMLASAGELQKGNELALPSKYVNFLYLASHYEKLKGSPEDNEQKQLFVEQHKHYLDEIIEQISEFSKRVILADANLDKVLSAYNKHRDKPIREQAENIIHLFTLTNLGAPAAFKYFDTTIDRKRYTSTKEVLDATLIHQSITGLYETRIDLSQLGGDGGGGGGSGGGGSGGGGSGGVLNLEEEYRLHEKPVPSSIDPSWLQLFPTVWAERAGMGLANQVPPVVVELRSGASPVAVRQYPMSKEAREGIRPHIQKFLDLGVLVPCRSPWNTPLLPVKKPGTNDYRPVQDLREINKRVQDIHPTVPNPYNLLSSLPPSYTWYSVLDLKDAFFCLRLHPNSQPLFAFEWKDPEKGNTGQLTWTRLPQGFKNSPTLFNEALHRDLAPFRALNPQVVLLQYVDDLLVAAPTYEDCKKGTQKLLQELSKLGYRVSAKKAQLCQREVTYLGYLLKEGKRWLTPARKATVMKIPVPTTPRQVREFLGKAGFCRLFIPGFASLAAPLYPLTKPSIPFIWTEEHQQAFDHIKKALLSAPALALPDLTKPFTLYIDERAGVARGVLTQTLGPWRRPVAYLSKKLDPVASGWPTCLKAVAAVALLLKDADKLTLGQNVTVIASHSLESIVRQPPDRWMTNARMTHYQSLLLNERVSFAPPAVLNPATLLPVESEATPVHRCSEILAEETGTRRDLEDQPLPGVPTWYTDGSSFITEGKRRAGAPIVDGKRTVWASSLPEGTSAQKAELVALTQALRLAEGKNINIYTDSRYAFATAHIHGAIYKQRGWLTSAGKDIKNKEEILALLEAIHLPRRVAIIHCPGHQRGSNPVATGNRRADEAAKQAALSTRVLAGTTKPAGKRTADGSEFEKRTADGSEFESPKKKAKVE

SEQ ID NO: 1459 - protein, 2094 aa, synthetic construct
MPAAKRVKLDGGDKKYSIGLDIGTNSVGWAVITDEYKVPSKKFKVLGNTDRHSIKKNLIGALLFDSGETAEATRLKRTARRRYTRRKNRICYLQEIFSNEMAKVDDSFFHRLEESFLVEEDKKHERHPIFGNIVDEVAYHEKYPTIYHLRKKLVDSTDKADLRLIYLALAHMIKFRGHFLIEGDLNPDNSDVDKLFIQLVQTYNQLFEENPINASGVDAKAILSARLSKSRRLENLIAQLPGEKKNGLFGNLIALSLGLTPNFKSNFDLAEDAKLQLSKDTYDDDLDNLLAQIGDQYADLFLAAKNLSDAILLSDILRVNTEITKAPLSASMIKRYDEHHQDLTLLKALVRQQLPEKYKEIFFDQSKNGYAGYIDGGASQEEFYKFIKPILEKMDGTEELLVKLNREDLLRKQRTFDNGSIPHQIHLGELHAILRRQEDFYPFLKDNREKIEKILTFRIPYYVGPLARGNSRFAWMTRKSEETITPWNFEEVVDKGASAQSFIERMTNFDKNLPNEKVLPKHSLLYEYFTVYNELTKVKYVTEGMRKPAFLSGEQKKAIVDLLFKTNRKVTVKQLKEDYFKKIECFDSVEISGVEDRFNASLGTYHDLLKIIKDKDFLDNEENEDILEDIVLTLTLFEDREMIEERLKTYAHLFDDKVMKQLKRRRYTGWGRLSRKLINGIRDKQSGKTILDFLKSDGFANRNFMQLIHDDSLTFKEDIQKAQVSGQGDSLHEHIANLAGSPAIKKGILQTVKVVDELVKVMGRHKPENIVIEMARENQTTQKGQKNSRERMKRIEEGIKELGSQILKEHPVENTQLQNEKLYLYYLQNGRDMYVDQELDINRLSDYDVDHIVPQSFLKDDSIDNKVLTRSDKARGKSDNVPSEEVVKKMKNYWRQLLNAKLITQRKFDNLTKAERGGLSELDKAGFIKRQLVETRQITKHVAQILDSRMNTKYDENDKLIREVKVITLKSKLVSDFRKDFQFYKVREINNYHHAHDAYLNAVVGTALIKKYPKLESEFVYGDYKVYDVRKMIAKSEQEIGKATAKYFFYSNIMNFFKTEITLANGEIRKRPLIETNGETGEIVWDKGRDFATVRKVLSMPQVNIVKKTEVQTGGFSKESILPKRNSDKLIARKKDWDPKKYGGFDSPTVAYSVLVVAKVEKGKSKKLKSVKELLGITIMERSSFEKNPIDFLEAKGYKEVKKDLIIKLPKYSLFELENGRKRMLASAGELQKGNELALPSKYVNFLYLASHYEKLKGSPEDNEQKQLFVEQHKHYLDEIIEQISEFSKRVILADANLDKVLSAYNKHRDKPIREQAENIIHLFTLTNLGAPAAFKYFDTTIDRKRYTSTKEVLDATLIHQSITGLYETRIDLSQLGGDGGPAPGGGEAAAKGGVLNLEEEYRLHEKPVPSSIDPSWLQLFPTVWAERAGMGLANQVPPVVVELRSGASPVAVRQYPMSKEAREGIRPHIQKFLDLGVLVPCRSPWNTPLLPVKKPGTNDYRPVQDLREINKRVQDIHPTVPNPYNLLSSLPPSYTWYSVLDLKDAFFCLRLHPNSQPLFAFEWKDPEKGNTGQLTWTRLPQGFKNSPTLFNEALHRDLAPFRALNPQVVLLQYVDDLLVAAPTYEDCKKGTQKLLQELSKLGYRVSAKKAQLCQREVTYLGYLLKEGKRWLTPARKATVMKIPVPTTPRQVREFLGKAGFCRLFIPGFASLAAPLYPLTKPSIPFIWTEEHQQAFDHIKKALLSAPALALPDLTKPFTLYIDERAGVARGVLTQTLGPWRRPVAYLSKKLDPVASGWPTCLKAVAAVALLLKDADKLTLGQNVTVIASHSLESIVRQPPDRWMTNARMTHYQSLLLNERVSFAPPAVLNPATLLPVESEATPVHRCSEILAEETGTRRDLEDQPLPGVPTWYTDGSSFITEGKRRAGAPIVDGKRTVWASSLPEGTSAQKAELVALTQALRLAEGKNINIYTDSRYAFATAHIHGAIYKQRGWLTSAGKDIKNKEEILALLEAIHLPRRVAIIHCPGHQRGSNPVATGNRRADEAAKQAALSTRVLAGTTKPAGKRTADGSEFEKRTADGSEFESPKKKAKVE

SEQ ID NO: 1460 - protein, 2092 aa, synthetic construct
MPAAKRVKLDGGDKKYSIGLDIGTNSVGWAVITDEYKVPSKKFKVLGNTDRHSIKKNLIGALLFDSGETAEATRLKRTARRRYTRRKNRICYLQEIFSNEMAKVDDSFFHRLEESFLVEEDKKHERHPIFGNIVDEVAYHEKYPTIYHLRKKLVDSTDKADLRLIYLALAHMIKFRGHFLIEGDLNPDNSDVDKLFIQLVQTYNQLFEENPINASGVDAKAILSARLSKSRRLENLIAQLPGEKKNGLFGNLIALSLGLTPNFKSNFDLAEDAKLQLSKDTYDDDLDNLLAQIGDQYADLFLAAKNLSDAILLSDILRVNTEITKAPLSASMIKRYDEHHQDLTLLKALVRQQLPEKYKEIFFDQSKNGYAGYIDGGASQEEFYKFIKPILEKMDGTEELLVKLNREDLLRKQRTFDNGSIPHQIHLGELHAILRRQEDFYPFLKDNREKIEKILTFRIPYYVGPLARGNSRFAWMTRKSEETITPWNFEEVVDKGASAQSFIERMTNFDKNLPNEKVLPKHSLLYEYFTVYNELTKVKYVTEGMRKPAFLSGEQKKAIVDLLFKTNRKVTVKQLKEDYFKKIECFDSVEISGVEDRFNASLGTYHDLLKIIKDKDFLDNEENEDILEDIVLTLTLFEDREMIEERLKTYAHLFDDKVMKQLKRRRYTGWGRLSRKLINGIRDKQSGKTILDFLKSDGFANRNFMQLIHDDSLTFKEDIQKAQVSGQGDSLHEHIANLAGSPAIKKGILQTVKVVDELVKVMGRHKPENIVIEMARENQTTQKGQKNSRERMKRIEEGIKELGSQILKEHPVENTQLQNEKLYLYYLQNGRDMYVDQELDINRLSDYDVDHIVPQSFLKDDSIDNKVLTRSDKARGKSDNVPSEEVVKKMKNYWRQLLNAKLITQRKFDNLTKAERGGLSELDKAGFIKRQLVETRQITKHVAQILDSRMNTKYDENDKLIREVKVITLKSKLVSDFRKDFQFYKVREINNYHHAHDAYLNAVVGTALIKKYPKLESEFVYGDYKVYDVRKMIAKSEQEIGKATAKYFFYSNIMNFFKTEITLANGEIRKRPLIETNGETGEIVWDKGRDFATVRKVLSMPQVNIVKKTEVQTGGFSKESILPKRNSDKLIARKKDWDPKKYGGFDSPTVAYSVLVVAKVEKGKSKKLKSVKELLGITIMERSSFEKNPIDFLEAKGYKEVKKDLIIKLPKYSLFELENGRKRMLASAGELQKGNELALPSKYVNFLYLASHYEKLKGSPEDNEQKQLFVEQHKHYLDEIIEQISEFSKRVILADANLDKVLSAYNKHRDKPIREQAENIIHLFTLTNLGAPAAFKYFDTTIDRKRYTSTKEVLDATLIHQSITGLYETRIDLSQLGGDGGPAPGGGGGSGGVLNLEEEYRLHEKPVPSSIDPSWLQLFPTVWAERAGMGLANQVPPVVVELRSGASPVAVRQYPMSKEAREGIRPHIQKFLDLGVLVPCRSPWNTPLLPVKKPGTNDYRPVQDLREINKRVQDIHPTVPNPYNLLSSLPPSYTWYSVLDLKDAFFCLRLHPNSQPLFAFEWKDPEKGNTGQLTWTRLPQGFKNSPTLFNEALHRDLAPFRALNPQVVLLQYVDDLLVAAPTYEDCKKGTQKLLQELSKLGYRVSAKKAQLCQREVTYLGYLLKEGKRWLTPARKATVMKIPVPTTPRQVREFLGKAGFCRLFIPGFASLAAPLYPLTKPSIPFIWTEEHQQAFDHIKKALLSAPALALPDLTKPFTLYIDERAGVARGVLTQTLGPWRRPVAYLSKKLDPVASGWPTCLKAVAAVALLLKDADKLTLGQNVTVIASHSLESIVRQPPDRWMTNARMTHYQSLLLNERVSFAPPAVLNPATLLPVESEATPVHRCSEILAEETGTRRDLEDQPLPGVPTWYTDGSSFITEGKRRAGAPIVDGKRTVWASSLPEGTSAQKAELVALTQALRLAEGKNINIYTDSRYAFATAHIHGAIYKQRGWLTSAGKDIKNKEEILALLEAIHLPRRVAIIHCPGHQRGSNPVATGNRRADEAAKQAALSTRVLAGTTKPAGKRTADGSEFEKRTADGSEFESPKKKAKVE

SEQ ID NO: 1461 - protein, 2094 aa, synthetic construct
MPAAKRVKLDGGDKKYSIGLDIGTNSVGWAVITDEYKVPSKKFKVLGNTDRHSIKKNLIGALLFDSGETAEATRLKRTARRRYTRRKNRICYLQEIFSNEMAKVDDSFFHRLEESFLVEEDKKHERHPIFGNIVDEVAYHEKYPTIYHLRKKLVDSTDKADLRLIYLALAHMIKFRGHFLIEGDLNPDNSDVDKLFIQLVQTYNQLFEENPINASGVDAKAILSARLSKSRRLENLIAQLPGEKKNGLFGNLIALSLGLTPNFKSNFDLAEDAKLQLSKDTYDDDLDNLLAQIGDQYADLFLAAKNLSDAILLSDILRVNTEITKAPLSASMIKRYDEHHQDLTLLKALVRQQLPEKYKEIFFDQSKNGYAGYIDGGASQEEFYKFIKPILEKMDGTEELLVKLNREDLLRKQRTFDNGSIPHQIHLGELHAILRRQEDFYPFLKDNREKIEKILTFRIPYYVGPLARGNSRFAWMTRKSEETITPWNFEEVVDKGASAQSFIERMTNFDKNLPNEKVLPKHSLLYEYFTVYNELTKVKYVTEGMRKPAFLSGEQKKAIVDLLFKTNRKVTVKQLKEDYFKKIECFDSVEISGVEDRFNASLGTYHDLLKIIKDKDFLDNEENEDILEDIVLTLTLFEDREMIEERLKTYAHLFDDKVMKQLKRRRYTGWGRLSRKLINGIRDKQSGKTILDFLKSDGFANRNFMQLIHDDSLTFKEDIQKAQVSGQGDSLHEHIANLAGSPAIKKGILQTVKVVDELVKVMGRHKPENIVIEMARENQTTQKGQKNSRERMKRIEEGIKELGSQILKEHPVENTQLQNEKLYLYYLQNGRDMYVDQELDINRLSDYDVDHIVPQSFLKDDSIDNKVLTRSDKARGKSDNVPSEEVVKKMKNYWRQLLNAKLITQRKFDNLTKAERGGLSELDKAGFIKRQLVETRQITKHVAQILDSRMNTKYDENDKLIREVKVITLKSKLVSDFRKDFQFYKVREINNYHHAHDAYLNAVVGTALIKKYPKLESEFVYGDYKVYDVRKMIAKSEQEIGKATAKYFFYSNIMNFFKTEITLANGEIRKRPLIETNGETGEIVWDKGRDFATVRKVLSMPQVNIVKKTEVQTGGFSKESILPKRNSDKLIARKKDWDPKKYGGFDSPTVAYSVLVVAKVEKGKSKKLKSVKELLGITIMERSSFEKNPIDFLEAKGYKEVKKDLIIKLPKYSLFELENGRKRMLASAGELQKGNELALPSKYVNFLYLASHYEKLKGSPEDNEQKQLFVEQHKHYLDEIIEQISEFSKRVILADANLDKVLSAYNKHRDKPIREQAENIIHLFTLTNLGAPAAFKYFDTTIDRKRYTSTKEVLDATLIHQSITGLYETRIDLSQLGGDGGGGGEAAAKGSSGGVLNLEEEYRLHEKPVPSSIDPSWLQLFPTVWAERAGMGLANQVPPVVVELRSGASPVAVRQYPMSKEAREGIRPHIQKFLDLGVLVPCRSPWNTPLLPVKKPGTNDYRPVQDLREINKRVQDIHPTVPNPYNLLSSLPPSYTWYSVLDLKDAFFCLRLHPNSQPLFAFEWKDPEKGNTGQLTWTRLPQGFKNSPTLFNEALHRDLAPFRALNPQVVLLQYVDDLLVAAPTYEDCKKGTQKLLQELSKLGYRVSAKKAQLCQREVTYLGYLLKEGKRWLTPARKATVMKIPVPTTPRQVREFLGKAGFCRLFIPGFASLAAPLYPLTKPSIPFIWTEEHQQAFDHIKKALLSAPALALPDLTKPFTLYIDERAGVARGVLTQTLGPWRRPVAYLSKKLDPVASGWPTCLKAVAAVALLLKDADKLTLGQNVTVIASHSLESIVRQPPDRWMTNARMTHYQSLLLNERVSFAPPAVLNPATLLPVESEATPVHRCSEILAEETGTRRDLEDQPLPGVPTWYTDGSSFITEGKRRAGAPIVDGKRTVWASSLPEGTSAQKAELVALTQALRLAEGKNINIYTDSRYAFATAHIHGAIYKQRGWLTSAGKDIKNKEEILALLEAIHLPRRVAIIHCPGHQRGSNPVATGNRRADEAAKQAALSTRVLAGTTKPAGKRTADGSEFEKRTADGSEFESPKKKAKVE

SEQ ID NO: 1462 - protein, 2088 aa, synthetic construct
MPAAKRVKLDGGDKKYSIGLDIGTNSVGWAVITDEYKVPSKKFKVLGNTDRHSIKKNLIGALLFDSGETAEATRLKRTARRRYTRRKNRICYLQEIFSNEMAKVDDSFFHRLEESFLVEEDKKHERHPIFGNIVDEVAYHEKYPTIYHLRKKLVDSTDKADLRLIYLALAHMIKFRGHFLIEGDLNPDNSDVDKLFIQLVQTYNQLFEENPINASGVDAKAILSARLSKSRRLENLIAQLPGEKKNGLFGNLIALSLGLTPNFKSNFDLAEDAKLQLSKDTYDDDLDNLLAQIGDQYADLFLAAKNLSDAILLSDILRVNTEITKAPLSASMIKRYDEHHQDLTLLKALVRQQLPEKYKEIFFDQSKNGYAGYIDGGASQEEFYKFIKPILEKMDGTEELLVKLNREDLLRKQRTFDNGSIPHQIHLGELHAILRRQEDFYPFLKDNREKIEKILTFRIPYYVGPLARGNSRFAWMTRKSEETITPWNFEEVVDKGASAQSFIERMTNFDKNLPNEKVLPKHSLLYEYFTVYNELTKVKYVTEGMRKPAFLSGEQKKAIVDLLFKTNRKVTVKQLKEDYFKKIECFDSVEISGVEDRFNASLGTYHDLLKIIKDKDFLDNEENEDILEDIVLTLTLFEDREMIEERLKTYAHLFDDKVMKQLKRRRYTGWGRLSRKLINGIRDKQSGKTILDFLKSDGFANRNFMQLIHDDSLTFKEDIQKAQVSGQGDSLHEHIANLAGSPAIKKGILQTVKVVDELVKVMGRHKPENIVIEMARENQTTQKGQKNSRERMKRIEEGIKELGSQILKEHPVENTQLQNEKLYLYYLQNGRDMYVDQELDINRLSDYDVDHIVPQSFLKDDSIDNKVLTRSDKARGKSDNVPSEEVVKKMKNYWRQLLNAKLITQRKFDNLTKAERGGLSELDKAGFIKRQLVETRQITKHVAQILDSRMNTKYDENDKLIREVKVITLKSKLVSDFRKDFQFYKVREINNYHHAHDAYLNAVVGTALIKKYPKLESEFVYGDYKVYDVRKMIAKSEQEIGKATAKYFFYSNIMNFFKTEITLANGEIRKRPLIETNGETGEIVWDKGRDFATVRKVLSMPQVNIVKKTEVQTGGFSKESILPKRNSDKLIARKKDWDPKKYGGFDSPTVAYSVLVVAKVEKGKSKKLKSVKELLGITIMERSSFEKNPIDFLEAKGYKEVKKDLIIKLPKYSLFELENGRKRMLASAGELQKGNELALPSKYVNFLYLASHYEKLKGSPEDNEQKQLFVEQHKHYLDEIIEQISEFSKRVILADANLDKVLSAYNKHRDKPIREQAENIIHLFTLTNLGAPAAFKYFDTTIDRKRYTSTKEVLDATLIHQSITGLYETRIDLSQLGGDGGGGGGSGGVLNLEEEYRLHEKPVPSSIDPSWLQLFPTVWAERAGMGLANQVPPVVVELRSGASPVAVRQYPMSKEAREGIRPHIQKFLDLGVLVPCRSPWNTPLLPVKKPGTNDYRPVQDLREINKRVQDIHPTVPNPYNLLSSLPPSYTWYSVLDLKDAFFCLRLHPNSQPLFAFEWKDPEKGNTGQLTWTRLPQGFKNSPTLFNEALHRDLAPFRALNPQVVLLQYVDDLLVAAPTYEDCKKGTQKLLQELSKLGYRVSAKKAQLCQREVTYLGYLLKEGKRWLTPARKATVMKIPVPTTPRQVREFLGKAGFCRLFIPGFASLAAPLYPLTKPSIPFIWTEEHQQAFDHIKKALLSAPALALPDLTKPFTLYIDERAGVARGVLTQTLGPWRRPVAYLSKKLDPVASGWPTCLKAVAAVALLLKDADKLTLGQNVTVIASHSLESIVRQPPDRWMTNARMTHYQSLLLNERVSFAPPAVLNPATLLPVESEATPVHRCSEILAEETGTRRDLEDQPLPGVPTWYTDGSSFITEGKRRAGAPIVDGKRTVWASSLPEGTSAQKAELVALTQALRLAEGKNINIYTDSRYAFATAHIHGAIYKQRGWLTSAGKDIKNKEEILALLEAIHLPRRVAIIHCPGHQRGSNPVATGNRRADEAAKQAALSTRVLAGTTKPAGKRTADGSEFEKRTADGSEFESPKKKAKVE

SEQ ID NO: 1463 - protein, 2094 aa, synthetic construct
MPAAKRVKLDGGDKKYSIGLDIGTNSVGWAVITDEYKVPSKKFKVLGNTDRHSIKKNLIGALLFDSGETAEATRLKRTARRRYTRRKNRICYLQEIFSNEMAKVDDSFFHRLEESFLVEEDKKHERHPIFGNIVDEVAYHEKYPTIYHLRKKLVDSTDKADLRLIYLALAHMIKFRGHFLIEGDLNPDNSDVDKLFIQLVQTYNQLFEENPINASGVDAKAILSARLSKSRRLENLIAQLPGEKKNGLFGNLIALSLGLTPNFKSNFDLAEDAKLQLSKDTYDDDLDNLLAQIGDQYADLFLAAKNLSDAILLSDILRVNTEITKAPLSASMIKRYDEHHQDLTLLKALVRQQLPEKYKEIFFDQSKNGYAGYIDGGASQEEFYKFIKPILEKMDGTEELLVKLNREDLLRKQRTFDNGSIPHQIHLGELHAILRRQEDFYPFLKDNREKIEKILTFRIPYYVGPLARGNSRFAWMTRKSEETITPWNFEEVVDKGASAQSFIERMTNFDKNLPNEKVLPKHSLLYEYFTVYNELTKVKYVTEGMRKPAFLSGEQKKAIVDLLFKTNRKVTVKQLKEDYFKKIECFDSVEISGVEDRFNASLGTYHDLLKIIKDKDFLDNEENEDILEDIVLTLTLFEDREMIEERLKTYAHLFDDKVMKQLKRRRYTGWGRLSRKLINGIRDKQSGKTILDFLKSDGFANRNFMQLIHDDSLTFKEDIQKAQVSGQGDSLHEHIANLAGSPAIKKGILQTVKVVDELVKVMGRHKPENIVIEMARENQTTQKGQKNSRERMKRIEEGIKELGSQILKEHPVENTQLQNEKLYLYYLQNGRDMYVDQELDINRLSDYDVDHIVPQSFLKDDSIDNKVLTRSDKARGKSDNVPSEEVVKKMKNYWRQLLNAKLITQRKFDNLTKAERGGLSELDKAGFIKRQLVETRQITKHVAQILDSRMNTKYDENDKLIREVKVITLKSKLVSDFRKDFQFYKVREINNYHHAHDAYLNAVVGTALIKKYPKLESEFVYGDYKVYDVRKMIAKSEQEIGKATAKYFFYSNIMNFFKTEITLANGEIRKRPLIETNGETGEIVWDKGRDFATVRKVLSMPQVNIVKKTEVQTGGFSKESILPKRNSDKLIARKKDWDPKKYGGFDSPTVAYSVLVVAKVEKGKSKKLKSVKELLGITIMERSSFEKNPIDFLEAKGYKEVKKDLIIKLPKYSLFELENGRKRMLASAGELQKGNELALPSKYVNFLYLASHYEKLKGSPEDNEQKQLFVEQHKHYLDEIIEQISEFSKRVILADANLDKVLSAYNKHRDKPIREQAENIIHLFTLTNLGAPAAFKYFDTTIDRKRYTSTKEVLDATLIHQSITGLYETRIDLSQLGGDGGGGSEAAAKGGGGGVLNLEEEYRLHEKPVPSSIDPSWLQLFPTVWAERAGMGLANQVPPVVVELRSGASPVAVRQYPMSKEAREGIRPHIQKFLDLGVLVPCRSPWNTPLLPVKKPGTNDYRPVQDLREINKRVQDIHPTVPNPYNLLSSLPPSYTWYSVLDLKDAFFCLRLHPNSQPLFAFEWKDPEKGNTGQLTWTRLPQGFKNSPTLFNEALHRDLAPFRALNPQVVLLQYVDDLLVAAPTYEDCKKGTQKLLQELSKLGYRVSAKKAQLCQREVTYLGYLLKEGKRWLTPARKATVMKIPVPTTPRQVREFLGKAGFCRLFIPGFASLAAPLYPLTKPSIPFIWTEEHQQAFDHIKKALLSAPALALPDLTKPFTLYIDERAGVARGVLTQTLGPWRRPVAYLSKKLDPVASGWPTCLKAVAAVALLLKDADKLTLGQNVTVIASHSLESIVRQPPDRWMTNARMTHYQSLLLNERVSFAPPAVLNPATLLPVESEATPVHRCSEILAEETGTRRDLEDQPLPGVPTWYTDGSSFITEGKRRAGAPIVDGKRTVWASSLPEGTSAQKAELVALTQALRLAEGKNINIYTDSRYAFATAHIHGAIYKQRGWLTSAGKDIKNKEEILALLEAIHLPRRVAIIHCPGHQRGSNPVATGNRRADEAAKQAALSTRVLAGTTKPAGKRTADGSEFEKRTADGSEFESPKKKAKVE

SEQ ID NO: 1464 - protein, 2086 aa, synthetic construct
MPAAKRVKLDGGDKKYSIGLDIGTNSVGWAVITDEYKVPSKKFKVLGNTDRHSIKKNLIGALLFDSGETAEATRLKRTARRRYTRRKNRICYLQEIFSNEMAKVDDSFFHRLEESFLVEEDKKHERHPIFGNIVDEVAYHEKYPTIYHLRKKLVDSTDKADLRLIYLALAHMIKFRGHFLIEGDLNPDNSDVDKLFIQLVQTYNQLFEENPINASGVDAKAILSARLSKSRRLENLIAQLPGEKKNGLFGNLIALSLGLTPNFKSNFDLAEDAKLQLSKDTYDDDLDNLLAQIGDQYADLFLAAKNLSDAILLSDILRVNTEITKAPLSASMIKRYDEHHQDLTLLKALVRQQLPEKYKEIFFDQSKNGYAGYIDGGASQEEFYKFIKPILEKMDGTEELLVKLNREDLLRKQRTFDNGSIPHQIHLGELHAILRRQEDFYPFLKDNREKIEKILTFRIPYYVGPLARGNSRFAWMTRKSEETITPWNFEEVVDKGASAQSFIERMTNFDKNLPNEKVLPKHSLLYEYFTVYNELTKVKYVTEGMRKPAFLSGEQKKAIVDLLFKTNRKVTVKQLKEDYFKKIECFDSVEISGVEDRFNASLGTYHDLLKIIKDKDFLDNEENEDILEDIVLTLTLFEDREMIEERLKTYAHLFDDKVMKQLKRRRYTGWGRLSRKLINGIRDKQSGKTILDFLKSDGFANRNFMQLIHDDSLTFKEDIQKAQVSGQGDSLHEHIANLAGSPAIKKGILQTVKVVDELVKVMGRHKPENIVIEMARENQTTQKGQKNSRERMKRIEEGIKELGSQILKEHPVENTQLQNEKLYLYYLQNGRDMYVDQELDINRLSDYDVDHIVPQSFLKDDSIDNKVLTRSDKARGKSDNVPSEEVVKKMKNYWRQLLNAKLITQRKFDNLTKAERGGLSELDKAGFIKRQLVETRQITKHVAQILDSRMNTKYDENDKLIREVKVITLKSKLVSDFRKDFQFYKVREINNYHHAHDAYLNAVVGTALIKKYPKLESEFVYGDYKVYDVRKMIAKSEQEIGKATAKYFFYSNIMNFFKTEITLANGEIRKRPLIETNGETGEIVWDKGRDFATVRKVLSMPQVNIVKKTEVQTGGFSKESILPKRNSDKLIARKKDWDPKKYGGFDSPTVAYSVLVVAKVEKGKSKKLKSVKELLGITIMERSSFEKNPIDFLEAKGYKEVKKDLIIKLPKYSLFELENGRKRMLASAGELQKGNELALPSKYVNFLYLASHYEKLKGSPEDNEQKQLFVEQHKHYLDEIIEQISEFSKRVILADANLDKVLSAYNKHRDKPIREQAENIIHLFTLTNLGAPAAFKYFDTTIDRKRYTSTKEVLDATLIHQSITGLYETRIDLSQLGGDGGGGSGGVLNLEEEYRLHEKPVPSSIDPSWLQLFPTVWAERAGMGLANQVPPVVVELRSGASPVAVRQYPMSKEAREGIRPHIQKFLDLGVLVPCRSPWNTPLLPVKKPGTNDYRPVQDLREINKRVQDIHPTVPNPYNLLSSLPPSYTWYSVLDLKDAFFCLRLHPNSQPLFAFEWKDPEKGNTGQLTWTRLPQGFKNSPTLFNEALHRDLAPFRALNPQVVLLQYVDDLLVAAPTYEDCKKGTQKLLQELSKLGYRVSAKKAQLCQREVTYLGYLLKEGKRWLTPARKATVMKIPVPTTPRQVREFLGKAGFCRLFIPGFASLAAPLYPLTKPSIPFIWTEEHQQAFDHIKKALLSAPALALPDLTKPFTLYIDERAGVARGVLTQTLGPWRRPVAYLSKKLDPVASGWPTCLKAVAAVALLLKDADKLTLGQNVTVIASHSLESIVRQPPDRWMTNARMTHYQSLLLNERVSFAPPAVLNPATLLPVESEATPVHRCSEILAEETGTRRDLEDQPLPGVPTWYTDGSSFITEGKRRAGAPIVDGKRTVWASSLPEGTSAQKAELVALTQALRLAEGKNINIYTDSRYAFATAHIHGAIYKQRGWLTSAGKDIKNKEEILALLEAIHLPRRVAIIHCPGHQRGSNPVATGNRRADEAAKQAALSTRVLAGTTKPAGKRTADGSEFEKRTADGSEFESPKKKAKVE

SEQ ID NO: 1465 - protein, 2091 aa, synthetic construct
MPAAKRVKLDGGDKKYSIGLDIGTNSVGWAVITDEYKVPSKKFKVLGNTDRHSIKKNLIGALLFDSGETAEATRLKRTARRRYTRRKNRICYLQEIFSNEMAKVDDSFFHRLEESFLVEEDKKHERHPIFGNIVDEVAYHEKYPTIYHLRKKLVDSTDKADLRLIYLALAHMIKFRGHFLIEGDLNPDNSDVDKLFIQLVQTYNQLFEENPINASGVDAKAILSARLSKSRRLENLIAQLPGEKKNGLFGNLIALSLGLTPNFKSNFDLAEDAKLQLSKDTYDDDLDNLLAQIGDQYADLFLAAKNLSDAILLSDILRVNTEITKAPLSASMIKRYDEHHQDLTLLKALVRQQLPEKYKEIFFDQSKNGYAGYIDGGASQEEFYKFIKPILEKMDGTEELLVKLNREDLLRKQRTFDNGSIPHQIHLGELHAILRRQEDFYPFLKDNREKIEKILTFRIPYYVGPLARGNSRFAWMTRKSEETITPWNFEEVVDKGASAQSFIERMTNFDKNLPNEKVLPKHSLLYEYFTVYNELTKVKYVTEGMRKPAFLSGEQKKAIVDLLFKTNRKVTVKQLKEDYFKKIECFDSVEISGVEDRFNASLGTYHDLLKIIKDKDFLDNEENEDILEDIVLTLTLFEDREMIEERLKTYAHLFDDKVMKQLKRRRYTGWGRLSRKLINGIRDKQSGKTILDFLKSDGFANRNFMQLIHDDSLTFKEDIQKAQVSGQGDSLHEHIANLAGSPAIKKGILQTVKVVDELVKVMGRHKPENIVIEMARENQTTQKGQKNSRERMKRIEEGIKELGSQILKEHPVENTQLQNEKLYLYYLQNGRDMYVDQELDINRLSDYDVDHIVPQSFLKDDSIDNKVLTRSDKARGKSDNVPSEEVVKKMKNYWRQLLNAKLITQRKFDNLTKAERGGLSELDKAGFIKRQLVETRQITKHVAQILDSRMNTKYDENDKLIREVKVITLKSKLVSDFRKDFQFYKVREINNYHHAHDAYLNAVVGTALIKKYPKLESEFVYGDYKVYDVRKMIAKSEQEIGKATAKYFFYSNIMNFFKTEITLANGEIRKRPLIETNGETGEIVWDKGRDFATVRKVLSMPQVNIVKKTEVQTGGFSKESILPKRNSDKLIARKKDWDPKKYGGFDSPTVAYSVLVVAKVEKGKSKKLKSVKELLGITIMERSSFEKNPIDFLEAKGYKEVKKDLIIKLPKYSLFELENGRKRMLASAGELQKGNELALPSKYVNFLYLASHYEKLKGSPEDNEQKQLFVEQHKHYLDEIIEQISEFSKRVILADANLDKVLSAYNKHRDKPIREQAENIIHLFTLTNLGAPAAFKYFDTTIDRKRYTSTKEVLDATLIHQSITGLYETRIDLSQLGGDGGGGGGGGGGGGVLNLEEEYRLHEKPVPSSIDPSWLQLFPTVWAERAGMGLANQVPPVVVELRSGASPVAVRQYPMSKEAREGIRPHIQKFLDLGVLVPCRSPWNTPLLPVKKPGTNDYRPVQDLREINKRVQDIHPTVPNPYNLLSSLPPSYTWYSVLDLKDAFFCLRLHPNSQPLFAFEWKDPEKGNTGQLTWTRLPQGFKNSPTLFNEALHRDLAPFRALNPQVVLLQYVDDLLVAAPTYEDCKKGTQKLLQELSKLGYRVSAKKAQLCQREVTYLGYLLKEGKRWLTPARKATVMKIPVPTTPRQVREFLGKAGFCRLFIPGFASLAAPLYPLTKPSIPFIWTEEHQQAFDHIKKALLSAPALALPDLTKPFTLYIDERAGVARGVLTQTLGPWRRPVAYLSKKLDPVASGWPTCLKAVAAVALLLKDADKLTLGQNVTVIASHSLESIVRQPPDRWMTNARMTHYQSLLLNERVSFAPPAVLNPATLLPVESEATPVHRCSEILAEETGTRRDLEDQPLPGVPTWYTDGSSFITEGKRRAGAPIVDGKRTVWASSLPEGTSAQKAELVALTQALRLAEGKNINIYTDSRYAFATAHIHGAIYKQRGWLTSAGKDIKNKEEILALLEAIHLPRRVAIIHCPGHQRGSNPVATGNRRADEAAKQAALSTRVLAGTTKPAGKRTADGSEFEKRTADGSEFESPKKKAKVE

SEQ ID NO: 1466 - protein, 2094 aa, synthetic construct
MPAAKRVKLDGGDKKYSIGLDIGTNSVGWAVITDEYKVPSKKFKVLGNTDRHSIKKNLIGALLFDSGETAEATRLKRTARRRYTRRKNRICYLQEIFSNEMAKVDDSFFHRLEESFLVEEDKKHERHPIFGNIVDEVAYHEKYPTIYHLRKKLVDSTDKADLRLIYLALAHMIKFRGHFLIEGDLNPDNSDVDKLFIQLVQTYNQLFEENPINASGVDAKAILSARLSKSRRLENLIAQLPGEKKNGLFGNLIALSLGLTPNFKSNFDLAEDAKLQLSKDTYDDDLDNLLAQIGDQYADLFLAAKNLSDAILLSDILRVNTEITKAPLSASMIKRYDEHHQDLTLLKALVRQQLPEKYKEIFFDQSKNGYAGYIDGGASQEEFYKFIKPILEKMDGTEELLVKLNREDLLRKQRTFDNGSIPHQIHLGELHAILRRQEDFYPFLKDNREKIEKILTFRIPYYVGPLARGNSRFAWMTRKSEETITPWNFEEVVDKGASAQSFIERMTNFDKNLPNEKVLPKHSLLYEYFTVYNELTKVKYVTEGMRKPAFLSGEQKKAIVDLLFKTNRKVTVKQLKEDYFKKIECFDSVEISGVEDRFNASLGTYHDLLKIIKDKDFLDNEENEDILEDIVLTLTLFEDREMIEERLKTYAHLFDDKVMKQLKRRRYTGWGRLSRKLINGIRDKQSGKTILDFLKSDGFANRNFMQLIHDDSLTFKEDIQKAQVSGQGDSLHEHIANLAGSPAIKKGILQTVKVVDELVKVMGRHKPENIVIEMARENQTTQKGQKNSRERMKRIEEGIKELGSQILKEHPVENTQLQNEKLYLYYLQNGRDMYVDQELDINRLSDYDVDHIVPQSFLKDDSIDNKVLTRSDKARGKSDNVPSEEVVKKMKNYWRQLLNAKLITQRKFDNLTKAERGGLSELDKAGFIKRQLVETRQITKHVAQILDSRMNTKYDENDKLIREVKVITLKSKLVSDFRKDFQFYKVREINNYHHAHDAYLNAVVGTALIKKYPKLESEFVYGDYKVYDVRKMIAKSEQEIGKATAKYFFYSNIMNFFKTEITLANGEIRKRPLIETNGETGEIVWDKGRDFATVRKVLSMPQVNIVKKTEVQTGGFSKESILPKRNSDKLIARKKDWDPKKYGGFDSPTVAYSVLVVAKVEKGKSKKLKSVKELLGITIMERSSFEKNPIDFLEAKGYKEVKKDLIIKLPKYSLFELENGRKRMLASAGELQKGNELALPSKYVNFLYLASHYEKLKGSPEDNEQKQLFVEQHKHYLDEIIEQISEFSKRVILADANLDKVLSAYNKHRDKPIREQAENIIHLFTLTNLGAPAAFKYFDTTIDRKRYTSTKEVLDATLIHQSITGLYETRIDLSQLGGDGGGSSGGGEAAAKGGVLNLEEEYRLHEKPVPSSIDPSWLQLFPTVWAERAGMGLANQVPPVVVELRSGASPVAVRQYPMSKEAREGIRPHIQKFLDLGVLVPCRSPWNTPLLPVKKPGTNDYRPVQDLREINKRVQDIHPTVPNPYNLLSSLPPSYTWYSVLDLKDAFFCLRLHPNSQPLFAFEWKDPEKGNTGQLTWTRLPQGFKNSPTLFNEALHRDLAPFRALNPQVVLLQYVDDLLVAAPTYEDCKKGTQKLLQELSKLGYRVSAKKAQLCQREVTYLGYLLKEGKRWLTPARKATVMKIPVPTTPRQVREFLGKAGFCRLFIPGFASLAAPLYPLTKPSIPFIWTEEHQQAFDHIKKALLSAPALALPDLTKPFTLYIDERAGVARGVLTQTLGPWRRPVAYLSKKLDPVASGWPTCLKAVAAVALLLKDADKLTLGQNVTVIASHSLESIVRQPPDRWMTNARMTHYQSLLLNERVSFAPPAVLNPATLLPVESEATPVHRCSEILAEETGTRRDLEDQPLPGVPTWYTDGSSFITEGKRRAGAPIVDGKRTVWASSLPEGTSAQKAELVALTQALRLAEGKNINIYTDSRYAFATAHIHGAIYKQRGWLTSAGKDIKNKEEILALLEAIHLPRRVAIIHCPGHQRGSNPVATGNRRADEAAKQAALSTRVLAGTTKPAGKRTADGSEFEKRTADGSEFESPKKKAKVE

SEQ ID NO: 1467 - protein, 2094 aa, synthetic construct
MPAAKRVKLDGGDKKYSIGLDIGTNSVGWAVITDEYKVPSKKFKVLGNTDRHSIKKNLIGALLFDSGETAEATRLKRTARRRYTRRKNRICYLQEIFSNEMAKVDDSFFHRLEESFLVEEDKKHERHPIFGNIVDEVAYHEKYPTIYHLRKKLVDSTDKADLRLIYLALAHMIKFRGHFLIEGDLNPDNSDVDKLFIQLVQTYNQLFEENPINASGVDAKAILSARLSKSRRLENLIAQLPGEKKNGLFGNLIALSLGLTPNFKSNFDLAEDAKLQLSKDTYDDDLDNLLAQIGDQYADLFLAAKNLSDAILLSDILRVNTEITKAPLSASMIKRYDEHHQDLTLLKALVRQQLPEKYKEIFFDQSKNGYAGYIDGGASQEEFYKFIKPILEKMDGTEELLVKLNREDLLRKQRTFDNGSIPHQIHLGELHAILRRQEDFYPFLKDNREKIEKILTFRIPYYVGPLARGNSRFAWMTRKSEETITPWNFEEVVDKGASAQSFIERMTNFDKNLPNEKVLPKHSLLYEYFTVYNELTKVKYVTEGMRKPAFLSGEQKKAIVDLLFKTNRKVTVKQLKEDYFKKIECFDSVEISGVEDRFNASLGTYHDLLKIIKDKDFLDNEENEDILEDIVLTLTLFEDREMIEERLKTYAHLFDDKVMKQLKRRRYTGWGRLSRKLINGIRDKQSGKTILDFLKSDGFANRNFMQLIHDDSLTFKEDIQKAQVSGQGDSLHEHIANLAGSPAIKKGILQTVKVVDELVKVMGRHKPENIVIEMARENQTTQKGQKNSRERMKRIEEGIKELGSQILKEHPVENTQLQNEKLYLYYLQNGRDMYVDQELDINRLSDYDVDHIVPQSFLKDDSIDNKVLTRSDKARGKSDNVPSEEVVKKMKNYWRQLLNAKLITQRKFDNLTKAERGGLSELDKAGFIKRQLVETRQITKHVAQILDSRMNTKYDENDKLIREVKVITLKSKLVSDFRKDFQFYKVREINNYHHAHDAYLNAVVGTALIKKYPKLESEFVYGDYKVYDVRKMIAKSEQEIGKATAKYFFYSNIMNFFKTEITLANGEIRKRPLIETNGETGEIVWDKGRDFATVRKVLSMPQVNIVKKTEVQTGGFSKESILPKRNSDKLIARKKDWDPKKYGGFDSPTVAYSVLVVAKVEKGKSKKLKSVKELLGITIMERSSFEKNPIDFLEAKGYKEVKKDLIIKLPKYSLFELENGRKRMLASAGELQKGNELALPSKYVNFLYLASHYEKLKGSPEDNEQKQLFVEQHKHYLDEIIEQISEFSKRVILADANLDKVLSAYNKHRDKPIREQAENIIHLFTLTNLGAPAAFKYFDTTIDRKRYTSTKEVLDATLIHQSITGLYETRIDLSQLGGDGGEAAAKGSSPAPGGVLNLEEEYRLHEKPVPSSIDPSWLQLFPTVWAERAGMGLANQVPPVVVELRSGASPVAVRQYPMSKEAREGIRPHIQKFLDLGVLVPCRSPWNTPLLPVKKPGTNDYRPVQDLREINKRVQDIHPTVPNPYNLLSSLPPSYTWYSVLDLKDAFFCLRLHPNSQPLFAFEWKDPEKGNTGQLTWTRLPQGFKNSPTLFNEALHRDLAPFRALNPQVVLLQYVDDLLVAAPTYEDCKKGTQKLLQELSKLGYRVSAKKAQLCQREVTYLGYLLKEGKRWLTPARKATVMKIPVPTTPRQVREFLGKAGFCRLFIPGFASLAAPLYPLTKPSIPFIWTEEHQQAFDHIKKALLSAPALALPDLTKPFTLYIDERAGVARGVLTQTLGPWRRPVAYLSKKLDPVASGWPTCLKAVAAVALLLKDADKLTLGQNVTVIASHSLESIVRQPPDRWMTNARMTHYQSLLLNERVSFAPPAVLNPATLLPVESEATPVHRCSEILAEETGTRRDLEDQPLPGVPTWYTDGSSFITEGKRRAGAPIVDGKRTVWASSLPEGTSAQKAELVALTQALRLAEGKNINIYTDSRYAFATAHIHGAIYKQRGWLTSAGKDIKNKEEILALLEAIHLPRRVAIIHCPGHQRGSNPVATGNRRADEAAKQAALSTRVLAGTTKPAGKRTADGSEFEKRTADGSEFESPKKKAKVE

SEQ ID NO: 1468 - protein, 2094 aa, synthetic construct
MPAAKRVKLDGGDKKYSIGLDIGTNSVGWAVITDEYKVPSKKFKVLGNTDRHSIKKNLIGALLFDSGETAEATRLKRTARRRYTRRKNRICYLQEIFSNEMAKVDDSFFHRLEESFLVEEDKKHERHPIFGNIVDEVAYHEKYPTIYHLRKKLVDSTDKADLRLIYLALAHMIKFRGHFLIEGDLNPDNSDVDKLFIQLVQTYNQLFEENPINASGVDAKAILSARLSKSRRLENLIAQLPGEKKNGLFGNLIALSLGLTPNFKSNFDLAEDAKLQLSKDTYDDDLDNLLAQIGDQYADLFLAAKNLSDAILLSDILRVNTEITKAPLSASMIKRYDEHHQDLTLLKALVRQQLPEKYKEIFFDQSKNGYAGYIDGGASQEEFYKFIKPILEKMDGTEELLVKLNREDLLRKQRTFDNGSIPHQIHLGELHAILRRQEDFYPFLKDNREKIEKILTFRIPYYVGPLARGNSRFAWMTRKSEETITPWNFEEVVDKGASAQSFIERMTNFDKNLPNEKVLPKHSLLYEYFTVYNELTKVKYVTEGMRKPAFLSGEQKKAIVDLLFKTNRKVTVKQLKEDYFKKIECFDSVEISGVEDRFNASLGTYHDLLKIIKDKDFLDNEENEDILEDIVLTLTLFEDREMIEERLKTYAHLFDDKVMKQLKRRRYTGWGRLSRKLINGIRDKQSGKTILDFLKSDGFANRNFMQLIHDDSLTFKEDIQKAQVSGQGDSLHEHIANLAGSPAIKKGILQTVKVVDELVKVMGRHKPENIVIEMARENQTTQKGQKNSRERMKRIEEGIKELGSQILKEHPVENTQLQNEKLYLYYLQNGRDMYVDQELDINRLSDYDVDHIVPQSFLKDDSIDNKVLTRSDKARGKSDNVPSEEVVKKMKNYWRQLLNAKLITQRKFDNLTKAERGGLSELDKAGFIKRQLVETRQITKHVAQILDSRMNTKYDENDKLIREVKVITLKSKLVSDFRKDFQFYKVREINNYHHAHDAYLNAVVGTALIKKYPKLESEFVYGDYKVYDVRKMIAKSEQEIGKATAKYFFYSNIMNFFKTEITLANGEIRKRPLIETNGETGEIVWDKGRDFATVRKVLSMPQVNIVKKTEVQTGGFSKESILPKRNSDKLIARKKDWDPKKYGGFDSPTVAYSVLVVAKVEKGKSKKLKSVKELLGITIMERSSFEKNPIDFLEAKGYKEVKKDLIIKLPKYSLFELENGRKRMLASAGELQKGNELALPSKYVNFLYLASHYEKLKGSPEDNEQKQLFVEQHKHYLDEIIEQISEFSKRVILADANLDKVLSAYNKHRDKPIREQAENIIHLFTLTNLGAPAAFKYFDTTIDRKRYTSTKEVLDATLIHQSITGLYETRIDLSQLGGDGGGGSEAAAKPAPGGVLNLEEEYRLHEKPVPSSIDPSWLQLFPTVWAERAGMGLANQVPPVVVELRSGASPVAVRQYPMSKEAREGIRPHIQKFLDLGVLVPCRSPWNTPLLPVKKPGTNDYRPVQDLREINKRVQDIHPTVPNPYNLLSSLPPSYTWYSVLDLKDAFFCLRLHPNSQPLFAFEWKDPEKGNTGQLTWTRLPQGFKNSPTLFNEALHRDLAPFRALNPQVVLLQYVDDLLVAAPTYEDCKKGTQKLLQELSKLGYRVSAKKAQLCQREVTYLGYLLKEGKRWLTPARKATVMKIPVPTTPRQVREFLGKAGFCRLFIPGFASLAAPLYPLTKPSIPFIWTEEHQQAFDHIKKALLSAPALALPDLTKPFTLYIDERAGVARGVLTQTLGPWRRPVAYLSKKLDPVASGWPTCLKAVAAVALLLKDADKLTLGQNVTVIASHSLESIVRQPPDRWMTNARMTHYQSLLLNERVSFAPPAVLNPATLLPVESEATPVHRCSEILAEETGTRRDLEDQPLPGVPTWYTDGSSFITEGKRRAGAPIVDGKRTVWASSLPEGTSAQKAELVALTQALRLAEGKNINIYTDSRYAFATAHIHGAIYKQRGWLTSAGKDIKNKEEILALLEAIHLPRRVAIIHCPGHQRGSNPVATGNRRADEAAKQAALSTRVLAGTTKPAGKRTADGSEFEKRTADGSEFESPKKKAKVE

SEQ ID NO: 1469 - protein, 2094 aa, synthetic construct
MPAAKRVKLDGGDKKYSIGLDIGTNSVGWAVITDEYKVPSKKFKVLGNTDRHSIKKNLIGALLFDSGETAEATRLKRTARRRYTRRKNRICYLQEIFSNEMAKVDDSFFHRLEESFLVEEDKKHERHPIFGNIVDEVAYHEKYPTIYHLRKKLVDSTDKADLRLIYLALAHMIKFRGHFLIEGDLNPDNSDVDKLFIQLVQTYNQLFEENPINASGVDAKAILSARLSKSRRLENLIAQLPGEKKNGLFGNLIALSLGLTPNFKSNFDLAEDAKLQLSKDTYDDDLDNLLAQIGDQYADLFLAAKNLSDAILLSDILRVNTEITKAPLSASMIKRYDEHHQDLTLLKALVRQQLPEKYKEIFFDQSKNGYAGYIDGGASQEEFYKFIKPILEKMDGTEELLVKLNREDLLRKQRTFDNGSIPHQIHLGELHAILRRQEDFYPFLKDNREKIEKILTFRIPYYVGPLARGNSRFAWMTRKSEETITPWNFEEVVDKGASAQSFIERMTNFDKNLPNEKVLPKHSLLYEYFTVYNELTKVKYVTEGMRKPAFLSGEQKKAIVDLLFKTNRKVTVKQLKEDYFKKIECFDSVEISGVEDRFNASLGTYHDLLKIIKDKDFLDNEENEDILEDIVLTLTLFEDREMIEERLKTYAHLFDDKVMKQLKRRRYTGWGRLSRKLINGIRDKQSGKTILDFLKSDGFANRNFMQLIHDDSLTFKEDIQKAQVSGQGDSLHEHIANLAGSPAIKKGILQTVKVVDELVKVMGRHKPENIVIEMARENQTTQKGQKNSRERMKRIEEGIKELGSQILKEHPVENTQLQNEKLYLYYLQNGRDMYVDQELDINRLSDYDVDHIVPQSFLKDDSIDNKVLTRSDKARGKSDNVPSEEVVKKMKNYWRQLLNAKLITQRKFDNLTKAERGGLSELDKAGFIKRQLVETRQITKHVAQILDSRMNTKYDENDKLIREVKVITLKSKLVSDFRKDFQFYKVREINNYHHAHDAYLNAVVGTALIKKYPKLESEFVYGDYKVYDVRKMIAKSEQEIGKATAKYFFYSNIMNFFKTEITLANGEIRKRPLIETNGETGEIVWDKGRDFATVRKVLSMPQVNIVKKTEVQTGGFSKESILPKRNSDKLIARKKDWDPKKYGGFDSPTVAYSVLVVAKVEKGKSKKLKSVKELLGITIMERSSFEKNPIDFLEAKGYKEVKKDLIIKLPKYSLFELENGRKRMLASAGELQKGNELALPSKYVNFLYLASHYEKLKGSPEDNEQKQLFVEQHKHYLDEIIEQISEFSKRVILADANLDKVLSAYNKHRDKPIREQAENIIHLFTLTNLGAPAAFKYFDTTIDRKRYTSTKEVLDATLIHQSITGLYETRIDLSQLGGDGGEAAAKPAPGGSGGVLNLEEEYRLHEKPVPSSIDPSWLQLFPTVWAERAGMGLANQVPPVVVELRSGASPVAVRQYPMSKEAREGIRPHIQKFLDLGVLVPCRSPWNTPLLPVKKPGTNDYRPVQDLREINKRVQDIHPTVPNPYNLLSSLPPSYTWYSVLDLKDAFFCLRLHPNSQPLFAFEWKDPEKGNTGQLTWTRLPQGFKNSPTLFNEALHRDLAPFRALNPQVVLLQYVDDLLVAAPTYEDCKKGTQKLLQELSKLGYRVSAKKAQLCQREVTYLGYLLKEGKRWLTPARKATVMKIPVPTTPRQVREFLGKAGFCRLFIPGFASLAAPLYPLTKPSIPFIWTEEHQQAFDHIKKALLSAPALALPDLTKPFTLYIDERAGVARGVLTQTLGPWRRPVAYLSKKLDPVASGWPTCLKAVAAVALLLKDADKLTLGQNVTVIASHSLESIVRQPPDRWMTNARMTHYQSLLLNERVSFAPPAVLNPATLLPVESEATPVHRCSEILAEETGTRRDLEDQPLPGVPTWYTDGSSFITEGKRRAGAPIVDGKRTVWASSLPEGTSAQKAELVALTQALRLAEGKNINIYTDSRYAFATAHIHGAIYKQRGWLTSAGKDIKNKEEILALLEAIHLPRRVAIIHCPGHQRGSNPVATGNRRADEAAKQAALSTRVLAGTTKPAGKRTADGSEFEKRTADGSEFESPKKKAKVE

SEQ ID NO: 1470 - protein, 2089 aa, synthetic construct
MPAAKRVKLDGGDKKYSIGLDIGTNSVGWAVITDEYKVPSKKFKVLGNTDRHSIKKNLIGALLFDSGETAEATRLKRTARRRYTRRKNRICYLQEIFSNEMAKVDDSFFHRLEESFLVEEDKKHERHPIFGNIVDEVAYHEKYPTIYHLRKKLVDSTDKADLRLIYLALAHMIKFRGHFLIEGDLNPDNSDVDKLFIQLVQTYNQLFEENPINASGVDAKAILSARLSKSRRLENLIAQLPGEKKNGLFGNLIALSLGLTPNFKSNFDLAEDAKLQLSKDTYDDDLDNLLAQIGDQYADLFLAAKNLSDAILLSDILRVNTEITKAPLSASMIKRYDEHHQDLTLLKALVRQQLPEKYKEIFFDQSKNGYAGYIDGGASQEEFYKFIKPILEKMDGTEELLVKLNREDLLRKQRTFDNGSIPHQIHLGELHAILRRQEDFYPFLKDNREKIEKILTFRIPYYVGPLARGNSRFAWMTRKSEETITPWNFEEVVDKGASAQSFIERMTNFDKNLPNEKVLPKHSLLYEYFTVYNELTKVKYVTEGMRKPAFLSGEQKKAIVDLLFKTNRKVTVKQLKEDYFKKIECFDSVEISGVEDRFNASLGTYHDLLKIIKDKDFLDNEENEDILEDIVLTLTLFEDREMIEERLKTYAHLFDDKVMKQLKRRRYTGWGRLSRKLINGIRDKQSGKTILDFLKSDGFANRNFMQLIHDDSLTFKEDIQKAQVSGQGDSLHEHIANLAGSPAIKKGILQTVKVVDELVKVMGRHKPENIVIEMARENQTTQKGQKNSRERMKRIEEGIKELGSQILKEHPVENTQLQNEKLYLYYLQNGRDMYVDQELDINRLSDYDVDHIVPQSFLKDDSIDNKVLTRSDKARGKSDNVPSEEVVKKMKNYWRQLLNAKLITQRKFDNLTKAERGGLSELDKAGFIKRQLVETRQITKHVAQILDSRMNTKYDENDKLIREVKVITLKSKLVSDFRKDFQFYKVREINNYHHAHDAYLNAVVGTALIKKYPKLESEFVYGDYKVYDVRKMIAKSEQEIGKATAKYFFYSNIMNFFKTEITLANGEIRKRPLIETNGETGEIVWDKGRDFATVRKVLSMPQVNIVKKTEVQTGGFSKESILPKRNSDKLIARKKDWDPKKYGGFDSPTVAYSVLVVAKVEKGKSKKLKSVKELLGITIMERSSFEKNPIDFLEAKGYKEVKKDLIIKLPKYSLFELENGRKRMLASAGELQKGNELALPSKYVNFLYLASHYEKLKGSPEDNEQKQLFVEQHKHYLDEIIEQISEFSKRVILADANLDKVLSAYNKHRDKPIREQAENIIHLFTLTNLGAPAAFKYFDTTIDRKRYTSTKEVLDATLIHQSITGLYETRIDLSQLGGDGGGGSPAPGGVLNLEEEYRLHEKPVPSSIDPSWLQLFPTVWAERAGMGLANQVPPVVVELRSGASPVAVRQYPMSKEAREGIRPHIQKFLDLGVLVPCRSPWNTPLLPVKKPGTNDYRPVQDLREINKRVQDIHPTVPNPYNLLSSLPPSYTWYSVLDLKDAFFCLRLHPNSQPLFAFEWKDPEKGNTGQLTWTRLPQGFKNSPTLFNEALHRDLAPFRALNPQVVLLQYVDDLLVAAPTYEDCKKGTQKLLQELSKLGYRVSAKKAQLCQREVTYLGYLLKEGKRWLTPARKATVMKIPVPTTPRQVREFLGKAGFCRLFIPGFASLAAPLYPLTKPSIPFIWTEEHQQAFDHIKKALLSAPALALPDLTKPFTLYIDERAGVARGVLTQTLGPWRRPVAYLSKKLDPVASGWPTCLKAVAAVALLLKDADKLTLGQNVTVIASHSLESIVRQPPDRWMTNARMTHYQSLLLNERVSFAPPAVLNPATLLPVESEATPVHRCSEILAEETGTRRDLEDQPLPGVPTWYTDGSSFITEGKRRAGAPIVDGKRTVWASSLPEGTSAQKAELVALTQALRLAEGKNINIYTDSRYAFATAHIHGAIYKQRGWLTSAGKDIKNKEEILALLEAIHLPRRVAIIHCPGHQRGSNPVATGNRRADEAAKQAALSTRVLAGTTKPAGKRTADGSEFEKRTADGSEFESPKKKAKVE

SEQ ID NO: 1471 - protein, 2092 aa, synthetic construct
MPAAKRVKLDGGDKKYSIGLDIGTNSVGWAVITDEYKVPSKKFKVLGNTDRHSIKKNLIGALLFDSGETAEATRLKRTARRRYTRRKNRICYLQEIFSNEMAKVDDSFFHRLEESFLVEEDKKHERHPIFGNIVDEVAYHEKYPTIYHLRKKLVDSTDKADLRLIYLALAHMIKFRGHFLIEGDLNPDNSDVDKLFIQLVQTYNQLFEENPINASGVDAKAILSARLSKSRRLENLIAQLPGEKKNGLFGNLIALSLGLTPNFKSNFDLAEDAKLQLSKDTYDDDLDNLLAQIGDQYADLFLAAKNLSDAILLSDILRVNTEITKAPLSASMIKRYDEHHQDLTLLKALVRQQLPEKYKEIFFDQSKNGYAGYIDGGASQEEFYKFIKPILEKMDGTEELLVKLNREDLLRKQRTFDNGSIPHQIHLGELHAILRRQEDFYPFLKDNREKIEKILTFRIPYYVGPLARGNSRFAWMTRKSEETITPWNFEEVVDKGASAQSFIERMTNFDKNLPNEKVLPKHSLLYEYFTVYNELTKVKYVTEGMRKPAFLSGEQKKAIVDLLFKTNRKVTVKQLKEDYFKKIECFDSVEISGVEDRFNASLGTYHDLLKIIKDKDFLDNEENEDILEDIVLTLTLFEDREMIEERLKTYAHLFDDKVMKQLKRRRYTGWGRLSRKLINGIRDKQSGKTILDFLKSDGFANRNFMQLIHDDSLTFKEDIQKAQVSGQGDSLHEHIANLAGSPAIKKGILQTVKVVDELVKVMGRHKPENIVIEMARENQTTQKGQKNSRERMKRIEEGIKELGSQILKEHPVENTQLQNEKLYLYYLQNGRDMYVDQELDINRLSDYDVDHIVPQSFLKDDSIDNKVLTRSDKARGKSDNVPSEEVVKKMKNYWRQLLNAKLITQRKFDNLTKAERGGLSELDKAGFIKRQLVETRQITKHVAQILDSRMNTKYDENDKLIREVKVITLKSKLVSDFRKDFQFYKVREINNYHHAHDAYLNAVVGTALIKKYPKLESEFVYGDYKVYDVRKMIAKSEQEIGKATAKYFFYSNIMNFFKTEITLANGEIRKRPLIETNGETGEIVWDKGRDFATVRKVLSMPQVNIVKKTEVQTGGFSKESILPKRNSDKLIARKKDWDPKKYGGFDSPTVAYSVLVVAKVEKGKSKKLKSVKELLGITIMERSSFEKNPIDFLEAKGYKEVKKDLIIKLPKYSLFELENGRKRMLASAGELQKGNELALPSKYVNFLYLASHYEKLKGSPEDNEQKQLFVEQHKHYLDEIIEQISEFSKRVILADANLDKVLSAYNKHRDKPIREQAENIIHLFTLTNLGAPAAFKYFDTTIDRKRYTSTKEVLDATLIHQSITGLYETRIDLSQLGGDGGGGGGSSGGSGGVLNLEEEYRLHEKPVPSSIDPSWLQLFPTVWAERAGMGLANQVPPVVVELRSGASPVAVRQYPMSKEAREGIRPHIQKFLDLGVLVPCRSPWNTPLLPVKKPGTNDYRPVQDLREINKRVQDIHPTVPNPYNLLSSLPPSYTWYSVLDLKDAFFCLRLHPNSQPLFAFEWKDPEKGNTGQLTWTRLPQGFKNSPTLFNEALHRDLAPFRALNPQVVLLQYVDDLLVAAPTYEDCKKGTQKLLQELSKLGYRVSAKKAQLCQREVTYLGYLLKEGKRWLTPARKATVMKIPVPTTPRQVREFLGKAGFCRLFIPGFASLAAPLYPLTKPSIPFIWTEEHQQAFDHIKKALLSAPALALPDLTKPFTLYIDERAGVARGVLTQTLGPWRRPVAYLSKKLDPVASGWPTCLKAVAAVALLLKDADKLTLGQNVTVIASHSLESIVRQPPDRWMTNARMTHYQSLLLNERVSFAPPAVLNPATLLPVESEATPVHRCSEILAEETGTRRDLEDQPLPGVPTWYTDGSSFITEGKRRAGAPIVDGKRTVWASSLPEGTSAQKAELVALTQALRLAEGKNINIYTDSRYAFATAHIHGAIYKQRGWLTSAGKDIKNKEEILALLEAIHLPRRVAIIHCPGHQRGSNPVATGNRRADEAAKQAALSTRVLAGTTKPAGKRTADGSEFEKRTADGSEFESPKKKAKVE

SEQ ID NO: 1472 - protein, 2092 aa, synthetic construct
MPAAKRVKLDGGDKKYSIGLDIGTNSVGWAVITDEYKVPSKKFKVLGNTDRHSIKKNLIGALLFDSGETAEATRLKRTARRRYTRRKNRICYLQEIFSNEMAKVDDSFFHRLEESFLVEEDKKHERHPIFGNIVDEVAYHEKYPTIYHLRKKLVDSTDKADLRLIYLALAHMIKFRGHFLIEGDLNPDNSDVDKLFIQLVQTYNQLFEENPINASGVDAKAILSARLSKSRRLENLIAQLPGEKKNGLFGNLIALSLGLTPNFKSNFDLAEDAKLQLSKDTYDDDLDNLLAQIGDQYADLFLAAKNLSDAILLSDILRVNTEITKAPLSASMIKRYDEHHQDLTLLKALVRQQLPEKYKEIFFDQSKNGYAGYIDGGASQEEFYKFIKPILEKMDGTEELLVKLNREDLLRKQRTFDNGSIPHQIHLGELHAILRRQEDFYPFLKDNREKIEKILTFRIPYYVGPLARGNSRFAWMTRKSEETITPWNFEEVVDKGASAQSFIERMTNFDKNLPNEKVLPKHSLLYEYFTVYNELTKVKYVTEGMRKPAFLSGEQKKAIVDLLFKTNRKVTVKQLKEDYFKKIECFDSVEISGVEDRFNASLGTYHDLLKIIKDKDFLDNEENEDILEDIVLTLTLFEDREMIEERLKTYAHLFDDKVMKQLKRRRYTGWGRLSRKLINGIRDKQSGKTILDFLKSDGFANRNFMQLIHDDSLTFKEDIQKAQVSGQGDSLHEHIANLAGSPAIKKGILQTVKVVDELVKVMGRHKPENIVIEMARENQTTQKGQKNSRERMKRIEEGIKELGSQILKEHPVENTQLQNEKLYLYYLQNGRDMYVDQELDINRLSDYDVDHIVPQSFLKDDSIDNKVLTRSDKARGKSDNVPSEEVVKKMKNYWRQLLNAKLITQRKFDNLTKAERGGLSELDKAGFIKRQLVETRQITKHVAQILDSRMNTKYDENDKLIREVKVITLKSKLVSDFRKDFQFYKVREINNYHHAHDAYLNAVVGTALIKKYPKLESEFVYGDYKVYDVRKMIAKSEQEIGKATAKYFFYSNIMNFFKTEITLANGEIRKRPLIETNGETGEIVWDKGRDFATVRKVLSMPQVNIVKKTEVQTGGFSKESILPKRNSDKLIARKKDWDPKKYGGFDSPTVAYSVLVVAKVEKGKSKKLKSVKELLGITIMERSSFEKNPIDFLEAKGYKEVKKDLIIKLPKYSLFELENGRKRMLASAGELQKGNELALPSKYVNFLYLASHYEKLKGSPEDNEQKQLFVEQHKHYLDEIIEQISEFSKRVILADANLDKVLSAYNKHRDKPIREQAENIIHLFTLTNLGAPAAFKYFDTTIDRKRYTSTKEVLDATLIHQSITGLYETRIDLSQLGGDGGGGSGGGGSSGGVLNLEEEYRLHEKPVPSSIDPSWLQLFPTVWAERAGMGLANQVPPVVVELRSGASPVAVRQYPMSKEAREGIRPHIQKFLDLGVLVPCRSPWNTPLLPVKKPGTNDYRPVQDLREINKRVQDIHPTVPNPYNLLSSLPPSYTWYSVLDLKDAFFCLRLHPNSQPLFAFEWKDPEKGNTGQLTWTRLPQGFKNSPTLFNEALHRDLAPFRALNPQVVLLQYVDDLLVAAPTYEDCKKGTQKLLQELSKLGYRVSAKKAQLCQREVTYLGYLLKEGKRWLTPARKATVMKIPVPTTPRQVREFLGKAGFCRLFIPGFASLAAPLYPLTKPSIPFIWTEEHQQAFDHIKKALLSAPALALPDLTKPFTLYIDERAGVARGVLTQTLGPWRRPVAYLSKKLDPVASGWPTCLKAVAAVALLLKDADKLTLGQNVTVIASHSLESIVRQPPDRWMTNARMTHYQSLLLNERVSFAPPAVLNPATLLPVESEATPVHRCSEILAEETGTRRDLEDQPLPGVPTWYTDGSSFITEGKRRAGAPIVDGKRTVWASSLPEGTSAQKAELVALTQALRLAEGKNINIYTDSRYAFATAHIHGAIYKQRGWLTSAGKDIKNKEEILALLEAIHLPRRVAIIHCPGHQRGSNPVATGNRRADEAAKQAALSTRVLAGTTKPAGKRTADGSEFEKRTADGSEFESPKKKAKVE

SEQ ID NO: 1473 - protein, 2094 aa, synthetic construct
MPAAKRVKLDGGDKKYSIGLDIGTNSVGWAVITDEYKVPSKKFKVLGNTDRHSIKKNLIGALLFDSGETAEATRLKRTARRRYTRRKNRICYLQEIFSNEMAKVDDSFFHRLEESFLVEEDKKHERHPIFGNIVDEVAYHEKYPTIYHLRKKLVDSTDKADLRLIYLALAHMIKFRGHFLIEGDLNPDNSDVDKLFIQLVQTYNQLFEENPINASGVDAKAILSARLSKSRRLENLIAQLPGEKKNGLFGNLIALSLGLTPNFKSNFDLAEDAKLQLSKDTYDDDLDNLLAQIGDQYADLFLAAKNLSDAILLSDILRVNTEITKAPLSASMIKRYDEHHQDLTLLKALVRQQLPEKYKEIFFDQSKNGYAGYIDGGASQEEFYKFIKPILEKMDGTEELLVKLNREDLLRKQRTFDNGSIPHQIHLGELHAILRRQEDFYPFLKDNREKIEKILTFRIPYYVGPLARGNSRFAWMTRKSEETITPWNFEEVVDKGASAQSFIERMTNFDKNLPNEKVLPKHSLLYEYFTVYNELTKVKYVTEGMRKPAFLSGEQKKAIVDLLFKTNRKVTVKQLKEDYFKKIECFDSVEISGVEDRFNASLGTYHDLLKIIKDKDFLDNEENEDILEDIVLTLTLFEDREMIEERLKTYAHLFDDKVMKQLKRRRYTGWGRLSRKLINGIRDKQSGKTILDFLKSDGFANRNFMQLIHDDSLTFKEDIQKAQVSGQGDSLHEHIANLAGSPAIKKGILQTVKVVDELVKVMGRHKPENIVIEMARENQTTQKGQKNSRERMKRIEEGIKELGSQILKEHPVENTQLQNEKLYLYYLQNGRDMYVDQELDINRLSDYDVDHIVPQSFLKDDSIDNKVLTRSDKARGKSDNVPSEEVVKKMKNYWRQLLNAKLITQRKFDNLTKAERGGLSELDKAGFIKRQLVETRQITKHVAQILDSRMNTKYDENDKLIREVKVITLKSKLVSDFRKDFQFYKVREINNYHHAHDAYLNAVVGTALIKKYPKLESEFVYGDYKVYDVRKMIAKSEQEIGKATAKYFFYSNIMNFFKTEITLANGEIRKRPLIETNGETGEIVWDKGRDFATVRKVLSMPQVNIVKKTEVQTGGFSKESILPKRNSDKLIARKKDWDPKKYGGFDSPTVAYSVLVVAKVEKGKSKKLKSVKELLGITIMERSSFEKNPIDFLEAKGYKEVKKDLIIKLPKYSLFELENGRKRMLASAGELQKGNELALPSKYVNFLYLASHYEKLKGSPEDNEQKQLFVEQHKHYLDEIIEQISEFSKRVILADANLDKVLSAYNKHRDKPIREQAENIIHLFTLTNLGAPAAFKYFDTTIDRKRYTSTKEVLDATLIHQSITGLYETRIDLSQLGGDGGGGSEAAAKGSSGGVLNLEEEYRLHEKPVPSSIDPSWLQLFPTVWAERAGMGLANQVPPVVVELRSGASPVAVRQYPMSKEAREGIRPHIQKFLDLGVLVPCRSPWNTPLLPVKKPGTNDYRPVQDLREINKRVQDIHPTVPNPYNLLSSLPPSYTWYSVLDLKDAFFCLRLHPNSQPLFAFEWKDPEKGNTGQLTWTRLPQGFKNSPTLFNEALHRDLAPFRALNPQVVLLQYVDDLLVAAPTYEDCKKGTQKLLQELSKLGYRVSAKKAQLCQREVTYLGYLLKEGKRWLTPARKATVMKIPVPTTPRQVREFLGKAGFCRLFIPGFASLAAPLYPLTKPSIPFIWTEEHQQAFDHIKKALLSAPALALPDLTKPFTLYIDERAGVARGVLTQTLGPWRRPVAYLSKKLDPVASGWPTCLKAVAAVALLLKDADKLTLGQNVTVIASHSLESIVRQPPDRWMTNARMTHYQSLLLNERVSFAPPAVLNPATLLPVESEATPVHRCSEILAEETGTRRDLEDQPLPGVPTWYTDGSSFITEGKRRAGAPIVDGKRTVWASSLPEGTSAQKAELVALTQALRLAEGKNINIYTDSRYAFATAHIHGAIYKQRGWLTSAGKDIKNKEEILALLEAIHLPRRVAIIHCPGHQRGSNPVATGNRRADEAAKQAALSTRVLAGTTKPAGKRTADGSEFEKRTADGSEFESPKKKAKVE

SEQ ID NO: 1474 - protein, 2094 aa, synthetic construct
MPAAKRVKLDGGDKKYSIGLDIGTNSVGWAVITDEYKVPSKKFKVLGNTDRHSIKKNLIGALLFDSGETAEATRLKRTARRRYTRRKNRICYLQEIFSNEMAKVDDSFFHRLEESFLVEEDKKHERHPIFGNIVDEVAYHEKYPTIYHLRKKLVDSTDKADLRLIYLALAHMIKFRGHFLIEGDLNPDNSDVDKLFIQLVQTYNQLFEENPINASGVDAKAILSARLSKSRRLENLIAQLPGEKKNGLFGNLIALSLGLTPNFKSNFDLAEDAKLQLSKDTYDDDLDNLLAQIGDQYADLFLAAKNLSDAILLSDILRVNTEITKAPLSASMIKRYDEHHQDLTLLKALVRQQLPEKYKEIFFDQSKNGYAGYIDGGASQEEFYKFIKPILEKMDGTEELLVKLNREDLLRKQRTFDNGSIPHQIHLGELHAILRRQEDFYPFLKDNREKIEKILTFRIPYYVGPLARGNSRFAWMTRKSEETITPWNFEEVVDKGASAQSFIERMTNFDKNLPNEKVLPKHSLLYEYFTVYNELTKVKYVTEGMRKPAFLSGEQKKAIVDLLFKTNRKVTVKQLKEDYFKKIECFDSVEISGVEDRFNASLGTYHDLLKIIKDKDFLDNEENEDILEDIVLTLTLFEDREMIEERLKTYAHLFDDKVMKQLKRRRYTGWGRLSRKLINGIRDKQSGKTILDFLKSDGFANRNFMQLIHDDSLTFKEDIQKAQVSGQGDSLHEHIANLAGSPAIKKGILQTVKVVDELVKVMGRHKPENIVIEMARENQTTQKGQKNSRERMKRIEEGIKELGSQILKEHPVENTQLQNEKLYLYYLQNGRDMYVDQELDINRLSDYDVDHIVPQSFLKDDSIDNKVLTRSDKARGKSDNVPSEEVVKKMKNYWRQLLNAKLITQRKFDNLTKAERGGLSELDKAGFIKRQLVETRQITKHVAQILDSRMNTKYDENDKLIREVKVITLKSKLVSDFRKDFQFYKVREINNYHHAHDAYLNAVVGTALIKKYPKLESEFVYGDYKVYDVRKMIAKSEQEIGKATAKYFFYSNIMNFFKTEITLANGEIRKRPLIETNGETGEIVWDKGRDFATVRKVLSMPQVNIVKKTEVQTGGFSKESILPKRNSDKLIARKKDWDPKKYGGFDSPTVAYSVLVVAKVEKGKSKKLKSVKELLGITIMERSSFEKNPIDFLEAKGYKEVKKDLIIKLPKYSLFELENGRKRMLASAGELQKGNELALPSKYVNFLYLASHYEKLKGSPEDNEQKQLFVEQHKHYLDEIIEQISEFSKRVILADANLDKVLSAYNKHRDKPIREQAENIIHLFTLTNLGAPAAFKYFDTTIDRKRYTSTKEVLDATLIHQSITGLYETRIDLSQLGGDGGGSSEAAAKGGSGGVLNLEEEYRLHEKPVPSSIDPSWLQLFPTVWAERAGMGLANQVPPVVVELRSGASPVAVRQYPMSKEAREGIRPHIQKFLDLGVLVPCRSPWNTPLLPVKKPGTNDYRPVQDLREINKRVQDIHPTVPNPYNLLSSLPPSYTWYSVLDLKDAFFCLRLHPNSQPLFAFEWKDPEKGNTGQLTWTRLPQGFKNSPTLFNEALHRDLAPFRALNPQVVLLQYVDDLLVAAPTYEDCKKGTQKLLQELSKLGYRVSAKKAQLCQREVTYLGYLLKEGKRWLTPARKATVMKIPVPTTPRQVREFLGKAGFCRLFIPGFASLAAPLYPLTKPSIPFIWTEEHQQAFDHIKKALLSAPALALPDLTKPFTLYIDERAGVARGVLTQTLGPWRRPVAYLSKKLDPVASGWPTCLKAVAAVALLLKDADKLTLGQNVTVIASHSLESIVRQPPDRWMTNARMTHYQSLLLNERVSFAPPAVLNPATLLPVESEATPVHRCSEILAEETGTRRDLEDQPLPGVPTWYTDGSSFITEGKRRAGAPIVDGKRTVWASSLPEGTSAQKAELVALTQALRLAEGKNINIYTDSRYAFATAHIHGAIYKQRGWLTSAGKDIKNKEEILALLEAIHLPRRVAIIHCPGHQRGSNPVATGNRRADEAAKQAALSTRVLAGTTKPAGKRTADGSEFEKRTADGSEFESPKKKAKVE

SEQ ID NO: 1475 - protein, 2089 aa, synthetic construct
MPAAKRVKLDGGDKKYSIGLDIGTNSVGWAVITDEYKVPSKKFKVLGNTDRHSIKKNLIGALLFDSGETAEATRLKRTARRRYTRRKNRICYLQEIFSNEMAKVDDSFFHRLEESFLVEEDKKHERHPIFGNIVDEVAYHEKYPTIYHLRKKLVDSTDKADLRLIYLALAHMIKFRGHFLIEGDLNPDNSDVDKLFIQLVQTYNQLFEENPINASGVDAKAILSARLSKSRRLENLIAQLPGEKKNGLFGNLIALSLGLTPNFKSNFDLAEDAKLQLSKDTYDDDLDNLLAQIGDQYADLFLAAKNLSDAILLSDILRVNTEITKAPLSASMIKRYDEHHQDLTLLKALVRQQLPEKYKEIFFDQSKNGYAGYIDGGASQEEFYKFIKPILEKMDGTEELLVKLNREDLLRKQRTFDNGSIPHQIHLGELHAILRRQEDFYPFLKDNREKIEKILTFRIPYYVGPLARGNSRFAWMTRKSEETITPWNFEEVVDKGASAQSFIERMTNFDKNLPNEKVLPKHSLLYEYFTVYNELTKVKYVTEGMRKPAFLSGEQKKAIVDLLFKTNRKVTVKQLKEDYFKKIECFDSVEISGVEDRFNASLGTYHDLLKIIKDKDFLDNEENEDILEDIVLTLTLFEDREMIEERLKTYAHLFDDKVMKQLKRRRYTGWGRLSRKLINGIRDKQSGKTILDFLKSDGFANRNFMQLIHDDSLTFKEDIQKAQVSGQGDSLHEHIANLAGSPAIKKGILQTVKVVDELVKVMGRHKPENIVIEMARENQTTQKGQKNSRERMKRIEEGIKELGSQILKEHPVENTQLQNEKLYLYYLQNGRDMYVDQELDINRLSDYDVDHIVPQSFLKDDSIDNKVLTRSDKARGKSDNVPSEEVVKKMKNYWRQLLNAKLITQRKFDNLTKAERGGLSELDKAGFIKRQLVETRQITKHVAQILDSRMNTKYDENDKLIREVKVITLKSKLVSDFRKDFQFYKVREINNYHHAHDAYLNAVVGTALIKKYPKLESEFVYGDYKVYDVRKMIAKSEQEIGKATAKYFFYSNIMNFFKTEITLANGEIRKRPLIETNGETGEIVWDKGRDFATVRKVLSMPQVNIVKKTEVQTGGFSKESILPKRNSDKLIARKKDWDPKKYGGFDSPTVAYSVLVVAKVEKGKSKKLKSVKELLGITIMERSSFEKNPIDFLEAKGYKEVKKDLIIKLPKYSLFELENGRKRMLASAGELQKGNELALPSKYVNFLYLASHYEKLKGSPEDNEQKQLFVEQHKHYLDEIIEQISEFSKRVILADANLDKVLSAYNKHRDKPIREQAENIIHLFTLTNLGAPAAFKYFDTTIDRKRYTSTKEVLDATLIHQSITGLYETRIDLSQLGGDGGGGSGGSGGVLNLEEEYRLHEKPVPSSIDPSWLQLFPTVWAERAGMGLANQVPPVVVELRSGASPVAVRQYPMSKEAREGIRPHIQKFLDLGVLVPCRSPWNTPLLPVKKPGTNDYRPVQDLREINKRVQDIHPTVPNPYNLLSSLPPSYTWYSVLDLKDAFFCLRLHPNSQPLFAFEWKDPEKGNTGQLTWTRLPQGFKNSPTLFNEALHRDLAPFRALNPQVVLLQYVDDLLVAAPTYEDCKKGTQKLLQELSKLGYRVSAKKAQLCQREVTYLGYLLKEGKRWLTPARKATVMKIPVPTTPRQVREFLGKAGFCRLFIPGFASLAAPLYPLTKPSIPFIWTEEHQQAFDHIKKALLSAPALALPDLTKPFTLYIDERAGVARGVLTQTLGPWRRPVAYLSKKLDPVASGWPTCLKAVAAVALLLKDADKLTLGQNVTVIASHSLESIVRQPPDRWMTNARMTHYQSLLLNERVSFAPPAVLNPATLLPVESEATPVHRCSEILAEETGTRRDLEDQPLPGVPTWYTDGSSFITEGKRRAGAPIVDGKRTVWASSLPEGTSAQKAELVALTQALRLAEGKNINIYTDSRYAFATAHIHGAIYKQRGWLTSAGKDIKNKEEILALLEAIHLPRRVAIIHCPGHQRGSNPVATGNRRADEAAKQAALSTRVLAGTTKPAGKRTADGSEFEKRTADGSEFESPKKKAKVE

SEQ ID NO: 1476 - protein, 2092 aa, synthetic construct
MPAAKRVKLDGGDKKYSIGLDIGTNSVGWAVITDEYKVPSKKFKVLGNTDRHSIKKNLIGALLFDSGETAEATRLKRTARRRYTRRKNRICYLQEIFSNEMAKVDDSFFHRLEESFLVEEDKKHERHPIFGNIVDEVAYHEKYPTIYHLRKKLVDSTDKADLRLIYLALAHMIKFRGHFLIEGDLNPDNSDVDKLFIQLVQTYNQLFEENPINASGVDAKAILSARLSKSRRLENLIAQLPGEKKNGLFGNLIALSLGLTPNFKSNFDLAEDAKLQLSKDTYDDDLDNLLAQIGDQYADLFLAAKNLSDAILLSDILRVNTEITKAPLSASMIKRYDEHHQDLTLLKALVRQQLPEKYKEIFFDQSKNGYAGYIDGGASQEEFYKFIKPILEKMDGTEELLVKLNREDLLRKQRTFDNGSIPHQIHLGELHAILRRQEDFYPFLKDNREKIEKILTFRIPYYVGPLARGNSRFAWMTRKSEETITPWNFEEVVDKGASAQSFIERMTNFDKNLPNEKVLPKHSLLYEYFTVYNELTKVKYVTEGMRKPAFLSGEQKKAIVDLLFKTNRKVTVKQLKEDYFKKIECFDSVEISGVEDRFNASLGTYHDLLKIIKDKDFLDNEENEDILEDIVLTLTLFEDREMIEERLKTYAHLFDDKVMKQLKRRRYTGWGRLSRKLINGIRDKQSGKTILDFLKSDGFANRNFMQLIHDDSLTFKEDIQKAQVSGQGDSLHEHIANLAGSPAIKKGILQTVKVVDELVKVMGRHKPENIVIEMARENQTTQKGQKNSRERMKRIEEGIKELGSQILKEHPVENTQLQNEKLYLYYLQNGRDMYVDQELDINRLSDYDVDHIVPQSFLKDDSIDNKVLTRSDKARGKSDNVPSEEVVKKMKNYWRQLLNAKLITQRKFDNLTKAERGGLSELDKAGFIKRQLVETRQITKHVAQILDSRMNTKYDENDKLIREVKVITLKSKLVSDFRKDFQFYKVREINNYHHAHDAYLNAVVGTALIKKYPKLESEFVYGDYKVYDVRKMIAKSEQEIGKATAKYFFYSNIMNFFKTEITLANGEIRKRPLIETNGETGEIVWDKGRDFATVRKVLSMPQVNIVKKTEVQTGGFSKESILPKRNSDKLIARKKDWDPKKYGGFDSPTVAYSVLVVAKVEKGKSKKLKSVKELLGITIMERSSFEKNPIDFLEAKGYKEVKKDLIIKLPKYSLFELENGRKRMLASAGELQKGNELALPSKYVNFLYLASHYEKLKGSPEDNEQKQLFVEQHKHYLDEIIEQISEFSKRVILADANLDKVLSAYNKHRDKPIREQAENIIHLFTLTNLGAPAAFKYFDTTIDRKRYTSTKEVLDATLIHQSITGLYETRIDLSQLGGDGGGGSGSSPAPGGVLNLEEEYRLHEKPVPSSIDPSWLQLFPTVWAERAGMGLANQVPPVVVELRSGASPVAVRQYPMSKEAREGIRPHIQKFLDLGVLVPCRSPWNTPLLPVKKPGTNDYRPVQDLREINKRVQDIHPTVPNPYNLLSSLPPSYTWYSVLDLKDAFFCLRLHPNSQPLFAFEWKDPEKGNTGQLTWTRLPQGFKNSPTLFNEALHRDLAPFRALNPQVVLLQYVDDLLVAAPTYEDCKKGTQKLLQELSKLGYRVSAKKAQLCQREVTYLGYLLKEGKRWLTPARKATVMKIPVPTTPRQVREFLGKAGFCRLFIPGFASLAAPLYPLTKPSIPFIWTEEHQQAFDHIKKALLSAPALALPDLTKPFTLYIDERAGVARGVLTQTLGPWRRPVAYLSKKLDPVASGWPTCLKAVAAVALLLKDADKLTLGQNVTVIASHSLESIVRQPPDRWMTNARMTHYQSLLLNERVSFAPPAVLNPATLLPVESEATPVHRCSEILAEETGTRRDLEDQPLPGVPTWYTDGSSFITEGKRRAGAPIVDGKRTVWASSLPEGTSAQKAELVALTQALRLAEGKNINIYTDSRYAFATAHIHGAIYKQRGWLTSAGKDIKNKEEILALLEAIHLPRRVAIIHCPGHQRGSNPVATGNRRADEAAKQAALSTRVLAGTTKPAGKRTADGSEFEKRTADGSEFESPKKKAKVE

SEQ ID NO: 1477 - protein, 2092 aa, synthetic construct
MPAAKRVKLDGGDKKYSIGLDIGTNSVGWAVITDEYKVPSKKFKVLGNTDRHSIKKNLIGALLFDSGETAEATRLKRTARRRYTRRKNRICYLQEIFSNEMAKVDDSFFHRLEESFLVEEDKKHERHPIFGNIVDEVAYHEKYPTIYHLRKKLVDSTDKADLRLIYLALAHMIKFRGHFLIEGDLNPDNSDVDKLFIQLVQTYNQLFEENPINASGVDAKAILSARLSKSRRLENLIAQLPGEKKNGLFGNLIALSLGLTPNFKSNFDLAEDAKLQLSKDTYDDDLDNLLAQIGDQYADLFLAAKNLSDAILLSDILRVNTEITKAPLSASMIKRYDEHHQDLTLLKALVRQQLPEKYKEIFFDQSKNGYAGYIDGGASQEEFYKFIKPILEKMDGTEELLVKLNREDLLRKQRTFDNGSIPHQIHLGELHAILRRQEDFYPFLKDNREKIEKILTFRIPYYVGPLARGNSRFAWMTRKSEETITPWNFEEVVDKGASAQSFIERMTNFDKNLPNEKVLPKHSLLYEYFTVYNELTKVKYVTEGMRKPAFLSGEQKKAIVDLLFKTNRKVTVKQLKEDYFKKIECFDSVEISGVEDRFNASLGTYHDLLKIIKDKDFLDNEENEDILEDIVLTLTLFEDREMIEERLKTYAHLFDDKVMKQLKRRRYTGWGRLSRKLINGIRDKQSGKTILDFLKSDGFANRNFMQLIHDDSLTFKEDIQKAQVSGQGDSLHEHIANLAGSPAIKKGILQTVKVVDELVKVMGRHKPENIVIEMARENQTTQKGQKNSRERMKRIEEGIKELGSQILKEHPVENTQLQNEKLYLYYLQNGRDMYVDQELDINRLSDYDVDHIVPQSFLKDDSIDNKVLTRSDKARGKSDNVPSEEVVKKMKNYWRQLLNAKLITQRKFDNLTKAERGGLSELDKAGFIKRQLVETRQITKHVAQILDSRMNTKYDENDKLIREVKVITLKSKLVSDFRKDFQFYKVREINNYHHAHDAYLNAVVGTALIKKYPKLESEFVYGDYKVYDVRKMIAKSEQEIGKATAKYFFYSNIMNFFKTEITLANGEIRKRPLIETNGETGEIVWDKGRDFATVRKVLSMPQVNIVKKTEVQTGGFSKESILPKRNSDKLIARKKDWDPKKYGGFDSPTVAYSVLVVAKVEKGKSKKLKSVKELLGITIMERSSFEKNPIDFLEAKGYKEVKKDLIIKLPKYSLFELENGRKRMLASAGELQKGNELALPSKYVNFLYLASHYEKLKGSPEDNEQKQLFVEQHKHYLDEIIEQISEFSKRVILADANLDKVLSAYNKHRDKPIREQAENIIHLFTLTNLGAPAAFKYFDTTIDRKRYTSTKEVLDATLIHQSITGLYETRIDLSQLGGDGGGSSGGGGGSGGVLNLEEEYRLHEKPVPSSIDPSWLQLFPTVWAERAGMGLANQVPPVVVELRSGASPVAVRQYPMSKEAREGIRPHIQKFLDLGVLVPCRSPWNTPLLPVKKPGTNDYRPVQDLREINKRVQDIHPTVPNPYNLLSSLPPSYTWYSVLDLKDAFFCLRLHPNSQPLFAFEWKDPEKGNTGQLTWTRLPQGFKNSPTLFNEALHRDLAPFRALNPQVVLLQYVDDLLVAAPTYEDCKKGTQKLLQELSKLGYRVSAKKAQLCQREVTYLGYLLKEGKRWLTPARKATVMKIPVPTTPRQVREFLGKAGFCRLFIPGFASLAAPLYPLTKPSIPFIWTEEHQQAFDHIKKALLSAPALALPDLTKPFTLYIDERAGVARGVLTQTLGPWRRPVAYLSKKLDPVASGWPTCLKAVAAVALLLKDADKLTLGQNVTVIASHSLESIVRQPPDRWMTNARMTHYQSLLLNERVSFAPPAVLNPATLLPVESEATPVHRCSEILAEETGTRRDLEDQPLPGVPTWYTDGSSFITEGKRRAGAPIVDGKRTVWASSLPEGTSAQKAELVALTQALRLAEGKNINIYTDSRYAFATAHIHGAIYKQRGWLTSAGKDIKNKEEILALLEAIHLPRRVAIIHCPGHQRGSNPVATGNRRADEAAKQAALSTRVLAGTTKPAGKRTADGSEFEKRTADGSEFESPKKKAKVE

SEQ ID NO: 1478 - protein, 2007 aa, synthetic construct
MPAAKRVKLDGGDKKYSIGLDIGTNSVGWAVITDEYKVPSKKFKVLGNTDRHSIKKNLIGALLFDSGETAEATRLKRTARRRYTRRKNRICYLQEIFSNEMAKVDDSFFHRLEESFLVEEDKKHERHPIFGNIVDEVAYHEKYPTIYHLRKKLVDSTDKADLRLIYLALAHMIKFRGHFLIEGDLNPDNSDVDKLFIQLVQTYNQLFEENPINASGVDAKAILSARLSKSRRLENLIAQLPGEKKNGLFGNLIALSLGLTPNFKSNFDLAEDAKLQLSKDTYDDDLDNLLAQIGDQYADLFLAAKNLSDAILLSDILRVNTEITKAPLSASMIKRYDEHHQDLTLLKALVRQQLPEKYKEIFFDQSKNGYAGYIDGGASQEEFYKFIKPILEKMDGTEELLVKLNREDLLRKQRTFDNGSIPHQIHLGELHAILRRQEDFYPFLKDNREKIEKILTFRIPYYVGPLARGNSRFAWMTRKSEETITPWNFEEVVDKGASAQSFIERMTNFDKNLPNEKVLPKHSLLYEYFTVYNELTKVKYVTEGMRKPAFLSGEQKKAIVDLLFKTNRKVTVKQLKEDYFKKIECFDSVEISGVEDRFNASLGTYHDLLKIIKDKDFLDNEENEDILEDIVLTLTLFEDREMIEERLKTYAHLFDDKVMKQLKRRRYTGWGRLSRKLINGIRDKQSGKTILDFLKSDGFANRNFMQLIHDDSLTFKEDIQKAQVSGQGDSLHEHIANLAGSPAIKKGILQTVKVVDELVKVMGRHKPENIVIEMARENQTTQKGQKNSRERMKRIEEGIKELGSQILKEHPVENTQLQNEKLYLYYLQNGRDMYVDQELDINRLSDYDVDHIVPQSFLKDDSIDNKVLTRSDKARGKSDNVPSEEVVKKMKNYWRQLLNAKLITQRKFDNLTKAERGGLSELDKAGFIKRQLVETRQITKHVAQILDSRMNTKYDENDKLIREVKVITLKSKLVSDFRKDFQFYKVREINNYHHAHDAYLNAVVGTALIKKYPKLESEFVYGDYKVYDVRKMIAKSEQEIGKATAKYFFYSNIMNFFKTEITLANGEIRKRPLIETNGETGEIVWDKGRDFATVRKVLSMPQVNIVKKTEVQTGGFSKESILPKRNSDKLIARKKDWDPKKYGGFDSPTVAYSVLVVAKVEKGKSKKLKSVKELLGITIMERSSFEKNPIDFLEAKGYKEVKKDLIIKLPKYSLFELENGRKRMLASAGELQKGNELALPSKYVNFLYLASHYEKLKGSPEDNEQKQLFVEQHKHYLDEIIEQISEFSKRVILADANLDKVLSAYNKHRDKPIREQAENIIHLFTLTNLGAPAAFKYFDTTIDRKRYTSTKEVLDATLIHQSITGLYETRIDLSQLGGDGGGGGGGGGAVLGLEHLPRPPQISQFPLNPERLQALQHLVRKALEAGHIEPYTGPGNNPVFPVKKANGTWRFIHDLRATNSLTIDLSSSSPGPPDLSSLPTTLAHLQTIDLRDAFFQIPLPKQFQPYFAFTVPQQCNYGPGTRYAWKVLPQGFKNSPTLFEMQLAHILQPIRQAFPQCTILQYMDDILLASPSHEDLLLLSEATMASLISHGLPVSENKTQQTPGTIKFLGQIISPNHLTYDAVPTVPIRSRWALPELQALLGEIQWVSKGTPTLRQPLHSLYCALQRHTDPRDQIYLNPSQVQSLVQLRQALSQNCRSRLVQTLPLLGAIMLTLTGTTTVVFQSKEQWPLVWLHAPLPHTSQCPWGQLLASAVLLLDKYTLQSYGLLCQTIHHNISTQTFNQFIQTSDHPSVPILLHHSHRFKNLGAQTGELWNTFLKTAAPLAPVKALMPVFTLSPVIINTAPCLFSDGSTSRAAYILWDKQILSQRSFPLPPPHKSAQRAELLGLLHGLSSARSWRCLNIFLDSKYLYHYLRTLALGTFQGRSSQAPFQALLPRLLSRKVVYLHHVRSHTNLPDPISRLNALTDALLITPVLQLAGKRTADGSEFEKRTADGSEFESPKKKAKVE

SEQ ID NO: 1479 - protein, 2013 aa, synthetic construct
MPAAKRVKLDGGDKKYSIGLDIGTNSVGWAVITDEYKVPSKKFKVLGNTDRHSIKKNLIGALLFDSGETAEATRLKRTARRRYTRRKNRICYLQEIFSNEMAKVDDSFFHRLEESFLVEEDKKHERHPIFGNIVDEVAYHEKYPTIYHLRKKLVDSTDKADLRLIYLALAHMIKFRGHFLIEGDLNPDNSDVDKLFIQLVQTYNQLFEENPINASGVDAKAILSARLSKSRRLENLIAQLPGEKKNGLFGNLIALSLGLTPNFKSNFDLAEDAKLQLSKDTYDDDLDNLLAQIGDQYADLFLAAKNLSDAILLSDILRVNTEITKAPLSASMIKRYDEHHQDLTLLKALVRQQLPEKYKEIFFDQSKNGYAGYIDGGASQEEFYKFIKPILEKMDGTEELLVKLNREDLLRKQRTFDNGSIPHQIHLGELHAILRRQEDFYPFLKDNREKIEKILTFRIPYYVGPLARGNSRFAWMTRKSEETITPWNFEEVVDKGASAQSFIERMTNFDKNLPNEKVLPKHSLLYEYFTVYNELTKVKYVTEGMRKPAFLSGEQKKAIVDLLFKTNRKVTVKQLKEDYFKKIECFDSVEISGVEDRFNASLGTYHDLLKIIKDKDFLDNEENEDILEDIVLTLTLFEDREMIEERLKTYAHLFDDKVMKQLKRRRYTGWGRLSRKLINGIRDKQSGKTILDFLKSDGFANRNFMQLIHDDSLTFKEDIQKAQVSGQGDSLHEHIANLAGSPAIKKGILQTVKVVDELVKVMGRHKPENIVIEMARENQTTQKGQKNSRERMKRIEEGIKELGSQILKEHPVENTQLQNEKLYLYYLQNGRDMYVDQELDINRLSDYDVDHIVPQSFLKDDSIDNKVLTRSDKARGKSDNVPSEEVVKKMKNYWRQLLNAKLITQRKFDNLTKAERGGLSELDKAGFIKRQLVETRQITKHVAQILDSRMNTKYDENDKLIREVKVITLKSKLVSDFRKDFQFYKVREINNYHHAHDAYLNAVVGTALIKKYPKLESEFVYGDYKVYDVRKMIAKSEQEIGKATAKYFFYSNIMNFFKTEITLANGEIRKRPLIETNGETGEIVWDKGRDFATVRKVLSMPQVNIVKKTEVQTGGFSKESILPKRNSDKLIARKKDWDPKKYGGFDSPTVAYSVLVVAKVEKGKSKKLKSVKELLGITIMERSSFEKNPIDFLEAKGYKEVKKDLIIKLPKYSLFELENGRKRMLASAGELQKGNELALPSKYVNFLYLASHYEKLKGSPEDNEQKQLFVEQHKHYLDEIIEQISEFSKRVILADANLDKVLSAYNKHRDKPIREQAENIIHLFTLTNLGAPAAFKYFDTTIDRKRYTSTKEVLDATLIHQSITGLYETRIDLSQLGGDGGPAPAPAPAPAPGGAVLGLEHLPRPPQISQFPLNPERLQALQHLVRKALEAGHIEPYTGPGNNPVFPVKKANGTWRFIHDLRATNSLTIDLSSSSPGPPDLSSLPTTLAHLQTIDLRDAFFQIPLPKQFQPYFAFTVPQQCNYGPGTRYAWKVLPQGFKNSPTLFEMQLAHILQPIRQAFPQCTILQYMDDILLASPSHEDLLLLSEATMASLISHGLPVSENKTQQTPGTIKFLGQIISPNHLTYDAVPTVPIRSRWALPELQALLGEIQWVSKGTPTLRQPLHSLYCALQRHTDPRDQIYLNPSQVQSLVQLRQALSQNCRSRLVQTLPLLGAIMLTLTGTTTVVFQSKEQWPLVWLHAPLPHTSQCPWGQLLASAVLLLDKYTLQSYGLLCQTIHHNISTQTFNQFIQTSDHPSVPILLHHSHRFKNLGAQTGELWNTFLKTAAPLAPVKALMPVFTLSPVIINTAPCLFSDGSTSRAAYILWDKQILSQRSFPLPPPHKSAQRAELLGLLHGLSSARSWRCLNIFLDSKYLYHYLRTLALGTFQGRSSQAPFQALLPRLLSRKVVYLHHVRSHTNLPDPISRLNALTDALLITPVLQLAGKRTADGSEFEKRTADGSEFESPKKKAKVE

SEQ ID NO: 1480 - protein, 2013 aa, synthetic construct
MPAAKRVKLDGGDKKYSIGLDIGTNSVGWAVITDEYKVPSKKFKVLGNTDRHSIKKNLIGALLFDSGETAEATRLKRTARRRYTRRKNRICYLQEIFSNEMAKVDDSFFHRLEESFLVEEDKKHERHPIFGNIVDEVAYHEKYPTIYHLRKKLVDSTDKADLRLIYLALAHMIKFRGHFLIEGDLNPDNSDVDKLFIQLVQTYNQLFEENPINASGVDAKAILSARLSKSRRLENLIAQLPGEKKNGLFGNLIALSLGLTPNFKSNFDLAEDAKLQLSKDTYDDDLDNLLAQIGDQYADLFLAAKNLSDAILLSDILRVNTEITKAPLSASMIKRYDEHHQDLTLLKALVRQQLPEKYKEIFFDQSKNGYAGYIDGGASQEEFYKFIKPILEKMDGTEELLVKLNREDLLRKQRTFDNGSIPHQIHLGELHAILRRQEDFYPFLKDNREKIEKILTFRIPYYVGPLARGNSRFAWMTRKSEETITPWNFEEVVDKGASAQSFIERMTNFDKNLPNEKVLPKHSLLYEYFTVYNELTKVKYVTEGMRKPAFLSGEQKKAIVDLLFKTNRKVTVKQLKEDYFKKIECFDSVEISGVEDRFNASLGTYHDLLKIIKDKDFLDNEENEDILEDIVLTLTLFEDREMIEERLKTYAHLFDDKVMKQLKRRRYTGWGRLSRKLINGIRDKQSGKTILDFLKSDGFANRNFMQLIHDDSLTFKEDIQKAQVSGQGDSLHEHIANLAGSPAIKKGILQTVKVVDELVKVMGRHKPENIVIEMARENQTTQKGQKNSRERMKRIEEGIKELGSQILKEHPVENTQLQNEKLYLYYLQNGRDMYVDQELDINRLSDYDVDHIVPQSFLKDDSIDNKVLTRSDKARGKSDNVPSEEVVKKMKNYWRQLLNAKLITQRKFDNLTKAERGGLSELDKAGFIKRQLVETRQITKHVAQILDSRMNTKYDENDKLIREVKVITLKSKLVSDFRKDFQFYKVREINNYHHAHDAYLNAVVGTALIKKYPKLESEFVYGDYKVYDVRKMIAKSEQEIGKATAKYFFYSNIMNFFKTEITLANGEIRKRPLIETNGETGEIVWDKGRDFATVRKVLSMPQVNIVKKTEVQTGGFSKESILPKRNSDKLIARKKDWDPKKYGGFDSPTVAYSVLVVAKVEKGKSKKLKSVKELLGITIMERSSFEKNPIDFLEAKGYKEVKKDLIIKLPKYSLFELENGRKRMLASAGELQKGNELALPSKYVNFLYLASHYEKLKGSPEDNEQKQLFVEQHKHYLDEIIEQISEFSKRVILADANLDKVLSAYNKHRDKPIREQAENIIHLFTLTNLGAPAAFKYFDTTIDRKRYTSTKEVLDATLIHQSITGLYETRIDLSQLGGDGGPAPEAAAKGGSGGAVLGLEHLPRPPQISQFPLNPERLQALQHLVRKALEAGHIEPYTGPGNNPVFPVKKANGTWRFIHDLRATNSLTIDLSSSSPGPPDLSSLPTTLAHLQTIDLRDAFFQIPLPKQFQPYFAFTVPQQCNYGPGTRYAWKVLPQGFKNSPTLFEMQLAHILQPIRQAFPQCTILQYMDDILLASPSHEDLLLLSEATMASLISHGLPVSENKTQQTPGTIKFLGQIISPNHLTYDAVPTVPIRSRWALPELQALLGEIQWVSKGTPTLRQPLHSLYCALQRHTDPRDQIYLNPSQVQSLVQLRQALSQNCRSRLVQTLPLLGAIMLTLTGTTTVVFQSKEQWPLVWLHAPLPHTSQCPWGQLLASAVLLLDKYTLQSYGLLCQTIHHNISTQTFNQFIQTSDHPSVPILLHHSHRFKNLGAQTGELWNTFLKTAAPLAPVKALMPVFTLSPVIINTAPCLFSDGSTSRAAYILWDKQILSQRSFPLPPPHKSAQRAELLGLLHGLSSARSWRCLNIFLDSKYLYHYLRTLALGTFQGRSSQAPFQALLPRLLSRKVVYLHHVRSHTNLPDPISRLNALTDALLITPVLQLAGKRTADGSEFEKRTADGSEFESPKKKAKVE

SEQ ID NO: 1481 - protein, 2011 aa, synthetic construct
MPAAKRVKLDGGDKKYSIGLDIGTNSVGWAVITDEYKVPSKKFKVLGNTDRHSIKKNLIGALLFDSGETAEATRLKRTARRRYTRRKNRICYLQEIFSNEMAKVDDSFFHRLEESFLVEEDKKHERHPIFGNIVDEVAYHEKYPTIYHLRKKLVDSTDKADLRLIYLALAHMIKFRGHFLIEGDLNPDNSDVDKLFIQLVQTYNQLFEENPINASGVDAKAILSARLSKSRRLENLIAQLPGEKKNGLFGNLIALSLGLTPNFKSNFDLAEDAKLQLSKDTYDDDLDNLLAQIGDQYADLFLAAKNLSDAILLSDILRVNTEITKAPLSASMIKRYDEHHQDLTLLKALVRQQLPEKYKEIFFDQSKNGYAGYIDGGASQEEFYKFIKPILEKMDGTEELLVKLNREDLLRKQRTFDNGSIPHQIHLGELHAILRRQEDFYPFLKDNREKIEKILTFRIPYYVGPLARGNSRFAWMTRKSEETITPWNFEEVVDKGASAQSFIERMTNFDKNLPNEKVLPKHSLLYEYFTVYNELTKVKYVTEGMRKPAFLSGEQKKAIVDLLFKTNRKVTVKQLKEDYFKKIECFDSVEISGVEDRFNASLGTYHDLLKIIKDKDFLDNEENEDILEDIVLTLTLFEDREMIEERLKTYAHLFDDKVMKQLKRRRYTGWGRLSRKLINGIRDKQSGKTILDFLKSDGFANRNFMQLIHDDSLTFKEDIQKAQVSGQGDSLHEHIANLAGSPAIKKGILQTVKVVDELVKVMGRHKPENIVIEMARENQTTQKGQKNSRERMKRIEEGIKELGSQILKEHPVENTQLQNEKLYLYYLQNGRDMYVDQELDINRLSDYDVDHIVPQSFLKDDSIDNKVLTRSDKARGKSDNVPSEEVVKKMKNYWRQLLNAKLITQRKFDNLTKAERGGLSELDKAGFIKRQLVETRQITKHVAQILDSRMNTKYDENDKLIREVKVITLKSKLVSDFRKDFQFYKVREINNYHHAHDAYLNAVVGTALIKKYPKLESEFVYGDYKVYDVRKMIAKSEQEIGKATAKYFFYSNIMNFFKTEITLANGEIRKRPLIETNGETGEIVWDKGRDFATVRKVLSMPQVNIVKKTEVQTGGFSKESILPKRNSDKLIARKKDWDPKKYGGFDSPTVAYSVLVVAKVEKGKSKKLKSVKELLGITIMERSSFEKNPIDFLEAKGYKEVKKDLIIKLPKYSLFELENGRKRMLASAGELQKGNELALPSKYVNFLYLASHYEKLKGSPEDNEQKQLFVEQHKHYLDEIIEQISEFSKRVILADANLDKVLSAYNKHRDKPIREQAENIIHLFTLTNLGAPAAFKYFDTTIDRKRYTSTKEVLDATLIHQSITGLYETRIDLSQLGGDGGPAPGSSGGGGGAVLGLEHLPRPPQISQFPLNPERLQALQHLVRKALEAGHIEPYTGPGNNPVFPVKKANGTWRFIHDLRATNSLTIDLSSSSPGPPDLSSLPTTLAHLQTIDLRDAFFQIPLPKQFQPYFAFTVPQQCNYGPGTRYAWKVLPQGFKNSPTLFEMQLAHILQPIRQAFPQCTILQYMDDILLASPSHEDLLLLSEATMASLISHGLPVSENKTQQTPGTIKFLGQIISPNHLTYDAVPTVPIRSRWALPELQALLGEIQWVSKGTPTLRQPLHSLYCALQRHTDPRDQIYLNPSQVQSLVQLRQALSQNCRSRLVQTLPLLGAIMLTLTGTTTVVFQSKEQWPLVWLHAPLPHTSQCPWGQLLASAVLLLDKYTLQSYGLLCQTIHHNISTQTFNQFIQTSDHPSVPILLHHSHRFKNLGAQTGELWNTFLKTAAPLAPVKALMPVFTLSPVIINTAPCLFSDGSTSRAAYILWDKQILSQRSFPLPPPHKSAQRAELLGLLHGLSSARSWRCLNIFLDSKYLYHYLRTLALGTFQGRSSQAPFQALLPRLLSRKVVYLHHVRSHTNLPDPISRLNALTDALLITPVLQLAGKRTADGSEFEKRTADGSEFESPKKKAKVE

SEQ ID NO: 1482 - protein, 2013 aa, synthetic construct
MPAAKRVKLDGGDKKYSIGLDIGTNSVGWAVITDEYKVPSKKFKVLGNTDRHSIKKNLIGALLFDSGETAEATRLKRTARRRYTRRKNRICYLQEIFSNEMAKVDDSFFHRLEESFLVEEDKKHERHPIFGNIVDEVAYHEKYPTIYHLRKKLVDSTDKADLRLIYLALAHMIKFRGHFLIEGDLNPDNSDVDKLFIQLVQTYNQLFEENPINASGVDAKAILSARLSKSRRLENLIAQLPGEKKNGLFGNLIALSLGLTPNFKSNFDLAEDAKLQLSKDTYDDDLDNLLAQIGDQYADLFLAAKNLSDAILLSDILRVNTEITKAPLSASMIKRYDEHHQDLTLLKALVRQQLPEKYKEIFFDQSKNGYAGYIDGGASQEEFYKFIKPILEKMDGTEELLVKLNREDLLRKQRTFDNGSIPHQIHLGELHAILRRQEDFYPFLKDNREKIEKILTFRIPYYVGPLARGNSRFAWMTRKSEETITPWNFEEVVDKGASAQSFIERMTNFDKNLPNEKVLPKHSLLYEYFTVYNELTKVKYVTEGMRKPAFLSGEQKKAIVDLLFKTNRKVTVKQLKEDYFKKIECFDSVEISGVEDRFNASLGTYHDLLKIIKDKDFLDNEENEDILEDIVLTLTLFEDREMIEERLKTYAHLFDDKVMKQLKRRRYTGWGRLSRKLINGIRDKQSGKTILDFLKSDGFANRNFMQLIHDDSLTFKEDIQKAQVSGQGDSLHEHIANLAGSPAIKKGILQTVKVVDELVKVMGRHKPENIVIEMARENQTTQKGQKNSRERMKRIEEGIKELGSQILKEHPVENTQLQNEKLYLYYLQNGRDMYVDQELDINRLSDYDVDHIVPQSFLKDDSIDNKVLTRSDKARGKSDNVPSEEVVKKMKNYWRQLLNAKLITQRKFDNLTKAERGGLSELDKAGFIKRQLVETRQITKHVAQILDSRMNTKYDENDKLIREVKVITLKSKLVSDFRKDFQFYKVREINNYHHAHDAYLNAVVGTALIKKYPKLESEFVYGDYKVYDVRKMIAKSEQEIGKATAKYFFYSNIMNFFKTEITLANGEIRKRPLIETNGETGEIVWDKGRDFATVRKVLSMPQVNIVKKTEVQTGGFSKESILPKRNSDKLIARKKDWDPKKYGGFDSPTVAYSVLVVAKVEKGKSKKLKSVKELLGITIMERSSFEKNPIDFLEAKGYKEVKKDLIIKLPKYSLFELENGRKRMLASAGELQKGNELALPSKYVNFLYLASHYEKLKGSPEDNEQKQLFVEQHKHYLDEIIEQISEFSKRVILADANLDKVLSAYNKHRDKPIREQAENIIHLFTLTNLGAPAAFKYFDTTIDRKRYTSTKEVLDATLIHQSITGLYETRIDLSQLGGDGGEAAAKGSSGGSGGAVLGLEHLPRPPQISQFPLNPERLQALQHLVRKALEAGHIEPYTGPGNNPVFPVKKANGTWRFIHDLRATNSLTIDLSSSSPGPPDLSSLPTTLAHLQTIDLRDAFFQIPLPKQFQPYFAFTVPQQCNYGPGTRYAWKVLPQGFKNSPTLFQMQLAHILQPIRQAFPQCTILQYMDDILLASPSHEDLLLLSEATMASLISHGLPVSENKTQQTPGTIKFLGQIISPNHLTYDAVPTVPIRSRWALPELQALLGEIQWVSKGTPTLRQPLHSLYCALQPHTDPRDQIYLNPSQVQSLVQLRQALSQNCRSRLVQTLPLLGAIMLTLTGTTTVVFQSKEQWPLVWLHAPLPHTSQCPWGQLLASAVLLLDKYTLQSYGLLCQTIHHNISTQTFNQFIQTSDHPSVPILLHHSHRFKNLGAQTGELWNTFLKTAAPLAPVKALMPVFTLSPVIINTAPCLFSDGSTSRAAYILWDKQILSQRSFPLPPPHKSAQRAELLGLLHGLSSARSWRCLNIFLDSKYLYHYLRTLALGTFQGRSSQAPFQALLPRLLSRKVVYLHHVRSHTNLPDPISRLNALTDALLITPVLQLAGKRTADGSEFEKRTADGSEFESPKKKAKVE

SEQ ID NO: 1483 - protein, 2010 aa, synthetic construct
MPAAKRVKLDGGDKKYSIGLDIGTNSVGWAVITDEYKVPSKKFKVLGNTDRHSIKKNLIGALLFDSGETAEATRLKRTARRRYTRRKNRICYLQEIFSNEMAKVDDSFFHRLEESFLVEEDKKHERHPIFGNIVDEVAYHEKYPTIYHLRKKLVDSTDKADLRLIYLALAHMIKFRGHFLIEGDLNPDNSDVDKLFIQLVQTYNQLFEENPINASGVDAKAILSARLSKSRRLENLIAQLPGEKKNGLFGNLIALSLGLTPNFKSNFDLAEDAKLQLSKDTYDDDLDNLLAQIGDQYADLFLAAKNLSDAILLSDILRVNTEITKAPLSASMIKRYDEHHQDLTLLKALVRQQLPEKYKEIFFDQSKNGYAGYIDGGASQEEFYKFIKPILEKMDGTEELLVKLNREDLLRKQRTFDNGSIPHQIHLGELHAILRRQEDFYPFLKDNREKIEKILTFRIPYYVGPLARGNSRFAWMTRKSEETITPWNFEEVVDKGASAQSFIERMTNFDKNLPNEKVLPKHSLLYEYFTVYNELTKVKYVTEGMRKPAFLSGEQKKAIVDLLFKTNRKVTVKQLKEDYFKKIECFDSVEISGVEDRFNASLGTYHDLLKIIKDKDFLDNEENEDILEDIVLTLTLFEDREMIEERLKTYAHLFDDKVMKQLKRRRYTGWGRLSRKLINGIRDKQSGKTILDFLKSDGFANRNFMQLIHDDSLTFKEDIQKAQVSGQGDSLHEHIANLAGSPAIKKGILQTVKVVDELVKVMGRHKPENIVIEMARENQTTQKGQKNSRERMKRIEEGIKELGSQILKEHPVENTQLQNEKLYLYYLQNGRDMYVDQELDINRLSDYDVDHIVPQSFLKDDSIDNKVLTRSDKARGKSDNVPSEEVVKKMKNYWRQLLNAKLITQRKFDNLTKAERGGLSELDKAGFIKRQLVETRQITKHVAQILDSRMNTKYDENDKLIREVKVITLKSKLVSDFRKDFQFYKVREINNYHHAHDAYLNAVVGTALIKKYPKLESEFVYGDYKVYDVRKMIAKSEQEIGKATAKYFFYSNIMNFFKTEITLANGEIRKRPLIETNGETGEIVWDKGRDFATVRKVLSMPQVNIVKKTEVQTGGFSKESILPKRNSDKLIARKKDWDPKKYGGFDSPTVAYSVLVVAKVEKGKSKKLKSVKELLGITIMERSSFEKNPIDFLEAKGYKEVKKDLIIKLPKYSLFELENGRKRMLASAGELQKGNELALPSKYVNFLYLASHYEKLKGSPEDNEQKQLFVEQHKHYLDEIIEQISEFSKRVILADANLDKVLSAYNKHRDKPIREQAENIIHLFTLTNLGAPAAFKYFDTTIDRKRYTSTKEVLDATLIHQSITGLYETRIDLSQLGGDGGEAAAKGGSGGAVLGLEHLPRPPQISQFPLNPERLQALQHLVRKALEAGHIEPYTGPGNNPVFPVKKANGTWRFIHDLRATNSLTIDLSSSSPGPPDLSSLPTTLAHLQTIDLRDAFFQIPLPKQFQPYFAFTVPQQCNYGPGTRYAWKVLPQGFKNSPTLFQMQLAHILQPIRQAFPQCTILQYMDDILLASPSHEDLLLLSEATMASLISHGLPVSENKTQQTPGTIKFLGQIISPNHLTYDAVPTVPIRSRWALPELQALLGEIQWVSKGTPTLRQPLHSLYCALQPHTDPRDQIYLNPSQVQSLVQLRQALSQNCRSRLVQTLPLLGAIMLTLTGTTTVVFQSKEQWPLVWLHAPLPHTSQCPWGQLLASAVLLLDKYTLQSYGLLCQTIHHNISTQTFNQFIQTSDHPSVPILLHHSHRFKNLGAQTGELWNTFLKTAAPLAPVKALMPVFTLSPVIINTAPCLFSDGSTSRAAYILWDKQILSQRSFPLPPPHKSAQRAELLGLLHGLSSARSWRCLNIFLDSKYLYHYLRTLALGTFQGRSSQAPFQALLPRLLSRKVVYLHHVRSHTNLPDPISRLNALTDALLITPVLQLAGKRTADGSEFEKRTADGSEFESPKKKAKVE

SEQ ID NO: 1484 - protein, 2013 aa, synthetic construct
MPAAKRVKLDGGDKKYSIGLDIGTNSVGWAVITDEYKVPSKKFKVLGNTDRHSIKKNLIGALLFDSGETAEATRLKRTARRRYTRRKNRICYLQEIFSNEMAKVDDSFFHRLEESFLVEEDKKHERHPIFGNIVDEVAYHEKYPTIYHLRKKLVDSTDKADLRLIYLALAHMIKFRGHFLIEGDLNPDNSDVDKLFIQLVQTYNQLFEENPINASGVDAKAILSARLSKSRRLENLIAQLPGEKKNGLFGNLIALSLGLTPNFKSNFDLAEDAKLQLSKDTYDDDLDNLLAQIGDQYADLFLAAKNLSDAILLSDILRVNTEITKAPLSASMIKRYDEHHQDLTLLKALVRQQLPEKYKEIFFDQSKNGYAGYIDGGASQEEFYKFIKPILEKMDGTEELLVKLNREDLLRKQRTFDNGSIPHQIHLGELHAILRRQEDFYPFLKDNREKIEKILTFRIPYYVGPLARGNSRFAWMTRKSEETITPWNFEEVVDKGASAQSFIERMTNFDKNLPNEKVLPKHSLLYEYFTVYNELTKVKYVTEGMRKPAFLSGEQKKAIVDLLFKTNRKVTVKQLKEDYFKKIECFDSVEISGVEDRFNASLGTYHDLLKIIKDKDFLDNEENEDILEDIVLTLTLFEDREMIEERLKTYAHLFDDKVMKQLKRRRYTGWGRLSRKLINGIRDKQSGKTILDFLKSDGFANRNFMQLIHDDSLTFKEDIQKAQVSGQGDSLHEHIANLAGSPAIKKGILQTVKVVDELVKVMGRHKPENIVIEMARENQTTQKGQKNSRERMKRIEEGIKELGSQILKEHPVENTQLQNEKLYLYYLQNGRDMYVDQELDINRLSDYDVDHIVPQSFLKDDSIDNKVLTRSDKARGKSDNVPSEEVVKKMKNYWRQLLNAKLITQRKFDNLTKAERGGLSELDKAGFIKRQLVETRQITKHVAQILDSRMNTKYDENDKLIREVKVITLKSKLVSDFRKDFQFYKVREINNYHHAHDAYLNAVVGTALIKKYPKLESEFVYGDYKVYDVRKMIAKSEQEIGKATAKYFFYSNIMNFFKTEITLANGEIRKRPLIETNGETGEIVWDKGRDFATVRKVLSMPQVNIVKKTEVQTGGFSKESILPKRNSDKLIARKKDWDPKKYGGFDSPTVAYSVLVVAKVEKGKSKKLKSVKELLGITIMERSSFEKNPIDFLEAKGYKEVKKDLIIKLPKYSLFELENGRKRMLASAGELQKGNELALPSKYVNFLYLASHYEKLKGSPEDNEQKQLFVEQHKHYLDEIIEQISEFSKRVILADANLDKVLSAYNKHRDKPIREQAENIIHLFTLTNLGAPAAFKYFDTTIDRKRYTSTKEVLDATLIHQSITGLYETRIDLSQLGGDGGGGSEAAAKPAPGGAVLGLEHLPRPPQISQFPLNPERLQALQHLVRKALEAGHIEPYTGPGNNPVFPVKKANGTWRFIHDLRATNSLTIDLSSSSPGPPDLSSLPTTLAHLQTIDLRDAFFQIPLPKQFQPYFAFTVPQQCNYGPGTRYAWKVLPQGFKNSPTLFQMQLAHILQPIRQAFPQCTILQYMDDILLASPSHEDLLLLSEATMASLISHGLPVSENKTQQTPGTIKFLGQIISPNHLTYDAVPTVPIRSRWALPELQALLGEIQWVSKGTPTLRQPLHSLYCALQPHTDPRDQIYLNPSQVQSLVQLRQALSQNCRSRLVQTLPLLGAIMLTLTGTTTVVFQSKEQWPLVWLHAPLPHTSQCPWGQLLASAVLLLDKYTLQSYGLLCQTIHHNISTQTFNQFIQTSDHPSVPILLHHSHRFKNLGAQTGELWNTFLKTAAPLAPVKALMPVFTLSPVIINTAPCLFSDGSTSRAAYILWDKQILSQRSFPLPPPHKSAQRAELLGLLHGLSSARSWRCLNIFLDSKYLYHYLRTLALGTFQGRSSQAPFQALLPRLLSRKVVYLHHVRSHTNLPDPISRLNALTDALLITPVLQLAGKRTADGSEFEKRTADGSEFESPKKKAKVE

SEQ ID NO: 1485 - protein, 2011 aa, synthetic construct
MPAAKRVKLDGGDKKYSIGLDIGTNSVGWAVITDEYKVPSKKFKVLGNTDRHSIKKNLIGALLFDSGETAEATRLKRTARRRYTRRKNRICYLQEIFSNEMAKVDDSFFHRLEESFLVEEDKKHERHPIFGNIVDEVAYHEKYPTIYHLRKKLVDSTDKADLRLIYLALAHMIKFRGHFLIEGDLNPDNSDVDKLFIQLVQTYNQLFEENPINASGVDAKAILSARLSKSRRLENLIAQLPGEKKNGLFGNLIALSLGLTPNFKSNFDLAEDAKLQLSKDTYDDDLDNLLAQIGDQYADLFLAAKNLSDAILLSDILRVNTEITKAPLSASMIKRYDEHHQDLTLLKALVRQQLPEKYKEIFFDQSKNGYAGYIDGGASQEEFYKFIKPILEKMDGTEELLVKLNREDLLRKQRTFDNGSIPHQIHLGELHAILRRQEDFYPFLKDNREKIEKILTFRIPYYVGPLARGNSRFAWMTRKSEETITPWNFEEVVDKGASAQSFIERMTNFDKNLPNEKVLPKHSLLYEYFTVYNELTKVKYVTEGMRKPAFLSGEQKKAIVDLLFKTNRKVTVKQLKEDYFKKIECFDSVEISGVEDRFNASLGTYHDLLKIIKDKDFLDNEENEDILEDIVLTLTLFEDREMIEERLKTYAHLFDDKVMKQLKRRRYTGWGRLSRKLINGIRDKQSGKTILDFLKSDGFANRNFMQLIHDDSLTFKEDIQKAQVSGQGDSLHEHIANLAGSPAIKKGILQTVKVVDELVKVMGRHKPENIVIEMARENQTTQKGQKNSRERMKRIEEGIKELGSQILKEHPVENTQLQNEKLYLYYLQNGRDMYVDQELDINRLSDYDVDHIVPQSFLKDDSIDNKVLTRSDKARGKSDNVPSEEVVKKMKNYWRQLLNAKLITQRKFDNLTKAERGGLSELDKAGFIKRQLVETRQITKHVAQILDSRMNTKYDENDKLIREVKVITLKSKLVSDFRKDFQFYKVREINNYHHAHDAYLNAVVGTALIKKYPKLESEFVYGDYKVYDVRKMIAKSEQEIGKATAKYFFYSNIMNFFKTEITLANGEIRKRPLIETNGETGEIVWDKGRDFATVRKVLSMPQVNIVKKTEVQTGGFSKESILPKRNSDKLIARKKDWDPKKYGGFDSPTVAYSVLVVAKVEKGKSKKLKSVKELLGITIMERSSFEKNPIDFLEAKGYKEVKKDLIIKLPKYSLFELENGRKRMLASAGELQKGNELALPSKYVNFLYLASHYEKLKGSPEDNEQKQLFVEQHKHYLDEIIEQISEFSKRVILADANLDKVLSAYNKHRDKPIREQAENIIHLFTLTNLGAPAAFKYFDTTIDRKRYTSTKEVLDATLIHQSITGLYETRIDLSQLGGDGGGGGGGSGSSGGAVLGLEHLPRPPQISQFPLNPERLQALQHLVRKALEAGHIEPYTGPGNNPVFPVKKANGTWRFIHDLRATNSLTIDLSSSSPGPPDLSSPPTTLAHLQTIDLRDAFFQIPLPKQFQPYFAFTVPQQCNYGPGTRYAWKVLPQGFKNSPTLFQMQLAHILQPIRQAFPQCTILQYMDDILLASPSHEDLLLLSEATMASLISHGLPVSENKTQQTPGTIKFLGQIISPNHLTYDAVPTVPIRSRWALPELQALLGEIQWVSKGTPTLRQPLHSLYCALQPHTDPRDQIYLNPSQVQSLVQLRQALSQNCRSRLVQTLPLLGAIMLTLTGTTTVVFQSKEQWPLVWLHAPLPHTSQCPWGQLLASAVLLLDKYTLQSYGLLCQTIHHNISTQTFNQFIQTSDHPSVPILLHHSHRFKNLGAQTGELWNTFLKTAAPLAPVKALMPVFTLSPVIINTAPCLFSDGSTSRAAYILWDKQILSQRSFPLPPPHKSAQRAELLGLLHGLSSARSWRCLNIFLDSKYLYHYLRTLALGTFQGRSSQAPFQALLPRLLSRKVVYLHHVRSHTNLPDPISRLNALTDALLITPVLQLAGKRTADGSEFEKRTADGSEFESPKKKAKVE

SEQ ID NO: 1486 - protein, 2013 aa, synthetic construct
MPAAKRVKLDGGDKKYSIGLDIGTNSVGWAVITDEYKVPSKKFKVLGNTDRHSIKKNLIGALLFDSGETAEATRLKRTARRRYTRRKNRICYLQEIFSNEMAKVDDSFFHRLEESFLVEEDKKHERHPIFGNIVDEVAYHEKYPTIYHLRKKLVDSTDKADLRLIYLALAHMIKFRGHFLIEGDLNPDNSDVDKLFIQLVQTYNQLFEENPINASGVDAKAILSARLSKSRRLENLIAQLPGEKKNGLFGNLIALSLGLTPNFKSNFDLAEDAKLQLSKDTYDDDLDNLLAQIGDQYADLFLAAKNLSDAILLSDILRVNTEITKAPLSASMIKRYDEHHQDLTLLKALVRQQLPEKYKEIFFDQSKNGYAGYIDGGASQEEFYKFIKPILEKMDGTEELLVKLNREDLLRKQRTFDNGSIPHQIHLGELHAILRRQEDFYPFLKDNREKIEKILTFRIPYYVGPLARGNSRFAWMTRKSEETITPWNFEEVVDKGASAQSFIERMTNFDKNLPNEKVLPKHSLLYEYFTVYNELTKVKYVTEGMRKPAFLSGEQKKAIVDLLFKTNRKVTVKQLKEDYFKKIECFDSVEISGVEDRFNASLGTYHDLLKIIKDKDFLDNEENEDILEDIVLTLTLFEDREMIEERLKTYAHLFDDKVMKQLKRRRYTGWGRLSRKLINGIRDKQSGKTILDFLKSDGFANRNFMQLIHDDSLTFKEDIQKAQVSGQGDSLHEHIANLAGSPAIKKGILQTVKVVDELVKVMGRHKPENIVIEMARENQTTQKGQKNSRERMKRIEEGIKELGSQILKEHPVENTQLQNEKLYLYYLQNGRDMYVDQELDINRLSDYDVDHIVPQSFLKDDSIDNKVLTRSDKARGKSDNVPSEEVVKKMKNYWRQLLNAKLITQRKFDNLTKAERGGLSELDKAGFIKRQLVETRQITKHVAQILDSRMNTKYDENDKLIREVKVITLKSKLVSDFRKDFQFYKVREINNYHHAHDAYLNAVVGTALIKKYPKLESEFVYGDYKVYDVRKMIAKSEQEIGKATAKYFFYSNIMNFFKTEITLANGEIRKRPLIETNGETGEIVWDKGRDFATVRKVLSMPQVNIVKKTEVQTGGFSKESILPKRNSDKLIARKKDWDPKKYGGFDSPTVAYSVLVVAKVEKGKSKKLKSVKELLGITIMERSSFEKNPIDFLEAKGYKEVKKDLIIKLPKYSLFELENGRKRMLASAGELQKGNELALPSKYVNFLYLASHYEKLKGSPEDNEQKQLFVEQHKHYLDEIIEQISEFSKRVILADANLDKVLSAYNKHRDKPIREQAENIIHLFTLTNLGAPAAFKYFDTTIDRKRYTSTKEVLDATLIHQSITGLYETRIDLSQLGGDGGEAAAKGSSGGSGGAVLGLEHLPRPPQISQFPLNPERLQALQHLVRKALEAGHIEPYTGPGNNPVFPVKKANGTWRFIHDLRATNSLTIDLSSSSPGPPDLSSPPTTLAHLQTIDLRDAFFQIPLPKQFQPYFAFTVPQQCNYGPGTRYAWKVLPQGFKNSPTLFQMQLAHILQPIRQAFPQCTILQYMDDILLASPSHEDLLLLSEATMASLISHGLPVSENKTQQTPGTIKFLGQIISPNHLTYDAVPTVPIRSRWALPELQALLGEIQWVSKGTPTLRQPLHSLYCALQPHTDPRDQIYLNPSQVQSLVQLRQALSQNCRSRLVQTLPLLGAIMLTLTGTTTVVFQSKEQWPLVWLHAPLPHTSQCPWGQLLASAVLLLDKYTLQSYGLLCQTIHHNISTQTFNQFIQTSDHPSVPILLHHSHRFKNLGAQTGELWNTFLKTAAPLAPVKALMPVFTLSPVIINTAPCLFSDGSTSRAAYILWDKQILSQRSFPLPPPHKSAQRAELLGLLHGLSSARSWRCLNIFLDSKYLYHYLRTLALGTFQGRSSQAPFQALLPRLLSRKVVYLHHVRSHTNLPDPISRLNALTDALLITPVLQLAGKRTADGSEFEKRTADGSEFESPKKKAKVE

SEQ ID NO: 1487 - protein, 2013 aa, synthetic construct
MPAAKRVKLDGGDKKYSIGLDIGTNSVGWAVITDEYKVPSKKFKVLGNTDRHSIKKNLIGALLFDSGETAEATRLKRTARRRYTRRKNRICYLQEIFSNEMAKVDDSFFHRLEESFLVEEDKKHERHPIFGNIVDEVAYHEKYPTIYHLRKKLVDSTDKADLRLIYLALAHMIKFRGHFLIEGDLNPDNSDVDKLFIQLVQTYNQLFEENPINASGVDAKAILSARLSKSRRLENLIAQLPGEKKNGLFGNLIALSLGLTPNFKSNFDLAEDAKLQLSKDTYDDDLDNLLAQIGDQYADLFLAAKNLSDAILLSDILRVNTEITKAPLSASMIKRYDEHHQDLTLLKALVRQQLPEKYKEIFFDQSKNGYAGYIDGGASQEEFYKFIKPILEKMDGTEELLVKLNREDLLRKQRTFDNGSIPHQIHLGELHAILRRQEDFYPFLKDNREKIEKILTFRIPYYVGPLARGNSRFAWMTRKSEETITPWNFEEVVDKGASAQSFIERMTNFDKNLPNEKVLPKHSLLYEYFTVYNELTKVKYVTEGMRKPAFLSGEQKKAIVDLLFKTNRKVTVKQLKEDYFKKIECFDSVEISGVEDRFNASLGTYHDLLKIIKDKDFLDNEENEDILEDIVLTLTLFEDREMIEERLKTYAHLFDDKVMKQLKRRRYTGWGRLSRKLINGIRDKQSGKTILDFLKSDGFANRNFMQLIHDDSLTFKEDIQKAQVSGQGDSLHEHIANLAGSPAIKKGILQTVKVVDELVKVMGRHKPENIVIEMARENQTTQKGQKNSRERMKRIEEGIKELGSQILKEHPVENTQLQNEKLYLYYLQNGRDMYVDQELDINRLSDYDVDHIVPQSFLKDDSIDNKVLTRSDKARGKSDNVPSEEVVKKMKNYWRQLLNAKLITQRKFDNLTKAERGGLSELDKAGFIKRQLVETRQITKHVAQILDSRMNTKYDENDKLIREVKVITLKSKLVSDFRKDFQFYKVREINNYHHAHDAYLNAVVGTALIKKYPKLESEFVYGDYKVYDVRKMIAKSEQEIGKATAKYFFYSNIMNFFKTEITLANGEIRKRPLIETNGETGEIVWDKGRDFATVRKVLSMPQVNIVKKTEVQTGGFSKESILPKRNSDKLIARKKDWDPKKYGGFDSPTVAYSVLVVAKVEKGKSKKLKSVKELLGITIMERSSFEKNPIDFLEAKGYKEVKKDLIIKLPKYSLFELENGRKRMLASAGELQKGNELALPSKYVNFLYLASHYEKLKGSPEDNEQKQLFVEQHKHYLDEIIEQISEFSKRVILADANLDKVLSAYNKHRDKPIREQAENIIHLFTLTNLGAPAAFKYFDTTIDRKRYTSTKEVLDATLIHQSITGLYETRIDLSQLGGDGGPAPEAAAKGGGGGAVLGLEHLPRPPQISQFPLNPERLQALQHLVRKALEAGHIEPYTGPGNNPVFPVKKANGTWRFIHDLRATNSLTIDLSSSSPGPPDLSSPPTTLAHLQTIDLRDAFFQIPLPKQFQPYFAFTVPQQCNYGPGTRYAWKVLPQGFKNSPTLFQMQLAHILQPIRQAFPQCTILQYMDDILLASPSHEDLLLLSEATMASLISHGLPVSENKTQQTPGTIKFLGQIISPNHLTYDAVPTVPIRSRWALPELQALLGEIQWVSKGTPTLRQPLHSLYCALQPHTDPRDQIYLNPSQVQSLVQLRQALSQNCRSRLVQTLPLLGAIMLTLTGTTTVVFQSKEQWPLVWLHAPLPHTSQCPWGQLLASAVLLLDKYTLQSYGLLCQTIHHNISTQTFNQFIQTSDHPSVPILLHHSHRFKNLGAQTGELWNTFLKTAAPLAPVKALMPVFTLSPVIINTAPCLFSDGSTSRAAYILWDKQILSQRSFPLPPPHKSAQRAELLGLLHGLSSARSWRCLNIFLDSKYLYHYLRTLALGTFQGRSSQAPFQALLPRLLSRKVVYLHHVRSHTNLPDPISRLNALTDALLITPVLQLAGKRTADGSEFEKRTADGSEFESPKKKAKVE

SEQ ID NO: 1488 - protein, 2017 aa, synthetic construct
MPAAKRVKLDGGDKKYSIGLDIGTNSVGWAVITDEYKVPSKKFKVLGNTDRHSIKKNLIGALLFDSGETAEATRLKRTARRRYTRRKNRICYLQEIFSNEMAKVDDSFFHRLEESFLVEEDKKHERHPIFGNIVDEVAYHEKYPTIYHLRKKLVDSTDKADLRLIYLALAHMIKFRGHFLIEGDLNPDNSDVDKLFIQLVQTYNQLFEENPINASGVDAKAILSARLSKSRRLENLIAQLPGEKKNGLFGNLIALSLGLTPNFKSNFDLAEDAKLQLSKDTYDDDLDNLLAQIGDQYADLFLAAKNLSDAILLSDILRVNTEITKAPLSASMIKRYDEHHQDLTLLKALVRQQLPEKYKEIFFDQSKNGYAGYIDGGASQEEFYKFIKPILEKMDGTEELLVKLNREDLLRKQRTFDNGSIPHQIHLGELHAILRRQEDFYPFLKDNREKIEKILTFRIPYYVGPLARGNSRFAWMTRKSEETITPWNFEEVVDKGASAQSFIERMTNFDKNLPNEKVLPKHSLLYEYFTVYNELTKVKYVTEGMRKPAFLSGEQKKAIVDLLFKTNRKVTVKQLKEDYFKKIECFDSVEISGVEDRFNASLGTYHDLLKIIKDKDFLDNEENEDILEDIVLTLTLFEDREMIEERLKTYAHLFDDKVMKQLKRRRYTGWGRLSRKLINGIRDKQSGKTILDFLKSDGFANRNFMQLIHDDSLTFKEDIQKAQVSGQGDSLHEHIANLAGSPAIKKGILQTVKVVDELVKVMGRHKPENIVIEMARENQTTQKGQKNSRERMKRIEEGIKELGSQILKEHPVENTQLQNEKLYLYYLQNGRDMYVDQELDINRLSDYDVDHIVPQSFLKDDSIDNKVLTRSDKARGKSDNVPSEEVVKKMKNYWRQLLNAKLITQRKFDNLTKAERGGLSELDKAGFIKRQLVETRQITKHVAQILDSRMNTKYDENDKLIREVKVITLKSKLVSDFRKDFQFYKVREINNYHHAHDAYLNAVVGTALIKKYPKLESEFVYGDYKVYDVRKMIAKSEQEIGKATAKYFFYSNIMNFFKTEITLANGEIRKRPLIETNGETGEIVWDKGRDFATVRKVLSMPQVNIVKKTEVQTGGFSKESILPKRNSDKLIARKKDWDPKKYGGFDSPTVAYSVLVVAKVEKGKSKKLKSVKELLGITIMERSSFEKNPIDFLEAKGYKEVKKDLIIKLPKYSLFELENGRKRMLASAGELQKGNELALPSKYVNFLYLASHYEKLKGSPEDNEQKQLFVEQHKHYLDEIIEQISEFSKRVILADANLDKVLSAYNKHRDKPIREQAENIIHLFTLTNLGAPAAFKYFDTTIDRKRYTSTKEVLDATLIHQSITGLYETRIDLSQLGGDGGGGGGSEAAAKGGGGSGGAVLGLEHLPRPPEISQFPLNPERLQALQHLVRKALEAGHIEPYTGPGNNPVFPVKKANGTWRFIHDLRATNSLTIDLSSSSPGPPDLSSLPTTLAHLQTIDLKDAFFQIPLPKQFQPYFAFTVPQQCNYGPGTRYAWRVLPQGFKNSPTLFEMQLAHILQPIRQAFPQCTILQYMDDILLASPSHADLQLLSEATMASLISHGLPVSENKTQQTPGTIKFLGQIISPNHLTYDAVPKVPIRSRWALPELQALLGEIQWVSKGTPTLRQPLHSLYCALQRHTDPRDQIYLNPSQVQSLVQLRQALSQNCRSRLVQTLPLLGAIMLTLTGTTTVVFQSKQQWPLVWLHAPLPHTSQCPWGQLLASAVLLLDKYTLQSYGLLCQTIHHNISTQTFNQFIQTSDHPSVPILLHHSHRFKNLGAQTGELWNTFLKTTAPLAPVKALMPVFTLSPVIINTAPCLFSDGSTSQAAYILWDKHILSQRSFPLPPPHKSAQRAELLGLLHGLSSARSWRCLNIFLDSKYLYHYLRTLALGTFQGRSSQAPFQALLPRLLSRKVVYLHHVRSHTNLPDPISRLNALTDALLITPVLQLAGKRTADGSEFEKRTADGSEFESPKKKAKVE

SEQ ID NO: 1489 - protein, 2017 aa, synthetic construct
MPAAKRVKLDGGDKKYSIGLDIGTNSVGWAVITDEYKVPSKKFKVLGNTDRHSIKKNLIGALLFDSGETAEATRLKRTARRRYTRRKNRICYLQEIFSNEMAKVDDSFFHRLEESFLVEEDKKHERHPIFGNIVDEVAYHEKYPTIYHLRKKLVDSTDKADLRLIYLALAHMIKFRGHFLIEGDLNPDNSDVDKLFIQLVQTYNQLFEENPINASGVDAKAILSARLSKSRRLENLIAQLPGEKKNGLFGNLIALSLGLTPNFKSNFDLAEDAKLQLSKDTYDDDLDNLLAQIGDQYADLFLAAKNLSDAILLSDILRVNTEITKAPLSASMIKRYDEHHQDLTLLKALVRQQLPEKYKEIFFDQSKNGYAGYIDGGASQEEFYKFIKPILEKMDGTEELLVKLNREDLLRKQRTFDNGSIPHQIHLGELHAILRRQEDFYPFLKDNREKIEKILTFRIPYYVGPLARGNSRFAWMTRKSEETITPWNFEEVVDKGASAQSFIERMTNFDKNLPNEKVLPKHSLLYEYFTVYNELTKVKYVTEGMRKPAFLSGEQKKAIVDLLFKTNRKVTVKQLKEDYFKKIECFDSVEISGVEDRFNASLGTYHDLLKIIKDKDFLDNEENEDILEDIVLTLTLFEDREMIEERLKTYAHLFDDKVMKQLKRRRYTGWGRLSRKLINGIRDKQSGKTILDFLKSDGFANRNFMQLIHDDSLTFKEDIQKAQVSGQGDSLHEHIANLAGSPAIKKGILQTVKVVDELVKVMGRHKPENIVIEMARENQTTQKGQKNSRERMKRIEEGIKELGSQILKEHPVENTQLQNEKLYLYYLQNGRDMYVDQELDINRLSDYDVDHIVPQSFLKDDSIDNKVLTRSDKARGKSDNVPSEEVVKKMKNYWRQLLNAKLITQRKFDNLTKAERGGLSELDKAGFIKRQLVETRQITKHVAQILDSRMNTKYDENDKLIREVKVITLKSKLVSDFRKDFQFYKVREINNYHHAHDAYLNAVVGTALIKKYPKLESEFVYGDYKVYDVRKMIAKSEQEIGKATAKYFFYSNIMNFFKTEITLANGEIRKRPLIETNGETGEIVWDKGRDFATVRKVLSMPQVNIVKKTEVQTGGFSKESILPKRNSDKLIARKKDWDPKKYGGFDSPTVAYSVLVVAKVEKGKSKKLKSVKELLGITIMERSSFEKNPIDFLEAKGYKEVKKDLIIKLPKYSLFELENGRKRMLASAGELQKGNELALPSKYVNFLYLASHYEKLKGSPEDNEQKQLFVEQHKHYLDEIIEQISEFSKRVILADANLDKVLSAYNKHRDKPIREQAENIIHLFTLTNLGAPAAFKYFDTTIDRKRYTSTKEVLDATLIHQSITGLYETRIDLSQLGGDGGEAAAKEAAAKEAAAKGGAVLGLEHLPRPPEISQFPLNPERLQALQHLVRKALEAGHIEPYTGPGNNPVFPVKKANGTWRFIHDLRATNSLTIDLSSSSPGPPDLSSLPTTLAHLQTIDLKDAFFQIPLPKQFQPYFAFTVPQQCNYGPGTRYAWRVLPQGFKNSPTLFEMQLAHILQPIRQAFPQCTILQYMDDILLASPSHADLQLLSEATMASLISHGLPVSENKTQQTPGTIKFLGQIISPNHLTYDAVPKVPIRSRWALPELQALLGEIQWVSKGTPTLRQPLHSLYCALQRHTDPRDQIYLNPSQVQSLVQLRQALSQNCRSRLVQTLPLLGAIMLTLTGTTTVVFQSKQQWPLVWLHAPLPHTSQCPWGQLLASAVLLLDKYTLQSYGLLCQTIHHNISTQTFNQFIQTSDHPSVPILLHHSHRFKNLGAQTGELWNTFLKTTAPLAPVKALMPVFTLSPVIINTAPCLFSDGSTSQAAYILWDKHILSQRSFPLPPPHKSAQRAELLGLLHGLSSARSWRCLNIFLDSKYLYHYLRTLALGTFQGRSSQAPFQALLPRLLSRKVVYLHHVRSHTNLPDPISRLNALTDALLITPVLQLAGKRTADGSEFEKRTADGSEFESPKKKAKVE

SEQ ID NO: 1490 - protein, 2010 aa, synthetic construct
MPAAKRVKLDGGDKKYSIGLDIGTNSVGWAVITDEYKVPSKKFKVLGNTDRHSIKKNLIGALLFDSGETAEATRLKRTARRRYTRRKNRICYLQEIFSNEMAKVDDSFFHRLEESFLVEEDKKHERHPIFGNIVDEVAYHEKYPTIYHLRKKLVDSTDKADLRLIYLALAHMIKFRGHFLIEGDLNPDNSDVDKLFIQLVQTYNQLFEENPINASGVDAKAILSARLSKSRRLENLIAQLPGEKKNGLFGNLIALSLGLTPNFKSNFDLAEDAKLQLSKDTYDDDLDNLLAQIGDQYADLFLAAKNLSDAILLSDILRVNTEITKAPLSASMIKRYDEHHQDLTLLKALVRQQLPEKYKEIFFDQSKNGYAGYIDGGASQEEFYKFIKPILEKMDGTEELLVKLNREDLLRKQRTFDNGSIPHQIHLGELHAILRRQEDFYPFLKDNREKIEKILTFRIPYYVGPLARGNSRFAWMTRKSEETITPWNFEEVVDKGASAQSFIERMTNFDKNLPNEKVLPKHSLLYEYFTVYNELTKVKYVTEGMRKPAFLSGEQKKAIVDLLFKTNRKVTVKQLKEDYFKKIECFDSVEISGVEDRFNASLGTYHDLLKIIKDKDFLDNEENEDILEDIVLTLTLFEDREMIEERLKTYAHLFDDKVMKQLKRRRYTGWGRLSRKLINGIRDKQSGKTILDFLKSDGFANRNFMQLIHDDSLTFKEDIQKAQVSGQGDSLHEHIANLAGSPAIKKGILQTVKVVDELVKVMGRHKPENIVIEMARENQTTQKGQKNSRERMKRIEEGIKELGSQILKEHPVENTQLQNEKLYLYYLQNGRDMYVDQELDINRLSDYDVDHIVPQSFLKDDSIDNKVLTRSDKARGKSDNVPSEEVVKKMKNYWRQLLNAKLITQRKFDNLTKAERGGLSELDKAGFIKRQLVETRQITKHVAQILDSRMNTKYDENDKLIREVKVITLKSKLVSDFRKDFQFYKVREINNYHHAHDAYLNAVVGTALIKKYPKLESEFVYGDYKVYDVRKMIAKSEQEIGKATAKYFFYSNIMNFFKTEITLANGEIRKRPLIETNGETGEIVWDKGRDFATVRKVLSMPQVNIVKKTEVQTGGFSKESILPKRNSDKLIARKKDWDPKKYGGFDSPTVAYSVLVVAKVEKGKSKKLKSVKELLGITIMERSSFEKNPIDFLEAKGYKEVKKDLIIKLPKYSLFELENGRKRMLASAGELQKGNELALPSKYVNFLYLASHYEKLKGSPEDNEQKQLFVEQHKHYLDEIIEQISEFSKRVILADANLDKVLSAYNKHRDKPIREQAENIIHLFTLTNLGAPAAFKYFDTTIDRKRYTSTKEVLDATLIHQSITGLYETRIDLSQLGGDGGGGGEAAAKGGAVLGLEHLPRPPEISQFPLNPERLQALQHLVRKALEAGHIEPYTGPGNNPVFPVKKANGTWRFIHDLRATNSLTIDLSSSSPGPPDLSSLPTTLAHLQTIDLKDAFFQIPLPKQFQPYFAFTVPQQCNYGPGTRYAWRVLPQGFKNSPTLFEMQLAHILQPIRQAFPQCTILQYMDDILLASPSHADLQLLSEATMASLISHGLPVSENKTQQTPGTIKFLGQIISPNHLTYDAVPKVPIRSRWALPELQALLGEIQWVSKGTPTLRQPLHSLYCALQRHTDPRDQIYLNPSQVQSLVQLRQALSQNCRSRLVQTLPLLGAIMLTLTGTTTVVFQSKQQWPLVWLHAPLPHTSQCPWGQLLASAVLLLDKYTLQSYGLLCQTIHHNISTQTFNQFIQTSDHPSVPILLHHSHRFKNLGAQTGELWNTFLKTTAPLAPVKALMPVFTLSPVIINTAPCLFSDGSTSQAAYILWDKHILSQRSFPLPPPHKSAQRAELLGLLHGLSSARSWRCLNIFLDSKYLYHYLRTLALGTFQGRSSQAPFQALLPRLLSRKVVYLHHVRSHTNLPDPISRLNALTDALLITPVLQLAGKRTADGSEFEKRTADGSEFESPKKKAKVE

SEQ ID NO: 1491 - protein, 2027 aa, synthetic construct
MPAAKRVKLDGGDKKYSIGLDIGTNSVGWAVITDEYKVPSKKFKVLGNTDRHSIKKNLIGALLFDSGETAEATRLKRTARRRYTRRKNRICYLQEIFSNEMAKVDDSFFHRLEESFLVEEDKKHERHPIFGNIVDEVAYHEKYPTIYHLRKKLVDSTDKADLRLIYLALAHMIKFRGHFLIEGDLNPDNSDVDKLFIQLVQTYNQLFEENPINASGVDAKAILSARLSKSRRLENLIAQLPGEKKNGLFGNLIALSLGLTPNFKSNFDLAEDAKLQLSKDTYDDDLDNLLAQIGDQYADLFLAAKNLSDAILLSDILRVNTEITKAPLSASMIKRYDEHHQDLTLLKALVRQQLPEKYKEIFFDQSKNGYAGYIDGGASQEEFYKFIKPILEKMDGTEELLVKLNREDLLRKQRTFDNGSIPHQIHLGELHAILRRQEDFYPFLKDNREKIEKILTFRIPYYVGPLARGNSRFAWMTRKSEETITPWNFEEVVDKGASAQSFIERMTNFDKNLPNEKVLPKHSLLYEYFTVYNELTKVKYVTEGMRKPAFLSGEQKKAIVDLLFKTNRKVTVKQLKEDYFKKIECFDSVEISGVEDRFNASLGTYHDLLKIIKDKDFLDNEENEDILEDIVLTLTLFEDREMIEERLKTYAHLFDDKVMKQLKRRRYTGWGRLSRKLINGIRDKQSGKTILDFLKSDGFANRNFMQLIHDDSLTFKEDIQKAQVSGQGDSLHEHIANLAGSPAIKKGILQTVKVVDELVKVMGRHKPENIVIEMARENQTTQKGQKNSRERMKRIEEGIKELGSQILKEHPVENTQLQNEKLYLYYLQNGRDMYVDQELDINRLSDYDVDHIVPQSFLKDDSIDNKVLTRSDKARGKSDNVPSEEVVKKMKNYWRQLLNAKLITQRKFDNLTKAERGGLSELDKAGFIKRQLVETRQITKHVAQILDSRMNTKYDENDKLIREVKVITLKSKLVSDFRKDFQFYKVREINNYHHAHDAYLNAVVGTALIKKYPKLESEFVYGDYKVYDVRKMIAKSEQEIGKATAKYFFYSNIMNFFKTEITLANGEIRKRPLIETNGETGEIVWDKGRDFATVRKVLSMPQVNIVKKTEVQTGGFSKESILPKRNSDKLIARKKDWDPKKYGGFDSPTVAYSVLVVAKVEKGKSKKLKSVKELLGITIMERSSFEKNPIDFLEAKGYKEVKKDLIIKLPKYSLFELENGRKRMLASAGELQKGNELALPSKYVNFLYLASHYEKLKGSPEDNEQKQLFVEQHKHYLDEIIEQISEFSKRVILADANLDKVLSAYNKHRDKPIREQAENIIHLFTLTNLGAPAAFKYFDTTIDRKRYTSTKEVLDATLIHQSITGLYETRIDLSQLGGDGGGGGGSGGGGSGGGGSGGGGSGGGGSGGAVLGLEHLPRPPEISQFPLNPERLQALQHLVRKALEAGHIEPYTGPGNNPVFPVKKANGTWRFIHDLRATNSLTIDLSSSSPGPPDLSSLPTTLAHLQTIDLKDAFFQIPLPKQFQPYFAFTVPQQCNYGPGTRYAWRVLPQGFKNSPTLFEMQLAHILQPIRQAFPQCTILQYMDDILLASPSHADLQLLSEATMASLISHGLPVSENKTQQTPGTIKFLGQIISPNHLTYDAVPKVPIRSRWALPELQALLGEIQWVSKGTPTLRQPLHSLYCALQRHTDPRDQIYLNPSQVQSLVQLRQALSQNCRSRLVQTLPLLGAIMLTLTGTTTVVFQSKQQWPLVWLHAPLPHTSQCPWGQLLASAVLLLDKYTLQSYGLLCQTIHHNISTQTFNQFIQTSDHPSVPILLHHSHRFKNLGAQTGELWNTFLKTTAPLAPVKALMPVFTLSPVIINTAPCLFSDGSTSQAAYILWDKHILSQRSFPLPPPHKSAQRAELLGLLHGLSSARSWRCLNIFLDSKYLYHYLRTLALGTFQGRSSQAPFQALLPRLLSRKVVYLHHVRSHTNLPDPISRLNALTDALLITPVLQLAGKRTADGSEFEKRTADGSEFESPKKKAKVE

SEQ ID NO: 1492 - protein, 2011 aa, synthetic construct
MPAAKRVKLDGGDKKYSIGLDIGTNSVGWAVITDEYKVPSKKFKVLGNTDRHSIKKNLIGALLFDSGETAEATRLKRTARRRYTRRKNRICYLQEIFSNEMAKVDDSFFHRLEESFLVEEDKKHERHPIFGNIVDEVAYHEKYPTIYHLRKKLVDSTDKADLRLIYLALAHMIKFRGHFLIEGDLNPDNSDVDKLFIQLVQTYNQLFEENPINASGVDAKAILSARLSKSRRLENLIAQLPGEKKNGLFGNLIALSLGLTPNFKSNFDLAEDAKLQLSKDTYDDDLDNLLAQIGDQYADLFLAAKNLSDAILLSDILRVNTEITKAPLSASMIKRYDEHHQDLTLLKALVRQQLPEKYKEIFFDQSKNGYAGYIDGGASQEEFYKFIKPILEKMDGTEELLVKLNREDLLRKQRTFDNGSIPHQIHLGELHAILRRQEDFYPFLKDNREKIEKILTFRIPYYVGPLARGNSRFAWMTRKSEETITPWNFEEVVDKGASAQSFIERMTNFDKNLPNEKVLPKHSLLYEYFTVYNELTKVKYVTEGMRKPAFLSGEQKKAIVDLLFKTNRKVTVKQLKEDYFKKIECFDSVEISGVEDRFNASLGTYHDLLKIIKDKDFLDNEENEDILEDIVLTLTLFEDREMIEERLKTYAHLFDDKVMKQLKRRRYTGWGRLSRKLINGIRDKQSGKTILDFLKSDGFANRNFMQLIHDDSLTFKEDIQKAQVSGQGDSLHEHIANLAGSPAIKKGILQTVKVVDELVKVMGRHKPENIVIEMARENQTTQKGQKNSRERMKRIEEGIKELGSQILKEHPVENTQLQNEKLYLYYLQNGRDMYVDQELDINRLSDYDVDHIVPQSFLKDDSIDNKVLTRSDKARGKSDNVPSEEVVKKMKNYWRQLLNAKLITQRKFDNLTKAERGGLSELDKAGFIKRQLVETRQITKHVAQILDSRMNTKYDENDKLIREVKVITLKSKLVSDFRKDFQFYKVREINNYHHAHDAYLNAVVGTALIKKYPKLESEFVYGDYKVYDVRKMIAKSEQEIGKATAKYFFYSNIMNFFKTEITLANGEIRKRPLIETNGETGEIVWDKGRDFATVRKVLSMPQVNIVKKTEVQTGGFSKESILPKRNSDKLIARKKDWDPKKYGGFDSPTVAYSVLVVAKVEKGKSKKLKSVKELLGITIMERSSFEKNPIDFLEAKGYKEVKKDLIIKLPKYSLFELENGRKRMLASAGELQKGNELALPSKYVNFLYLASHYEKLKGSPEDNEQKQLFVEQHKHYLDEIIEQISEFSKRVILADANLDKVLSAYNKHRDKPIREQAENIIHLFTLTNLGAPAAFKYFDTTIDRKRYTSTKEVLDATLIHQSITGLYETRIDLSQLGGDGGGGGGGSPAPGGAVLGLEHLPRPPEISQFPLNPERLQALQHLVRKALEAGHIEPYTGPGNNPVFPVKKANGTWRFIHDLRATNSLTIDLSSSSPGPPDLSSLPTTLAHLQTIDLKDAFFQIPLPKQFQPYFAFTVPQQCNYGPGTRYAWRVLPQGFKNSPTLFQMQLAHILQPIRQAFPQCTILQYMDDILLASPSHADLQLLSEATMASLISHGLPVSENKTQQTPGTIKFLGQIISPNHLTYDAVPKVPIRSRWALPELQALLGEIQWVSKGTPTLRQPLHSLYCALQPHTDPRDQIYLNPSQVQSLVQLRQALSQNCRSRLVQTLPLLGAIMLTLTGTTTVVFQSKQQWPLVWLHAPLPHTSQCPWGQLLASAVLLLDKYTLQSYGLLCQTIHHNISTQTFNQFIQTSDHPSVPILLHHSHRFKNLGAQTGELWNTFLKTTAPLAPVKALMPVFTLSPVIINTAPCLFSDGSTSQAAYILWDKHILSQRSFPLPPPHKSAQRAELLGLLHGLSSARSWRCLNIFLDSKYLYHYLRTLALGTFQGRSSQAPFQALLPRLLSRKVVYLHHVRSHTNLPDPISRLNALTDALLITPVLQLAGKRTADGSEFEKRTADGSEFESPKKKAKVE

SEQ ID NO: 1493 - protein, 2008 aa, synthetic construct
MPAAKRVKLDGGDKKYSIGLDIGTNSVGWAVITDEYKVPSKKFKVLGNTDRHSIKKNLIGALLFDSGETAEATRLKRTARRRYTRRKNRICYLQEIFSNEMAKVDDSFFHRLEESFLVEEDKKHERHPIFGNIVDEVAYHEKYPTIYHLRKKLVDSTDKADLRLIYLALAHMIKFRGHFLIEGDLNPDNSDVDKLFIQLVQTYNQLFEENPINASGVDAKAILSARLSKSRRLENLIAQLPGEKKNGLFGNLIALSLGLTPNFKSNFDLAEDAKLQLSKDTYDDDLDNLLAQIGDQYADLFLAAKNLSDAILLSDILRVNTEITKAPLSASMIKRYDEHHQDLTLLKALVRQQLPEKYKEIFFDQSKNGYAGYIDGGASQEEFYKFIKPILEKMDGTEELLVKLNREDLLRKQRTFDNGSIPHQIHLGELHAILRRQEDFYPFLKDNREKIEKILTFRIPYYVGPLARGNSRFAWMTRKSEETITPWNFEEVVDKGASAQSFIERMTNFDKNLPNEKVLPKHSLLYEYFTVYNELTKVKYVTEGMRKPAFLSGEQKKAIVDLLFKTNRKVTVKQLKEDYFKKIECFDSVEISGVEDRFNASLGTYHDLLKIIKDKDFLDNEENEDILEDIVLTLTLFEDREMIEERLKTYAHLFDDKVMKQLKRRRYTGWGRLSRKLINGIRDKQSGKTILDFLKSDGFANRNFMQLIHDDSLTFKEDIQKAQVSGQGDSLHEHIANLAGSPAIKKGILQTVKVVDELVKVMGRHKPENIVIEMARENQTTQKGQKNSRERMKRIEEGIKELGSQILKEHPVENTQLQNEKLYLYYLQNGRDMYVDQELDINRLSDYDVDHIVPQSFLKDDSIDNKVLTRSDKARGKSDNVPSEEVVKKMKNYWRQLLNAKLITQRKFDNLTKAERGGLSELDKAGFIKRQLVETRQITKHVAQILDSRMNTKYDENDKLIREVKVITLKSKLVSDFRKDFQFYKVREINNYHHAHDAYLNAVVGTALIKKYPKLESEFVYGDYKVYDVRKMIAKSEQEIGKATAKYFFYSNIMNFFKTEITLANGEIRKRPLIETNGETGEIVWDKGRDFATVRKVLSMPQVNIVKKTEVQTGGFSKESILPKRNSDKLIARKKDWDPKKYGGFDSPTVAYSVLVVAKVEKGKSKKLKSVKELLGITIMERSSFEKNPIDFLEAKGYKEVKKDLIIKLPKYSLFELENGRKRMLASAGELQKGNELALPSKYVNFLYLASHYEKLKGSPEDNEQKQLFVEQHKHYLDEIIEQISEFSKRVILADANLDKVLSAYNKHRDKPIREQAENIIHLFTLTNLGAPAAFKYFDTTIDRKRYTSTKEVLDATLIHQSITGLYETRIDLSQLGGDGGPAPGGSGGAVLGLEHLPRPPEISQFPLNPERLQALQHLVRKALEAGHIEPYTGPGNNPVFPVKKANGTWRFIHDLRATNSLTIDLSSSSPGPPDLSSLPTTLAHLQTIDLKDAFFQIPLPKQFQPYFAFTVPQQCNYGPGTRYAWRVLPQGFKNSPTLFQMQLAHILQPIRQAFPQCTILQYMDDILLASPSHADLQLLSEATMASLISHGLPVSENKTQQTPGTIKFLGQIISPNHLTYDAVPKVPIRSRWALPELQALLGEIQWVSKGTPTLRQPLHSLYCALQPHTDPRDQIYLNPSQVQSLVQLRQALSQNCRSRLVQTLPLLGAIMLTLTGTTTVVFQSKQQWPLVWLHAPLPHTSQCPWGQLLASAVLLLDKYTLQSYGLLCQTIHHNISTQTFNQFIQTSDHPSVPILLHHSHRFKNLGAQTGELWNTFLKTTAPLAPVKALMPVFTLSPVIINTAPCLFSDGSTSQAAYILWDKHILSQRSFPLPPPHKSAQRAELLGLLHGLSSARSWRCLNIFLDSKYLYHYLRTLALGTFQGRSSQAPFQALLPRLLSRKVVYLHHVRSHTNLPDPISRLNALTDALLITPVLQLAGKRTADGSEFEKRTADGSEFESPKKKAKVE

SEQ ID NO: 1494 - protein, 2011 aa, synthetic construct
MPAAKRVKLDGGDKKYSIGLDIGTNSVGWAVITDEYKVPSKKFKVLGNTDRHSIKKNLIGALLFDSGETAEATRLKRTARRRYTRRKNRICYLQEIFSNEMAKVDDSFFHRLEESFLVEEDKKHERHPIFGNIVDEVAYHEKYPTIYHLRKKLVDSTDKADLRLIYLALAHMIKFRGHFLIEGDLNPDNSDVDKLFIQLVQTYNQLFEENPINASGVDAKAILSARLSKSRRLENLIAQLPGEKKNGLFGNLIALSLGLTPNFKSNFDLAEDAKLQLSKDTYDDDLDNLLAQIGDQYADLFLAAKNLSDAILLSDILRVNTEITKAPLSASMIKRYDEHHQDLTLLKALVRQQLPEKYKEIFFDQSKNGYAGYIDGGASQEEFYKFIKPILEKMDGTEELLVKLNREDLLRKQRTFDNGSIPHQIHLGELHAILRRQEDFYPFLKDNREKIEKILTFRIPYYVGPLARGNSRFAWMTRKSEETITPWNFEEVVDKGASAQSFIERMTNFDKNLPNEKVLPKHSLLYEYFTVYNELTKVKYVTEGMRKPAFLSGEQKKAIVDLLFKTNRKVTVKQLKEDYFKKIECFDSVEISGVEDRFNASLGTYHDLLKIIKDKDFLDNEENEDILEDIVLTLTLFEDREMIEERLKTYAHLFDDKVMKQLKRRRYTGWGRLSRKLINGIRDKQSGKTILDFLKSDGFANRNFMQLIHDDSLTFKEDIQKAQVSGQGDSLHEHIANLAGSPAIKKGILQTVKVVDELVKVMGRHKPENIVIEMARENQTTQKGQKNSRERMKRIEEGIKELGSQILKEHPVENTQLQNEKLYLYYLQNGRDMYVDQELDINRLSDYDVDHIVPQSFLKDDSIDNKVLTRSDKARGKSDNVPSEEVVKKMKNYWRQLLNAKLITQRKFDNLTKAERGGLSELDKAGFIKRQLVETRQITKHVAQILDSRMNTKYDENDKLIREVKVITLKSKLVSDFRKDFQFYKVREINNYHHAHDAYLNAVVGTALIKKYPKLESEFVYGDYKVYDVRKMIAKSEQEIGKATAKYFFYSNIMNFFKTEITLANGEIRKRPLIETNGETGEIVWDKGRDFATVRKVLSMPQVNIVKKTEVQTGGFSKESILPKRNSDKLIARKKDWDPKKYGGFDSPTVAYSVLVVAKVEKGKSKKLKSVKELLGITIMERSSFEKNPIDFLEAKGYKEVKKDLIIKLPKYSLFELENGRKRMLASAGELQKGNELALPSKYVNFLYLASHYEKLKGSPEDNEQKQLFVEQHKHYLDEIIEQISEFSKRVILADANLDKVLSAYNKHRDKPIREQAENIIHLFTLTNLGAPAAFKYFDTTIDRKRYTSTKEVLDATLIHQSITGLYETRIDLSQLGGDGGGGGPAPGGSGGAVLGLEHLPRPPEISQFPLNPERLQALQHLVRKALEAGHIEPYTGPGNNPVFPVKKANGTWRFIHDLRATNSLTIDLSSSSPGPPDLSSLPTTLAHLQTIDLKDAFFQIPLPKQFQPYFAFTVPQQCNYGPGTRYAWRVLPQGFKNSPTLFQMQLAHILQPIRQAFPQCTILQYMDDILLASPSHADLQLLSEATMASLISHGLPVSENKTQQTPGTIKFLGQIISPNHLTYDAVPKVPIRSRWALPELQALLGEIQWVSKGTPTLRQPLHSLYCALQPHTDPRDQIYLNPSQVQSLVQLRQALSQNCRSRLVQTLPLLGAIMLTLTGTTTVVFQSKQQWPLVWLHAPLPHTSQCPWGQLLASAVLLLDKYTLQSYGLLCQTIHHNISTQTFNQFIQTSDHPSVPILLHHSHRFKNLGAQTGELWNTFLKTTAPLAPVKALMPVFTLSPVIINTAPCLFSDGSTSQAAYILWDKHILSQRSFPLPPPHKSAQRAELLGLLHGLSSARSWRCLNIFLDSKYLYHYLRTLALGTFQGRSSQAPFQALLPRLLSRKVVYLHHVRSHTNLPDPISRLNALTDALLITPVLQLAGKRTADGSEFEKRTADGSEFESPKKKAKVE

SEQ ID NO: 1495 - protein, 2017 aa, synthetic construct
MPAAKRVKLDGGDKKYSIGLDIGTNSVGWAVITDEYKVPSKKFKVLGNTDRHSIKKNLIGALLFDSGETAEATRLKRTARRRYTRRKNRICYLQEIFSNEMAKVDDSFFHRLEESFLVEEDKKHERHPIFGNIVDEVAYHEKYPTIYHLRKKLVDSTDKADLRLIYLALAHMIKFRGHFLIEGDLNPDNSDVDKLFIQLVQTYNQLFEENPINASGVDAKAILSARLSKSRRLENLIAQLPGEKKNGLFGNLIALSLGLTPNFKSNFDLAEDAKLQLSKDTYDDDLDNLLAQIGDQYADLFLAAKNLSDAILLSDILRVNTEITKAPLSASMIKRYDEHHQDLTLLKALVRQQLPEKYKEIFFDQSKNGYAGYIDGGASQEEFYKFIKPILEKMDGTEELLVKLNREDLLRKQRTFDNGSIPHQIHLGELHAILRRQEDFYPFLKDNREKIEKILTFRIPYYVGPLARGNSRFAWMTRKSEETITPWNFEEVVDKGASAQSFIERMTNFDKNLPNEKVLPKHSLLYEYFTVYNELTKVKYVTEGMRKPAFLSGEQKKAIVDLLFKTNRKVTVKQLKEDYFKKIECFDSVEISGVEDRFNASLGTYHDLLKIIKDKDFLDNEENEDILEDIVLTLTLFEDREMIEERLKTYAHLFDDKVMKQLKRRRYTGWGRLSRKLINGIRDKQSGKTILDFLKSDGFANRNFMQLIHDDSLTFKEDIQKAQVSGQGDSLHEHIANLAGSPAIKKGILQTVKVVDELVKVMGRHKPENIVIEMARENQTTQKGQKNSRERMKRIEEGIKELGSQILKEHPVENTQLQNEKLYLYYLQNGRDMYVDQELDINRLSDYDVDHIVPQSFLKDDSIDNKVLTRSDKARGKSDNVPSEEVVKKMKNYWRQLLNAKLITQRKFDNLTKAERGGLSELDKAGFIKRQLVETRQITKHVAQILDSRMNTKYDENDKLIREVKVITLKSKLVSDFRKDFQFYKVREINNYHHAHDAYLNAVVGTALIKKYPKLESEFVYGDYKVYDVRKMIAKSEQEIGKATAKYFFYSNIMNFFKTEITLANGEIRKRPLIETNGETGEIVWDKGRDFATVRKVLSMPQVNIVKKTEVQTGGFSKESILPKRNSDKLIARKKDWDPKKYGGFDSPTVAYSVLVVAKVEKGKSKKLKSVKELLGITIMERSSFEKNPIDFLEAKGYKEVKKDLIIKLPKYSLFELENGRKRMLASAGELQKGNELALPSKYVNFLYLASHYEKLKGSPEDNEQKQLFVEQHKHYLDEIIEQISEFSKRVILADANLDKVLSAYNKHRDKPIREQAENIIHLFTLTNLGAPAAFKYFDTTIDRKRYTSTKEVLDATLIHQSITGLYETRIDLSQLGGDGGGSSGSSGSSGSSGSSGGAVLGLEHLPRPPEISQFPLNPERLQALQHLVRKALEAGHIEPYTGPGNNPVFPVKKANGTWRFIHDLRATNSLTIDLSSSSPGPPDLSSLPTTLAHLQTIDLKDAFFQIPLPKQFQPYFAFTVPQQCNYGPGTRYAWRVLPQGFKNSPTLFQMQLAHILQPIRQAFPQCTILQYMDDILLASPSHADLQLLSEATMASLISHGLPVSENKTQQTPGTIKFLGQIISPNHLTYDAVPKVPIRSRWALPELQALLGEIQWVSKGTPTLRQPLHSLYCALQPHTDPRDQIYLNPSQVQSLVQLRQALSQNCRSRLVQTLPLLGAIMLTLTGTTTVVFQSKQQWPLVWLHAPLPHTSQCPWGQLLASAVLLLDKYTLQSYGLLCQTIHHNISTQTFNQFIQTSDHPSVPILLHHSHRFKNLGAQTGELWNTFLKTTAPLAPVKALMPVFTLSPVIINTAPCLFSDGSTSQAAYILWDKHILSQRSFPLPPPHKSAQRAELLGLLHGLSSARSWRCLNIFLDSKYLYHYLRTLALGTFQGRSSQAPFQALLPRLLSRKVVYLHHVRSHTNLPDPISRLNALTDALLITPVLQLAGKRTADGSEFEKRTADGSEFESPKKKAKVE

SEQ ID NO: 1496 - protein, 2002 aa, synthetic construct
MPAAKRVKLDGGDKKYSIGLDIGTNSVGWAVITDEYKVPSKKFKVLGNTDRHSIKKNLIGALLFDSGETAEATRLKRTARRRYTRRKNRICYLQEIFSNEMAKVDDSFFHRLEESFLVEEDKKHERHPIFGNIVDEVAYHEKYPTIYHLRKKLVDSTDKADLRLIYLALAHMIKFRGHFLIEGDLNPDNSDVDKLFIQLVQTYNQLFEENPINASGVDAKAILSARLSKSRRLENLIAQLPGEKKNGLFGNLIALSLGLTPNFKSNFDLAEDAKLQLSKDTYDDDLDNLLAQIGDQYADLFLAAKNLSDAILLSDILRVNTEITKAPLSASMIKRYDEHHQDLTLLKALVRQQLPEKYKEIFFDQSKNGYAGYIDGGASQEEFYKFIKPILEKMDGTEELLVKLNREDLLRKQRTFDNGSIPHQIHLGELHAILRRQEDFYPFLKDNREKIEKILTFRIPYYVGPLARGNSRFAWMTRKSEETITPWNFEEVVDKGASAQSFIERMTNFDKNLPNEKVLPKHSLLYEYFTVYNELTKVKYVTEGMRKPAFLSGEQKKAIVDLLFKTNRKVTVKQLKEDYFKKIECFDSVEISGVEDRFNASLGTYHDLLKIIKDKDFLDNEENEDILEDIVLTLTLFEDREMIEERLKTYAHLFDDKVMKQLKRRRYTGWGRLSRKLINGIRDKQSGKTILDFLKSDGFANRNFMQLIHDDSLTFKEDIQKAQVSGQGDSLHEHIANLAGSPAIKKGILQTVKVVDELVKVMGRHKPENIVIEMARENQTTQKGQKNSRERMKRIEEGIKELGSQILKEHPVENTQLQNEKLYLYYLQNGRDMYVDQELDINRLSDYDVDHIVPQSFLKDDSIDNKVLTRSDKARGKSDNVPSEEVVKKMKNYWRQLLNAKLITQRKFDNLTKAERGGLSELDKAGFIKRQLVETRQITKHVAQILDSRMNTKYDENDKLIREVKVITLKSKLVSDFRKDFQFYKVREINNYHHAHDAYLNAVVGTALIKKYPKLESEFVYGDYKVYDVRKMIAKSEQEIGKATAKYFFYSNIMNFFKTEITLANGEIRKRPLIETNGETGEIVWDKGRDFATVRKVLSMPQVNIVKKTEVQTGGFSKESILPKRNSDKLIARKKDWDPKKYGGFDSPTVAYSVLVVAKVEKGKSKKLKSVKELLGITIMERSSFEKNPIDFLEAKGYKEVKKDLIIKLPKYSLFELENGRKRMLASAGELQKGNELALPSKYVNFLYLASHYEKLKGSPEDNEQKQLFVEQHKHYLDEIIEQISEFSKRVILADANLDKVLSAYNKHRDKPIREQAENIIHLFTLTNLGAPAAFKYFDTTIDRKRYTSTKEVLDATLIHQSITGLYETRIDLSQLGGDGGEAAAKGGGLEHLPRPPEISQFPLNPERLQALQHLVRKALEAGHIEPYTGPGNNPVFPVKKANGTWRFIHDLRATNSLTVDLSSSSPGPPDLSSLPTTLAHLQTIDLKDAFFQIPLPKQFQPYFAFTVPQQCNYGPGTRYAWKVLPQGFKNSPTLFEMQLASILQPIRQAFPQCVILQYMDDILLASPSPEDLQQLSEATMASLISHGLPVSQDKTQQTPGTIKFLGQIISPNHITYDAVPTVPIRSRWALPELQALLGEIQWVSKGTPTLRQPLHSLYCALQGHTDPRDQIYLNPSQVQSLMQLQQALSQNCRSRLAQTLPLLGAIMLTLTGTTTVVFQSKQQWPLVWLHAPLPHTSQCPWGQLLASAVLLLDKYTLQSYGLLCQTIHHNISIQTFNQFIQTSDHPSVPILLHHSHRFKNLGAQTGELWNTFLKTAAPLAPVKALTPVFTLSPIIINTAPCLFSDGSTSQAAYILWDKHILSQRSFPLPPPHKSAQQAELLGLLHGLSSARSWHCLNIFLDSKYLYHYLRTLALGTFQGKSSQAPFQALLPRLLAHKVIYLHHVRSHTNLPDPISKLNALTDALLITPILAGKRTADGSEFEKRTADGSEFESPKKKAKVE

SEQ ID NO: 1497 - protein, 2015 aa, synthetic construct
MPAAKRVKLDGGDKKYSIGLDIGTNSVGWAVITDEYKVPSKKFKVLGNTDRHSIKKNLIGALLFDSGETAEATRLKRTARRRYTRRKNRICYLQEIFSNEMAKVDDSFFHRLEESFLVEEDKKHERHPIFGNIVDEVAYHEKYPTIYHLRKKLVDSTDKADLRLIYLALAHMIKFRGHFLIEGDLNPDNSDVDKLFIQLVQTYNQLFEENPINASGVDAKAILSARLSKSRRLENLIAQLPGEKKNGLFGNLIALSLGLTPNFKSNFDLAEDAKLQLSKDTYDDDLDNLLAQIGDQYADLFLAAKNLSDAILLSDILRVNTEITKAPLSASMIKRYDEHHQDLTLLKALVRQQLPEKYKEIFFDQSKNGYAGYIDGGASQEEFYKFIKPILEKMDGTEELLVKLNREDLLRKQRTFDNGSIPHQIHLGELHAILRRQEDFYPFLKDNREKIEKILTFRIPYYVGPLARGNSRFAWMTRKSEETITPWNFEEVVDKGASAQSFIERMTNFDKNLPNEKVLPKHSLLYEYFTVYNELTKVKYVTEGMRKPAFLSGEQKKAIVDLLFKTNRKVTVKQLKEDYFKKIECFDSVEISGVEDRFNASLGTYHDLLKIIKDKDFLDNEENEDILEDIVLTLTLFEDREMIEERLKTYAHLFDDKVMKQLKRRRYTGWGRLSRKLINGIRDKQSGKTILDFLKSDGFANRNFMQLIHDDSLTFKEDIQKAQVSGQGDSLHEHIANLAGSPAIKKGILQTVKVVDELVKVMGRHKPENIVIEMARENQTTQKGQKNSRERMKRIEEGIKELGSQILKEHPVENTQLQNEKLYLYYLQNGRDMYVDQELDINRLSDYDVDHIVPQSFLKDDSIDNKVLTRSDKARGKSDNVPSEEVVKKMKNYWRQLLNAKLITQRKFDNLTKAERGGLSELDKAGFIKRQLVETRQITKHVAQILDSRMNTKYDENDKLIREVKVITLKSKLVSDFRKDFQFYKVREINNYHHAHDAYLNAVVGTALIKKYPKLESEFVYGDYKVYDVRKMIAKSEQEIGKATAKYFFYSNIMNFFKTEITLANGEIRKRPLIETNGETGEIVWDKGRDFATVRKVLSMPQVNIVKKTEVQTGGFSKESILPKRNSDKLIARKKDWDPKKYGGFDSPTVAYSVLVVAKVEKGKSKKLKSVKELLGITIMERSSFEKNPIDFLEAKGYKEVKKDLIIKLPKYSLFELENGRKRMLASAGELQKGNELALPSKYVNFLYLASHYEKLKGSPEDNEQKQLFVEQHKHYLDEIIEQISEFSKRVILADANLDKVLSAYNKHRDKPIREQAENIIHLFTLTNLGAPAAFKYFDTTIDRKRYTSTKEVLDATLIHQSITGLYETRIDLSQLGGDGGGSSGSSGSSGSSGSSGSSGGGLEHLPRPPEISQFPLNPERLQALQHLVRKALEAGHIEPYTGPGNNPVFPVKKANGTWRFIHDLRATNSLTVDLSSSSPGPPDLSSLPTTLAHLQTIDLKDAFFQIPLPKQFQPYFAFTVPQQCNYGPGTRYAWKVLPQGFKNSPTLFEMQLASILQPIRQAFPQCVILQYMDDILLASPSPEDLQQLSEATMASLISHGLPVSQDKTQQTPGTIKFLGQIISPNHITYDAVPTVPIRSRWALPELQALLGEIQWVSKGTPTLRQPLHSLYCALQGHTDPRDQIYLNPSQVQSLMQLQQALSQNCRSRLAQTLPLLGAIMLTLTGTTTVVFQSKQQWPLVWLHAPLPHTSQCPWGQLLASAVLLLDKYTLQSYGLLCQTIHHNISIQTFNQFIQTSDHPSVPILLHHSHRFKNLGAQTGELWNTFLKTAAPLAPVKALTPVFTLSPIIINTAPCLFSDGSTSQAAYILWDKHILSQRSFPLPPPHKSAQQAELLGLLHGLSSARSWHCLNIFLDSKYLYHYLRTLALGTFQGKSSQAPFQALLPRLLAHKVIYLHHVRSHTNLPDPISKLNALTDALLITPILAGKRTADGSEFEKRTADGSEFESPKKKAKVE

SEQ ID NO: 1498 - protein, 2008 aa, synthetic construct
MPAAKRVKLDGGDKKYSIGLDIGTNSVGWAVITDEYKVPSKKFKVLGNTDRHSIKKNLIGALLFDSGETAEATRLKRTARRRYTRRKNRICYLQEIFSNEMAKVDDSFFHRLEESFLVEEDKKHERHPIFGNIVDEVAYHEKYPTIYHLRKKLVDSTDKADLRLIYLALAHMIKFRGHFLIEGDLNPDNSDVDKLFIQLVQTYNQLFEENPINASGVDAKAILSARLSKSRRLENLIAQLPGEKKNGLFGNLIALSLGLTPNFKSNFDLAEDAKLQLSKDTYDDDLDNLLAQIGDQYADLFLAAKNLSDAILLSDILRVNTEITKAPLSASMIKRYDEHHQDLTLLKALVRQQLPEKYKEIFFDQSKNGYAGYIDGGASQEEFYKFIKPILEKMDGTEELLVKLNREDLLRKQRTFDNGSIPHQIHLGELHAILRRQEDFYPFLKDNREKIEKILTFRIPYYVGPLARGNSRFAWMTRKSEETITPWNFEEVVDKGASAQSFIERMTNFDKNLPNEKVLPKHSLLYEYFTVYNELTKVKYVTEGMRKPAFLSGEQKKAIVDLLFKTNRKVTVKQLKEDYFKKIECFDSVEISGVEDRFNASLGTYHDLLKIIKDKDFLDNEENEDILEDIVLTLTLFEDREMIEERLKTYAHLFDDKVMKQLKRRRYTGWGRLSRKLINGIRDKQSGKTILDFLKSDGFANRNFMQLIHDDSLTFKEDIQKAQVSGQGDSLHEHIANLAGSPAIKKGILQTVKVVDELVKVMGRHKPENIVIEMARENQTTQKGQKNSRERMKRIEEGIKELGSQILKEHPVENTQLQNEKLYLYYLQNGRDMYVDQELDINRLSDYDVDHIVPQSFLKDDSIDNKVLTRSDKARGKSDNVPSEEVVKKMKNYWRQLLNAKLITQRKFDNLTKAERGGLSELDKAGFIKRQLVETRQITKHVAQILDSRMNTKYDENDKLIREVKVITLKSKLVSDFRKDFQFYKVREINNYHHAHDAYLNAVVGTALIKKYPKLESEFVYGDYKVYDVRKMIAKSEQEIGKATAKYFFYSNIMNFFKTEITLANGEIRKRPLIETNGETGEIVWDKGRDFATVRKVLSMPQVNIVKKTEVQTGGFSKESILPKRNSDKLIARKKDWDPKKYGGFDSPTVAYSVLVVAKVEKGKSKKLKSVKELLGITIMERSSFEKNPIDFLEAKGYKEVKKDLIIKLPKYSLFELENGRKRMLASAGELQKGNELALPSKYVNFLYLASHYEKLKGSPEDNEQKQLFVEQHKHYLDEIIEQISEFSKRVILADANLDKVLSAYNKHRDKPIREQAENIIHLFTLTNLGAPAAFKYFDTTIDRKRYTSTKEVLDATLIHQSITGLYETRIDLSQLGGDGGEAAAKGGGGGSGGGLEHLPRPPEISQFPLNPERLQALQHLVRKALEAGHIEPYTGPGNNPVFPVKKANGTWRFIHDLRATNSLTVDLSSSSPGPPDLSSLPTTLAHLQTIDLKDAFFQIPLPKQFQPYFAFTVPQQCNYGPGTRYAWKVLPQGFKNSPTLFEMQLASILQPIRQAFPQCVILQYMDDILLASPSPEDLQQLSEATMASLISHGLPVSQDKTQQTPGTIKFLGQIISPNHITYDAVPTVPIRSRWALPELQALLGEIQWVSKGTPTLRQPLHSLYCALQGHTDPRDQIYLNPSQVQSLMQLQQALSQNCRSRLAQTLPLLGAIMLTLTGTTTVVFQSKQQWPLVWLHAPLPHTSQCPWGQLLASAVLLLDKYTLQSYGLLCQTIHHNISIQTFNQFIQTSDHPSVPILLHHSHRFKNLGAQTGELWNTFLKTAAPLAPVKALTPVFTLSPIIINTAPCLFSDGSTSQAAYILWDKHILSQRSFPLPPPHKSAQQAELLGLLHGLSSARSWHCLNIFLDSKYLYHYLRTLALGTFQGKSSQAPFQALLPRLLAHKVIYLHHVRSHTNLPDPISKLNALTDALLITPILAGKRTADGSEFEKRTADGSEFESPKKKAKVE

SEQ ID NO: 1499 - protein, 2008 aa, synthetic construct
MPAAKRVKLDGGDKKYSIGLDIGTNSVGWAVITDEYKVPSKKFKVLGNTDRHSIKKNLIGALLFDSGETAEATRLKRTARRRYTRRKNRICYLQEIFSNEMAKVDDSFFHRLEESFLVEEDKKHERHPIFGNIVDEVAYHEKYPTIYHLRKKLVDSTDKADLRLIYLALAHMIKFRGHFLIEGDLNPDNSDVDKLFIQLVQTYNQLFEENPINASGVDAKAILSARLSKSRRLENLIAQLPGEKKNGLFGNLIALSLGLTPNFKSNFDLAEDAKLQLSKDTYDDDLDNLLAQIGDQYADLFLAAKNLSDAILLSDILRVNTEITKAPLSASMIKRYDEHHQDLTLLKALVRQQLPEKYKEIFFDQSKNGYAGYIDGGASQEEFYKFIKPILEKMDGTEELLVKLNREDLLRKQRTFDNGSIPHQIHLGELHAILRRQEDFYPFLKDNREKIEKILTFRIPYYVGPLARGNSRFAWMTRKSEETITPWNFEEVVDKGASAQSFIERMTNFDKNLPNEKVLPKHSLLYEYFTVYNELTKVKYVTEGMRKPAFLSGEQKKAIVDLLFKTNRKVTVKQLKEDYFKKIECFDSVEISGVEDRFNASLGTYHDLLKIIKDKDFLDNEENEDILEDIVLTLTLFEDREMIEERLKTYAHLFDDKVMKQLKRRRYTGWGRLSRKLINGIRDKQSGKTILDFLKSDGFANRNFMQLIHDDSLTFKEDIQKAQVSGQGDSLHEHIANLAGSPAIKKGILQTVKVVDELVKVMGRHKPENIVIEMARENQTTQKGQKNSRERMKRIEEGIKELGSQILKEHPVENTQLQNEKLYLYYLQNGRDMYVDQELDINRLSDYDVDHIVPQSFLKDDSIDNKVLTRSDKARGKSDNVPSEEVVKKMKNYWRQLLNAKLITQRKFDNLTKAERGGLSELDKAGFIKRQLVETRQITKHVAQILDSRMNTKYDENDKLIREVKVITLKSKLVSDFRKDFQFYKVREINNYHHAHDAYLNAVVGTALIKKYPKLESEFVYGDYKVYDVRKMIAKSEQEIGKATAKYFFYSNIMNFFKTEITLANGEIRKRPLIETNGETGEIVWDKGRDFATVRKVLSMPQVNIVKKTEVQTGGFSKESILPKRNSDKLIARKKDWDPKKYGGFDSPTVAYSVLVVAKVEKGKSKKLKSVKELLGITIMERSSFEKNPIDFLEAKGYKEVKKDLIIKLPKYSLFELENGRKRMLASAGELQKGNELALPSKYVNFLYLASHYEKLKGSPEDNEQKQLFVEQHKHYLDEIIEQISEFSKRVILADANLDKVLSAYNKHRDKPIREQAENIIHLFTLTNLGAPAAFKYFDTTIDRKRYTSTKEVLDATLIHQSITGLYETRIDLSQLGGDGGEAAAKGGSGGGGGGLEHLPRPPEISQFPLNPERLQALQHLVRKALEAGHIEPYTGPGNNPVFPVKKANGTWRFIHDLRATNSLTVDLSSSSPGPPDLSSLPTTLAHLQTIDLKDAFFQIPLPKQFQPYFAFTVPQQCNYGPGTRYAWKVLPQGFKNSPTLFEMQLASILQPIRQAFPQCVILQYMDDILLASPSPEDLQQLSEATMASLISHGLPVSQDKTQQTPGTIKFLGQIISPNHITYDAVPTVPIRSRWALPELQALLGEIQWVSKGTPTLRQPLHSLYCALQGHTDPRDQIYLNPSQVQSLMQLQQALSQNCRSRLAQTLPLLGAIMLTLTGTTTVVFQSKQQWPLVWLHAPLPHTSQCPWGQLLASAVLLLDKYTLQSYGLLCQTIHHNISIQTFNQFIQTSDHPSVPILLHHSHRFKNLGAQTGELWNTFLKTAAPLAPVKALTPVFTLSPIIINTAPCLFSDGSTSQAAYILWDKHILSQRSFPLPPPHKSAQQAELLGLLHGLSSARSWHCLNIFLDSKYLYHYLRTLALGTFQGKSSQAPFQALLPRLLAHKVIYLHHVRSHTNLPDPISKLNALTDALLITPILAGKRTADGSEFEKRTADGSEFESPKKKAKVE

SEQ ID NO: 1500 - protein, 2008 aa, synthetic construct
MPAAKRVKLDGGDKKYSIGLDIGTNSVGWAVITDEYKVPSKKFKVLGNTDRHSIKKNLIGALLFDSGETAEATRLKRTARRRYTRRKNRICYLQEIFSNEMAKVDDSFFHRLEESFLVEEDKKHERHPIFGNIVDEVAYHEKYPTIYHLRKKLVDSTDKADLRLIYLALAHMIKFRGHFLIEGDLNPDNSDVDKLFIQLVQTYNQLFEENPINASGVDAKAILSARLSKSRRLENLIAQLPGEKKNGLFGNLIALSLGLTPNFKSNFDLAEDAKLQLSKDTYDDDLDNLLAQIGDQYADLFLAAKNLSDAILLSDILRVNTEITKAPLSASMIKRYDEHHQDLTLLKALVRQQLPEKYKEIFFDQSKNGYAGYIDGGASQEEFYKFIKPILEKMDGTEELLVKLNREDLLRKQRTFDNGSIPHQIHLGELHAILRRQEDFYPFLKDNREKIEKILTFRIPYYVGPLARGNSRFAWMTRKSEETITPWNFEEVVDKGASAQSFIERMTNFDKNLPNEKVLPKHSLLYEYFTVYNELTKVKYVTEGMRKPAFLSGEQKKAIVDLLFKTNRKVTVKQLKEDYFKKIECFDSVEISGVEDRFNASLGTYHDLLKIIKDKDFLDNEENEDILEDIVLTLTLFEDREMIEERLKTYAHLFDDKVMKQLKRRRYTGWGRLSRKLINGIRDKQSGKTILDFLKSDGFANRNFMQLIHDDSLTFKEDIQKAQVSGQGDSLHEHIANLAGSPAIKKGILQTVKVVDELVKVMGRHKPENIVIEMARENQTTQKGQKNSRERMKRIEEGIKELGSQILKEHPVENTQLQNEKLYLYYLQNGRDMYVDQELDINRLSDYDVDHIVPQSFLKDDSIDNKVLTRSDKARGKSDNVPSEEVVKKMKNYWRQLLNAKLITQRKFDNLTKAERGGLSELDKAGFIKRQLVETRQITKHVAQILDSRMNTKYDENDKLIREVKVITLKSKLVSDFRKDFQFYKVREINNYHHAHDAYLNAVVGTALIKKYPKLESEFVYGDYKVYDVRKMIAKSEQEIGKATAKYFFYSNIMNFFKTEITLANGEIRKRPLIETNGETGEIVWDKGRDFATVRKVLSMPQVNIVKKTEVQTGGFSKESILPKRNSDKLIARKKDWDPKKYGGFDSPTVAYSVLVVAKVEKGKSKKLKSVKELLGITIMERSSFEKNPIDFLEAKGYKEVKKDLIIKLPKYSLFELENGRKRMLASAGELQKGNELALPSKYVNFLYLASHYEKLKGSPEDNEQKQLFVEQHKHYLDEIIEQISEFSKRVILADANLDKVLSAYNKHRDKPIREQAENIIHLFTLTNLGAPAAFKYFDTTIDRKRYTSTKEVLDATLIHQSITGLYETRIDLSQLGGDGGPAPAPAPAPAPGGGLEHLPRPPEISQFPLNPERLQALQHLVRKALEAGHIEPYTGPGNNPVFPVKKANGTWRFIHDLRATNSLTVDLSSSSPGPPDLSSLPTTLAHLQTIDLKDAFFQIPLPKQFQPYFAFTVPQQCNYGPGTRYAWKVLPQGFKNSPTLFQMQLASILQPIRQAFPQCVILQYMDDILLASPSPEDLQQLSEATMASLISHGLPVSQDKTQQTPGTIKFLGQIISPNHITYDAVPTVPIRSRWALPELQALLGEIQWVSKGTPTLRQPLHSLYCALQGHTDPRDQIYLNPSQVQSLMQLQQALSQNCRSRLAQTLPLLGAIMLTLTGTTTVVFQSKQQWPLVWLHAPLPHTSQCPWGQLLASAVLLLDKYTLQSYGLLCQTIHHNISIQTFNQFIQTSDHPSVPILLHHSHRFKNLGAQTGELWNTFLKTAAPLAPVKALTPVFTLSPIIINTAPCLFSDGSTSQAAYILWDKHILSQRSFPLPPPHKSAQQAELLGLLHGLSSARSWHCLNIFLDSKYLYHYLRTLAWGTFQGKSSQAPFQALLPRLLAHKVIYLHHVRSHTNLPDPISKLNALTDALLITPILAGKRTADGSEFEKRTADGSEFESPKKKAKVE

SEQ ID NO: 1501 - protein, 2006 aa, synthetic construct
MPAAKRVKLDGGDKKYSIGLDIGTNSVGWAVITDEYKVPSKKFKVLGNTDRHSIKKNLIGALLFDSGETAEATRLKRTARRRYTRRKNRICYLQEIFSNEMAKVDDSFFHRLEESFLVEEDKKHERHPIFGNIVDEVAYHEKYPTIYHLRKKLVDSTDKADLRLIYLALAHMIKFRGHFLIEGDLNPDNSDVDKLFIQLVQTYNQLFEENPINASGVDAKAILSARLSKSRRLENLIAQLPGEKKNGLFGNLIALSLGLTPNFKSNFDLAEDAKLQLSKDTYDDDLDNLLAQIGDQYADLFLAAKNLSDAILLSDILRVNTEITKAPLSASMIKRYDEHHQDLTLLKALVRQQLPEKYKEIFFDQSKNGYAGYIDGGASQEEFYKFIKPILEKMDGTEELLVKLNREDLLRKQRTFDNGSIPHQIHLGELHAILRRQEDFYPFLKDNREKIEKILTFRIPYYVGPLARGNSRFAWMTRKSEETITPWNFEEVVDKGASAQSFIERMTNFDKNLPNEKVLPKHSLLYEYFTVYNELTKVKYVTEGMRKPAFLSGEQKKAIVDLLFKTNRKVTVKQLKEDYFKKIECFDSVEISGVEDRFNASLGTYHDLLKIIKDKDFLDNEENEDILEDIVLTLTLFEDREMIEERLKTYAHLFDDKVMKQLKRRRYTGWGRLSRKLINGIRDKQSGKTILDFLKSDGFANRNFMQLIHDDSLTFKEDIQKAQVSGQGDSLHEHIANLAGSPAIKKGILQTVKVVDELVKVMGRHKPENIVIEMARENQTTQKGQKNSRERMKRIEEGIKELGSQILKEHPVENTQLQNEKLYLYYLQNGRDMYVDQELDINRLSDYDVDHIVPQSFLKDDSIDNKVLTRSDKARGKSDNVPSEEVVKKMKNYWRQLLNAKLITQRKFDNLTKAERGGLSELDKAGFIKRQLVETRQITKHVAQILDSRMNTKYDENDKLIREVKVITLKSKLVSDFRKDFQFYKVREINNYHHAHDAYLNAVVGTALIKKYPKLESEFVYGDYKVYDVRKMIAKSEQEIGKATAKYFFYSNIMNFFKTEITLANGEIRKRPLIETNGETGEIVWDKGRDFATVRKVLSMPQVNIVKKTEVQTGGFSKESILPKRNSDKLIARKKDWDPKKYGGFDSPTVAYSVLVVAKVEKGKSKKLKSVKELLGITIMERSSFEKNPIDFLEAKGYKEVKKDLIIKLPKYSLFELENGRKRMLASAGELQKGNELALPSKYVNFLYLASHYEKLKGSPEDNEQKQLFVEQHKHYLDEIIEQISEFSKRVILADANLDKVLSAYNKHRDKPIREQAENIIHLFTLTNLGAPAAFKYFDTTIDRKRYTSTKEVLDATLIHQSITGLYETRIDLSQLGGDGGGGGGGSPAPGGGLEHLPRPPEISQFPLNPERLQALQHLVRKALEAGHIEPYTGPGNNPVFPVKKANGTWRFIHDLRATNSLTVDLSSSSPGPPDLSSLPTTLAHLQTIDLKDAFFQIPLPKQFQPYFAFTVPQQCNYGPGTRYAWKVLPQGFKNSPTLFQMQLASILQPIRQAFPQCVILQYMDDILLASPSPEDLQQLSEATMASLISHGLPVSQDKTQQTPGTIKFLGQIISPNHITYDAVPTVPIRSRWALPELQALLGEIQWVSKGTPTLRQPLHSLYCALQGHTDPRDQIYLNPSQVQSLMQLQQALSQNCRSRLAQTLPLLGAIMLTLTGTTTVVFQSKQQWPLVWLHAPLPHTSQCPWGQLLASAVLLLDKYTLQSYGLLCQTIHHNISIQTFNQFIQTSDHPSVPILLHHSHRFKNLGAQTGELWNTFLKTAAPLAPVKALTPVFTLSPIIINTAPCLFSDGSTSQAAYILWDKHILSQRSFPLPPPHKSAQQAELLGLLHGLSSARSWHCLNIFLDSKYLYHYLRTLAWGTFQGKSSQAPFQALLPRLLAHKVIYLHHVRSHTNLPDPISKLNALTDALLITPILAGKRTADGSEFEKRTADGSEFESPKKKAKVE

SEQ ID NO: 1502 - protein, 2012 aa, synthetic construct
MPAAKRVKLDGGDKKYSIGLDIGTNSVGWAVITDEYKVPSKKFKVLGNTDRHSIKKNLIGALLFDSGETAEATRLKRTARRRYTRRKNRICYLQEIFSNEMAKVDDSFFHRLEESFLVEEDKKHERHPIFGNIVDEVAYHEKYPTIYHLRKKLVDSTDKADLRLIYLALAHMIKFRGHFLIEGDLNPDNSDVDKLFIQLVQTYNQLFEENPINASGVDAKAILSARLSKSRRLENLIAQLPGEKKNGLFGNLIALSLGLTPNFKSNFDLAEDAKLQLSKDTYDDDLDNLLAQIGDQYADLFLAAKNLSDAILLSDILRVNTEITKAPLSASMIKRYDEHHQDLTLLKALVRQQLPEKYKEIFFDQSKNGYAGYIDGGASQEEFYKFIKPILEKMDGTEELLVKLNREDLLRKQRTFDNGSIPHQIHLGELHAILRRQEDFYPFLKDNREKIEKILTFRIPYYVGPLARGNSRFAWMTRKSEETITPWNFEEVVDKGASAQSFIERMTNFDKNLPNEKVLPKHSLLYEYFTVYNELTKVKYVTEGMRKPAFLSGEQKKAIVDLLFKTNRKVTVKQLKEDYFKKIECFDSVEISGVEDRFNASLGTYHDLLKIIKDKDFLDNEENEDILEDIVLTLTLFEDREMIEERLKTYAHLFDDKVMKQLKRRRYTGWGRLSRKLINGIRDKQSGKTILDFLKSDGFANRNFMQLIHDDSLTFKEDIQKAQVSGQGDSLHEHIANLAGSPAIKKGILQTVKVVDELVKVMGRHKPENIVIEMARENQTTQKGQKNSRERMKRIEEGIKELGSQILKEHPVENTQLQNEKLYLYYLQNGRDMYVDQELDINRLSDYDVDHIVPQSFLKDDSIDNKVLTRSDKARGKSDNVPSEEVVKKMKNYWRQLLNAKLITQRKFDNLTKAERGGLSELDKAGFIKRQLVETRQITKHVAQILDSRMNTKYDENDKLIREVKVITLKSKLVSDFRKDFQFYKVREINNYHHAHDAYLNAVVGTALIKKYPKLESEFVYGDYKVYDVRKMIAKSEQEIGKATAKYFFYSNIMNFFKTEITLANGEIRKRPLIETNGETGEIVWDKGRDFATVRKVLSMPQVNIVKKTEVQTGGFSKESILPKRNSDKLIARKKDWDPKKYGGFDSPTVAYSVLVVAKVEKGKSKKLKSVKELLGITIMERSSFEKNPIDFLEAKGYKEVKKDLIIKLPKYSLFELENGRKRMLASAGELQKGNELALPSKYVNFLYLASHYEKLKGSPEDNEQKQLFVEQHKHYLDEIIEQISEFSKRVILADANLDKVLSAYNKHRDKPIREQAENIIHLFTLTNLGAPAAFKYFDTTIDRKRYTSTKEVLDATLIHQSITGLYETRIDLSQLGGDGGGGSGGSGGSGGSGGSGGGLEHLPRPPEISQFPLNPERLQALQHLVRKALEAGHIEPYTGPGNNPVFPVKKANGTWRFIHDLRATNSLTVDLSSSSPGPPDLSSLPTTLAHLQTIDLKDAFFQIPLPKQFQPYFAFTVPQQCNYGPGTRYAWKVLPQGFKNSPTLFQMQLASILQPIRQAFPQCVILQYMDDILLASPSPEDLQQLSEATMASLISHGLPVSQDKTQQTPGTIKFLGQIISPNHITYDAVPTVPIRSRWALPELQALLGEIQWVSKGTPTLRQPLHSLYCALQGHTDPRDQIYLNPSQVQSLMQLQQALSQNCRSRLAQTLPLLGAIMLTLTGTTTVVFQSKQQWPLVWLHAPLPHTSQCPWGQLLASAVLLLDKYTLQSYGLLCQTIHHNISIQTFNQFIQTSDHPSVPILLHHSHRFKNLGAQTGELWNTFLKTAAPLAPVKALTPVFTLSPIIINTAPCLFSDGSTSQAAYILWDKHILSQRSFPLPPPHKSAQQAELLGLLHGLSSARSWHCLNIFLDSKYLYHYLRTLAWGTFQGKSSQAPFQALLPRLLAHKVIYLHHVRSHTNLPDPISKLNALTDALLITPILAGKRTADGSEFEKRTADGSEFESPKKKAKVE

SEQ ID NO: 1503 - protein, 2015 aa, synthetic construct
MPAAKRVKLDGGDKKYSIGLDIGTNSVGWAVITDEYKVPSKKFKVLGNTDRHSIKKNLIGALLFDSGETAEATRLKRTARRRYTRRKNRICYLQEIFSNEMAKVDDSFFHRLEESFLVEEDKKHERHPIFGNIVDEVAYHEKYPTIYHLRKKLVDSTDKADLRLIYLALAHMIKFRGHFLIEGDLNPDNSDVDKLFIQLVQTYNQLFEENPINASGVDAKAILSARLSKSRRLENLIAQLPGEKKNGLFGNLIALSLGLTPNFKSNFDLAEDAKLQLSKDTYDDDLDNLLAQIGDQYADLFLAAKNLSDAILLSDILRVNTEITKAPLSASMIKRYDEHHQDLTLLKALVRQQLPEKYKEIFFDQSKNGYAGYIDGGASQEEFYKFIKPILEKMDGTEELLVKLNREDLLRKQRTFDNGSIPHQIHLGELHAILRRQEDFYPFLKDNREKIEKILTFRIPYYVGPLARGNSRFAWMTRKSEETITPWNFEEVVDKGASAQSFIERMTNFDKNLPNEKVLPKHSLLYEYFTVYNELTKVKYVTEGMRKPAFLSGEQKKAIVDLLFKTNRKVTVKQLKEDYFKKIECFDSVEISGVEDRFNASLGTYHDLLKIIKDKDFLDNEENEDILEDIVLTLTLFEDREMIEERLKTYAHLFDDKVMKQLKRRRYTGWGRLSRKLINGIRDKQSGKTILDFLKSDGFANRNFMQLIHDDSLTFKEDIQKAQVSGQGDSLHEHIANLAGSPAIKKGILQTVKVVDELVKVMGRHKPENIVIEMARENQTTQKGQKNSRERMKRIEEGIKELGSQILKEHPVENTQLQNEKLYLYYLQNGRDMYVDQELDINRLSDYDVDHIVPQSFLKDDSIDNKVLTRSDKARGKSDNVPSEEVVKKMKNYWRQLLNAKLITQRKFDNLTKAERGGLSELDKAGFIKRQLVETRQITKHVAQILDSRMNTKYDENDKLIREVKVITLKSKLVSDFRKDFQFYKVREINNYHHAHDAYLNAVVGTALIKKYPKLESEFVYGDYKVYDVRKMIAKSEQEIGKATAKYFFYSNIMNFFKTEITLANGEIRKRPLIETNGETGEIVWDKGRDFATVRKVLSMPQVNIVKKTEVQTGGFSKESILPKRNSDKLIARKKDWDPKKYGGFDSPTVAYSVLVVAKVEKGKSKKLKSVKELLGITIMERSSFEKNPIDFLEAKGYKEVKKDLIIKLPKYSLFELENGRKRMLASAGELQKGNELALPSKYVNFLYLASHYEKLKGSPEDNEQKQLFVEQHKHYLDEIIEQISEFSKRVILADANLDKVLSAYNKHRDKPIREQAENIIHLFTLTNLGAPAAFKYFDTTIDRKRYTSTKEVLDATLIHQSITGLYETRIDLSQLGGDGGGGSGGSGGSGGSGGSGGSGGGLEHLPRPPEISQFPLNPERLQALQHLVRKALEAGHIEPYTGPGNNPVFPVKKANGTWRFIHDLRATNSLTVDLSSSSPGPPDLSSPPTTLAHLQTIDLKDAFFQIPLPKQFQPYFAFTVPQQCNYGPGTRYAWKVLPQGFKNSPTLFQMQLASILQPIRQAFPQCVILQYMDDILLASPSPEDLQQLSEATMASLISHGLPVSQDKTQQTPGTIKFLGQIISPNHITYDAVPTVPIRSRWALPELQALLGEIQWVSKGTPTLRQPLHSLYCALQGHTDPRDQIYLNPSQVQSLMQLQQALSQNCRSRLAQTLPLLGAIMLTLTGTTTVVFQSKQQWPLVWLHAPLPHTSQCPWGQLLASAVLLLDKYTLQSYGLLCQTIHHNISIQTFNQFIQTSDHPSVPILLHHSHRFKNLGAQTGELWNTFLKTAAPLAPVKALTPVFTLSPIIINTAPCLFSDGSTSQAAYILWDKHILSQRSFPLPPPHKSAQQAELLGLLHGLSSARSWHCLNIFLDSKYLYHYLRTLAWGTFQGKSSQAPFQALLPRLLAHKVIYLHHVRSHTNLPDPISKLNALTDALLITPILAGKRTADGSEFEKRTADGSEFESPKKKAKVE

SEQ ID NO: 1504 - protein, 2099 aa, synthetic construct
MPAAKRVKLDGGDKKYSIGLDIGTNSVGWAVITDEYKVPSKKFKVLGNTDRHSIKKNLIGALLFDSGETAEATRLKRTARRRYTRRKNRICYLQEIFSNEMAKVDDSFFHRLEESFLVEEDKKHERHPIFGNIVDEVAYHEKYPTIYHLRKKLVDSTDKADLRLIYLALAHMIKFRGHFLIEGDLNPDNSDVDKLFIQLVQTYNQLFEENPINASGVDAKAILSARLSKSRRLENLIAQLPGEKKNGLFGNLIALSLGLTPNFKSNFDLAEDAKLQLSKDTYDDDLDNLLAQIGDQYADLFLAAKNLSDAILLSDILRVNTEITKAPLSASMIKRYDEHHQDLTLLKALVRQQLPEKYKEIFFDQSKNGYAGYIDGGASQEEFYKFIKPILEKMDGTEELLVKLNREDLLRKQRTFDNGSIPHQIHLGELHAILRRQEDFYPFLKDNREKIEKILTFRIPYYVGPLARGNSRFAWMTRKSEETITPWNFEEVVDKGASAQSFIERMTNFDKNLPNEKVLPKHSLLYEYFTVYNELTKVKYVTEGMRKPAFLSGEQKKAIVDLLFKTNRKVTVKQLKEDYFKKIECFDSVEISGVEDRFNASLGTYHDLLKIIKDKDFLDNEENEDILEDIVLTLTLFEDREMIEERLKTYAHLFDDKVMKQLKRRRYTGWGRLSRKLINGIRDKQSGKTILDFLKSDGFANRNFMQLIHDDSLTFKEDIQKAQVSGQGDSLHEHIANLAGSPAIKKGILQTVKVVDELVKVMGRHKPENIVIEMARENQTTQKGQKNSRERMKRIEEGIKELGSQILKEHPVENTQLQNEKLYLYYLQNGRDMYVDQELDINRLSDYDVDHIVPQSFLKDDSIDNKVLTRSDKARGKSDNVPSEEVVKKMKNYWRQLLNAKLITQRKFDNLTKAERGGLSELDKAGFIKRQLVETRQITKHVAQILDSRMNTKYDENDKLIREVKVITLKSKLVSDFRKDFQFYKVREINNYHHAHDAYLNAVVGTALIKKYPKLESEFVYGDYKVYDVRKMIAKSEQEIGKATAKYFFYSNIMNFFKTEITLANGEIRKRPLIETNGETGEIVWDKGRDFATVRKVLSMPQVNIVKKTEVQTGGFSKESILPKRNSDKLIARKKDWDPKKYGGFDSPTVAYSVLVVAKVEKGKSKKLKSVKELLGITIMERSSFEKNPIDFLEAKGYKEVKKDLIIKLPKYSLFELENGRKRMLASAGELQKGNELALPSKYVNFLYLASHYEKLKGSPEDNEQKQLFVEQHKHYLDEIIEQISEFSKRVILADANLDKVLSAYNKHRDKPIREQAENIIHLFTLTNLGAPAAFKYFDTTIDRKRYTSTKEVLDATLIHQSITGLYETRIDLSQLGGDGGEAAAKPAPGGTVSLQDEHRLFDIPVTTSLPDVWLQDFPQAWAETGGLGRAKCQAPIIIDLKPTAVPVSIKQYPMSLEAHMGIRQHIIKFLELGVLRPCRSPWNTPLLPVKKPGTQDYRPVQDLREINKRTVDIHPTVPNPYNLLSTLKPDYSWYTVLDLKDAFFCLPLAPQSQELFAFEWKDPERGISGQLTWTRLPQGFKNSPTLFDEALHRDLTDFRTQHPEVTLLQYVDDLLLAAPTKKACTQGTRHLLQELGEKGYRASAKKAQICQTKVTYLGYILSEGKRWLTPGRIETVARIPPPRNPREVREFLGTAGFCRLWIPGFAELAAPLYALTKESTPFTWQTEHQLAFEALKKALLSAPALGLPDTSKPFTLFLDERQGIAKGVLTQKLGPWKRPVAYLSKKLDPVAAGWPPCLRIMAATAMLVKDSAKLTLGQPLTVITPHTLEAIVRQPPDRWITNARLTHYQALLLDTDRVQFGPPVTLNPATLLPVPENQPSPHDCRQVLAETHGTREDLKDQELPDADHTWYTDGSSYLDSGTRRAGAAVVDGHNTIWAQSLPPGTSAQKAELIALTKALELSKGKKANIYTDSRYAFATAHTHGSIYERRGLLTSEGKEIKNKAEIIALLKALFLPQEVAIIHCPGHQKGQDPVAVGNRQADRVARQAAMAEVLTLATEPDNTSHITAGKRTADGSEFEKRTADGSEFESPKKKAKVE

SEQ ID NO: 1505 - protein, 2100 aa, synthetic construct
MPAAKRVKLDGGDKKYSIGLDIGTNSVGWAVITDEYKVPSKKFKVLGNTDRHSIKKNLIGALLFDSGETAEATRLKRTARRRYTRRKNRICYLQEIFSNEMAKVDDSFFHRLEESFLVEEDKKHERHPIFGNIVDEVAYHEKYPTIYHLRKKLVDSTDKADLRLIYLALAHMIKFRGHFLIEGDLNPDNSDVDKLFIQLVQTYNQLFEENPINASGVDAKAILSARLSKSRRLENLIAQLPGEKKNGLFGNLIALSLGLTPNFKSNFDLAEDAKLQLSKDTYDDDLDNLLAQIGDQYADLFLAAKNLSDAILLSDILRVNTEITKAPLSASMIKRYDEHHQDLTLLKALVRQQLPEKYKEIFFDQSKNGYAGYIDGGASQEEFYKFIKPILEKMDGTEELLVKLNREDLLRKQRTFDNGSIPHQIHLGELHAILRRQEDFYPFLKDNREKIEKILTFRIPYYVGPLARGNSRFAWMTRKSEETITPWNFEEVVDKGASAQSFIERMTNFDKNLPNEKVLPKHSLLYEYFTVYNELTKVKYVTEGMRKPAFLSGEQKKAIVDLLFKTNRKVTVKQLKEDYFKKIECFDSVEISGVEDRFNASLGTYHDLLKIIKDKDFLDNEENEDILEDIVLTLTLFEDREMIEERLKTYAHLFDDKVMKQLKRRRYTGWGRLSRKLINGIRDKQSGKTILDFLKSDGFANRNFMQLIHDDSLTFKEDIQKAQVSGQGDSLHEHIANLAGSPAIKKGILQTVKVVDELVKVMGRHKPENIVIEMARENQTTQKGQKNSRERMKRIEEGIKELGSQILKEHPVENTQLQNEKLYLYYLQNGRDMYVDQELDINRLSDYDVDHIVPQSFLKDDSIDNKVLTRSDKARGKSDNVPSEEVVKKMKNYWRQLLNAKLITQRKFDNLTKAERGGLSELDKAGFIKRQLVETRQITKHVAQILDSRMNTKYDENDKLIREVKVITLKSKLVSDFRKDFQFYKVREINNYHHAHDAYLNAVVGTALIKKYPKLESEFVYGDYKVYDVRKMIAKSEQEIGKATAKYFFYSNIMNFFKTEITLANGEIRKRPLIETNGETGEIVWDKGRDFATVRKVLSMPQVNIVKKTEVQTGGFSKESILPKRNSDKLIARKKDWDPKKYGGFDSPTVAYSVLVVAKVEKGKSKKLKSVKELLGITIMERSSFEKNPIDFLEAKGYKEVKKDLIIKLPKYSLFELENGRKRMLASAGELQKGNELALPSKYVNFLYLASHYEKLKGSPEDNEQKQLFVEQHKHYLDEIIEQISEFSKRVILADANLDKVLSAYNKHRDKPIREQAENIIHLFTLTNLGAPAAFKYFDTTIDRKRYTSTKEVLDATLIHQSITGLYETRIDLSQLGGDGGGGGGSSPAPGGTVSLQDEHRLFDIPVTTSLPDVWLQDFPQAWAETGGLGRAKCQAPIIIDLKPTAVPVSIKQYPMSLEAHMGIRQHIIKFLELGVLRPCRSPWNTPLLPVKKPGTQDYRPVQDLREINKRTVDIHPTVPNPYNLLSTLKPDYSWYTVLDLKDAFFCLPLAPQSQELFAFEWKDPERGISGQLTWTRLPQGFKNSPTLFDEALHRDLTDFRTQHPEVTLLQYVDDLLLAAPTKKACTQGTRHLLQELGEKGYRASAKKAQICQTKVTYLGYILSEGKRWLTPGRIETVARIPPPRNPREVREFLGTAGFCRLWIPGFAELAAPLYALTKESTPFTWQTEHQLAFEALKKALLSAPALGLPDTSKPFTLFLDERQGIAKGVLTQKLGPWKRPVAYLSKKLDPVAAGWPPCLRIMAATAMLVKDSAKLTLGQPLTVITPHTLEAIVRQPPDRWITNARLTHYQALLLDTDRVQFGPPVTLNPATLLPVPENQPSPHDCRQVLAETHGTREDLKDQELPDADHTWYTDGSSYLDSGTRRAGAAVVDGHNTIWAQSLPPGTSAQKAELIALTKALELSKGKKANIYTDSRYAFATAHTHGSIYERRGLLTSEGKEIKNKAEIIALLKALFLPQEVAIIHCPGHQKGQDPVAVGNRQADRVARQAAMAEVLTLATEPDNTSHITAGKRTADGSEFEKRTADGSEFESPKKKAKVE

SEQ ID NO: 1506 - protein, 2100 aa, synthetic construct
MPAAKRVKLDGGDKKYSIGLDIGTNSVGWAVITDEYKVPSKKFKVLGNTDRHSIKKNLIGALLFDSGETAEATRLKRTARRRYTRRKNRICYLQEIFSNEMAKVDDSFFHRLEESFLVEEDKKHERHPIFGNIVDEVAYHEKYPTIYHLRKKLVDSTDKADLRLIYLALAHMIKFRGHFLIEGDLNPDNSDVDKLFIQLVQTYNQLFEENPINASGVDAKAILSARLSKSRRLENLIAQLPGEKKNGLFGNLIALSLGLTPNFKSNFDLAEDAKLQLSKDTYDDDLDNLLAQIGDQYADLFLAAKNLSDAILLSDILRVNTEITKAPLSASMIKRYDEHHQDLTLLKALVRQQLPEKYKEIFFDQSKNGYAGYIDGGASQEEFYKFIKPILEKMDGTEELLVKLNREDLLRKQRTFDNGSIPHQIHLGELHAILRRQEDFYPFLKDNREKIEKILTFRIPYYVGPLARGNSRFAWMTRKSEETITPWNFEEVVDKGASAQSFIERMTNFDKNLPNEKVLPKHSLLYEYFTVYNELTKVKYVTEGMRKPAFLSGEQKKAIVDLLFKTNRKVTVKQLKEDYFKKIECFDSVEISGVEDRFNASLGTYHDLLKIIKDKDFLDNEENEDILEDIVLTLTLFEDREMIEERLKTYAHLFDDKVMKQLKRRRYTGWGRLSRKLINGIRDKQSGKTILDFLKSDGFANRNFMQLIHDDSLTFKEDIQKAQVSGQGDSLHEHIANLAGSPAIKKGILQTVKVVDELVKVMGRHKPENIVIEMARENQTTQKGQKNSRERMKRIEEGIKELGSQILKEHPVENTQLQNEKLYLYYLQNGRDMYVDQELDINRLSDYDVDHIVPQSFLKDDSIDNKVLTRSDKARGKSDNVPSEEVVKKMKNYWRQLLNAKLITQRKFDNLTKAERGGLSELDKAGFIKRQLVETRQITKHVAQILDSRMNTKYDENDKLIREVKVITLKSKLVSDFRKDFQFYKVREINNYHHAHDAYLNAVVGTALIKKYPKLESEFVYGDYKVYDVRKMIAKSEQEIGKATAKYFFYSNIMNFFKTEITLANGEIRKRPLIETNGETGEIVWDKGRDFATVRKVLSMPQVNIVKKTEVQTGGFSKESILPKRNSDKLIARKKDWDPKKYGGFDSPTVAYSVLVVAKVEKGKSKKLKSVKELLGITIMERSSFEKNPIDFLEAKGYKEVKKDLIIKLPKYSLFELENGRKRMLASAGELQKGNELALPSKYVNFLYLASHYEKLKGSPEDNEQKQLFVEQHKHYLDEIIEQISEFSKRVILADANLDKVLSAYNKHRDKPIREQAENIIHLFTLTNLGAPAAFKYFDTTIDRKRYTSTKEVLDATLIHQSITGLYETRIDLSQLGGDGGPAPGGSGGGGGTVSLQDEHRLFDIPVTTSLPDVWLQDFPQAWAETGGLGRAKCQAPIIIDLKPTAVPVSIKQYPMSLEAHMGIRQHIIKFLELGVLRPCRSPWNTPLLPVKKPGTQDYRPVQDLREINKRTVDIHPTVPNPYNLLSTLKPDYSWYTVLDLKDAFFCLPLAPQSQELFAFEWKDPERGISGQLTWTRLPQGFKNSPTLFDEALHRDLTDFRTQHPEVTLLQYVDDLLLAAPTKKACTQGTRHLLQELGEKGYRASAKKAQICQTKVTYLGYILSEGKRWLTPGRIETVARIPPPRNPREVREFLGTAGFCRLWIPGFAELAAPLYALTKESTPFTWQTEHQLAFEALKKALLSAPALGLPDTSKPFTLFLDERQGIAKGVLTQKLGPWKRPVAYLSKKLDPVAAGWPPCLRIMAATAMLVKDSAKLTLGQPLTVITPHTLEAIVRQPPDRWITNARLTHYQALLLDTDRVQFGPPVTLNPATLLPVPENQPSPHDCRQVLAETHGTREDLKDQELPDADHTWYTDGSSYLDSGTRRAGAAVVDGHNTIWAQSLPPGTSAQKAELIALTKALELSKGKKANIYTDSRYAFATAHTHGSIYERRGLLTSEGKEIKNKAEIIALLKALFLPQEVAIIHCPGHQKGQDPVAVGNRQADRVARQAAMAEVLTLATEPDNTSHITAGKRTADGSEFEKRTADGSEFESPKKKAKVE

SEQ ID NO: 1507 - protein, 2106 aa, synthetic construct
MPAAKRVKLDGGDKKYSIGLDIGTNSVGWAVITDEYKVPSKKFKVLGNTDRHSIKKNLIGALLFDSGETAEATRLKRTARRRYTRRKNRICYLQEIFSNEMAKVDDSFFHRLEESFLVEEDKKHERHPIFGNIVDEVAYHEKYPTIYHLRKKLVDSTDKADLRLIYLALAHMIKFRGHFLIEGDLNPDNSDVDKLFIQLVQTYNQLFEENPINASGVDAKAILSARLSKSRRLENLIAQLPGEKKNGLFGNLIALSLGLTPNFKSNFDLAEDAKLQLSKDTYDDDLDNLLAQIGDQYADLFLAAKNLSDAILLSDILRVNTEITKAPLSASMIKRYDEHHQDLTLLKALVRQQLPEKYKEIFFDQSKNGYAGYIDGGASQEEFYKFIKPILEKMDGTEELLVKLNREDLLRKQRTFDNGSIPHQIHLGELHAILRRQEDFYPFLKDNREKIEKILTFRIPYYVGPLARGNSRFAWMTRKSEETITPWNFEEVVDKGASAQSFIERMTNFDKNLPNEKVLPKHSLLYEYFTVYNELTKVKYVTEGMRKPAFLSGEQKKAIVDLLFKTNRKVTVKQLKEDYFKKIECFDSVEISGVEDRFNASLGTYHDLLKIIKDKDFLDNEENEDILEDIVLTLTLFEDREMIEERLKTYAHLFDDKVMKQLKRRRYTGWGRLSRKLINGIRDKQSGKTILDFLKSDGFANRNFMQLIHDDSLTFKEDIQKAQVSGQGDSLHEHIANLAGSPAIKKGILQTVKVVDELVKVMGRHKPENIVIEMARENQTTQKGQKNSRERMKRIEEGIKELGSQILKEHPVENTQLQNEKLYLYYLQNGRDMYVDQELDINRLSDYDVDHIVPQSFLKDDSIDNKVLTRSDKARGKSDNVPSEEVVKKMKNYWRQLLNAKLITQRKFDNLTKAERGGLSELDKAGFIKRQLVETRQITKHVAQILDSRMNTKYDENDKLIREVKVITLKSKLVSDFRKDFQFYKVREINNYHHAHDAYLNAVVGTALIKKYPKLESEFVYGDYKVYDVRKMIAKSEQEIGKATAKYFFYSNIMNFFKTEITLANGEIRKRPLIETNGETGEIVWDKGRDFATVRKVLSMPQVNIVKKTEVQTGGFSKESILPKRNSDKLIARKKDWDPKKYGGFDSPTVAYSVLVVAKVEKGKSKKLKSVKELLGITIMERSSFEKNPIDFLEAKGYKEVKKDLIIKLPKYSLFELENGRKRMLASAGELQKGNELALPSKYVNFLYLASHYEKLKGSPEDNEQKQLFVEQHKHYLDEIIEQISEFSKRVILADANLDKVLSAYNKHRDKPIREQAENIIHLFTLTNLGAPAAFKYFDTTIDRKRYTSTKEVLDATLIHQSITGLYETRIDLSQLGGDGGGGSGGSGGSGGSGGSGGTVSLQDEHRLFDIPVTTSLPDVWLQDFPQAWAETGGLGRAKCQAPIIIDLKPTAVPVSIKQYPMSLEAHMGIRQHIIKFLELGVLRPCRSPWNTPLLPVKKPGTQDYRPVQDLREINKRTVDIHPTVPNPYNLLSTLKPDYSWYTVLDLKDAFFCLPLAPQSQELFAFEWKDPERGISGQLTWTRLPQGFKNSPTLFDEALHRDLTDFRTQHPEVTLLQYVDDLLLAAPTKKACTQGTRHLLQELGEKGYRASAKKAQICQTKVTYLGYILSEGKRWLTPGRIETVARIPPPRNPREVREFLGTAGFCRLWIPGFAELAAPLYALTKESTPFTWQTEHQLAFEALKKALLSAPALGLPDTSKPFTLFLDERQGIAKGVLTQKLGPWKRPVAYLSKKLDPVAAGWPPCLRIMAATAMLVKDSAKLTLGQPLTVITPHTLEAIVRQPPDRWITNARLTHYQALLLDTDRVQFGPPVTLNPATLLPVPENQPSPHDCRQVLAETHGTREDLKDQELPDADHTWYTDGSSYLDSGTRRAGAAVVDGHNTIWAQSLPPGTSAQKAELIALTKALELSKGKKANIYTDSRYAFATAHTHGSIYERRGLLTSEGKEIKNKAEIIALLKALFLPQEVAIIHCPGHQKGQDPVAVGNRQADRVARQAAMAEVLTLATEPDNTSHITAGKRTADGSEFEKRTADGSEFESPKKKAKVE

SEQ ID NO: 1508 - protein, 2100 aa, synthetic construct
MPAAKRVKLDGGDKKYSIGLDIGTNSVGWAVITDEYKVPSKKFKVLGNTDRHSIKKNLIGALLFDSGETAEATRLKRTARRRYTRRKNRICYLQEIFSNEMAKVDDSFFHRLEESFLVEEDKKHERHPIFGNIVDEVAYHEKYPTIYHLRKKLVDSTDKADLRLIYLALAHMIKFRGHFLIEGDLNPDNSDVDKLFIQLVQTYNQLFEENPINASGVDAKAILSARLSKSRRLENLIAQLPGEKKNGLFGNLIALSLGLTPNFKSNFDLAEDAKLQLSKDTYDDDLDNLLAQIGDQYADLFLAAKNLSDAILLSDILRVNTEITKAPLSASMIKRYDEHHQDLTLLKALVRQQLPEKYKEIFFDQSKNGYAGYIDGGASQEEFYKFIKPILEKMDGTEELLVKLNREDLLRKQRTFDNGSIPHQIHLGELHAILRRQEDFYPFLKDNREKIEKILTFRIPYYVGPLARGNSRFAWMTRKSEETITPWNFEEVVDKGASAQSFIERMTNFDKNLPNEKVLPKHSLLYEYFTVYNELTKVKYVTEGMRKPAFLSGEQKKAIVDLLFKTNRKVTVKQLKEDYFKKIECFDSVEISGVEDRFNASLGTYHDLLKIIKDKDFLDNEENEDILEDIVLTLTLFEDREMIEERLKTYAHLFDDKVMKQLKRRRYTGWGRLSRKLINGIRDKQSGKTILDFLKSDGFANRNFMQLIHDDSLTFKEDIQKAQVSGQGDSLHEHIANLAGSPAIKKGILQTVKVVDELVKVMGRHKPENIVIEMARENQTTQKGQKNSRERMKRIEEGIKELGSQILKEHPVENTQLQNEKLYLYYLQNGRDMYVDQELDINRLSDYDVDHIVPQSFLKDDSIDNKVLTRSDKARGKSDNVPSEEVVKKMKNYWRQLLNAKLITQRKFDNLTKAERGGLSELDKAGFIKRQLVETRQITKHVAQILDSRMNTKYDENDKLIREVKVITLKSKLVSDFRKDFQFYKVREINNYHHAHDAYLNAVVGTALIKKYPKLESEFVYGDYKVYDVRKMIAKSEQEIGKATAKYFFYSNIMNFFKTEITLANGEIRKRPLIETNGETGEIVWDKGRDFATVRKVLSMPQVNIVKKTEVQTGGFSKESILPKRNSDKLIARKKDWDPKKYGGFDSPTVAYSVLVVAKVEKGKSKKLKSVKELLGITIMERSSFEKNPIDFLEAKGYKEVKKDLIIKLPKYSLFELENGRKRMLASAGELQKGNELALPSKYVNFLYLASHYEKLKGSPEDNEQKQLFVEQHKHYLDEIIEQISEFSKRVILADANLDKVLSAYNKHRDKPIREQAENIIHLFTLTNLGAPAAFKYFDTTIDRKRYTSTKEVLDATLIHQSITGLYETRIDLSQLGGDGGGSSGGSPAPGGTVSLQDEHRLFDIPVTTSLPDVWLQDFPQAWAETGGLGRAKCQAPIIIDLKPTAVPVSIKQYPMSLEAHMGIRQHIIKFLELGVLRPCRSPWNTPLLPVKKPGTQDYRPVQDLREINKRTVDIHPTVPNPYNLLSTLKPDYSWYTVLDLKDAFFCLPLAPQSQELFAFEWKDPERGISGQLTWTRLPQGFKNSPTLFDEALHRDLTDFRTQHPEVTLLQYVDDLLLAAPTKKACTQGTRHLLQELGEKGYRASAKKAQICQTKVTYLGYILSEGKRWLTPGRIETVARIPPPRNPREVREFLGTAGFCRLWIPGFAELAAPLYALTKESTPFTWQTEHQLAFEALKKALLSAPALGLPDTSKPFTLFLDERQGIAKGVLTQKLGPWKRPVAYLSKKLDPVAAGWPPCLRIMAATAMLVKDSAKLTLGQPLTVITPHTLEAIVRQPPDRWITNARLTHYQALLLDTDRVQFGPPVTLNPATLLPVPENQPSPHDCRQVLAETHGTREDLKDQELPDADHTWYTDGSSYLDSGTRRAGAAVVDGHNTIWAQSLPPGTSAQKAELIALTKALELSKGKKANIYTDSRYAFATAHTHGSIYERRGLLTSEGKEIKNKAEIIALLKALFLPQEVAIIHCPGHQKGQDPVAVGNRQADRVARQAAMAEVLTLATEPDNTSHITAGKRTADGSEFEKRTADGSEFESPKKKAKVE

SEQ ID NO: 1509 - protein, 2097 aa, synthetic construct
MPAAKRVKLDGGDKKYSIGLDIGTNSVGWAVITDEYKVPSKKFKVLGNTDRHSIKKNLIGALLFDSGETAEATRLKRTARRRYTRRKNRICYLQEIFSNEMAKVDDSFFHRLEESFLVEEDKKHERHPIFGNIVDEVAYHEKYPTIYHLRKKLVDSTDKADLRLIYLALAHMIKFRGHFLIEGDLNPDNSDVDKLFIQLVQTYNQLFEENPINASGVDAKAILSARLSKSRRLENLIAQLPGEKKNGLFGNLIALSLGLTPNFKSNFDLAEDAKLQLSKDTYDDDLDNLLAQIGDQYADLFLAAKNLSDAILLSDILRVNTEITKAPLSASMIKRYDEHHQDLTLLKALVRQQLPEKYKEIFFDQSKNGYAGYIDGGASQEEFYKFIKPILEKMDGTEELLVKLNREDLLRKQRTFDNGSIPHQIHLGELHAILRRQEDFYPFLKDNREKIEKILTFRIPYYVGPLARGNSRFAWMTRKSEETITPWNFEEVVDKGASAQSFIERMTNFDKNLPNEKVLPKHSLLYEYFTVYNELTKVKYVTEGMRKPAFLSGEQKKAIVDLLFKTNRKVTVKQLKEDYFKKIECFDSVEISGVEDRFNASLGTYHDLLKIIKDKDFLDNEENEDILEDIVLTLTLFEDREMIEERLKTYAHLFDDKVMKQLKRRRYTGWGRLSRKLINGIRDKQSGKTILDFLKSDGFANRNFMQLIHDDSLTFKEDIQKAQVSGQGDSLHEHIANLAGSPAIKKGILQTVKVVDELVKVMGRHKPENIVIEMARENQTTQKGQKNSRERMKRIEEGIKELGSQILKEHPVENTQLQNEKLYLYYLQNGRDMYVDQELDINRLSDYDVDHIVPQSFLKDDSIDNKVLTRSDKARGKSDNVPSEEVVKKMKNYWRQLLNAKLITQRKFDNLTKAERGGLSELDKAGFIKRQLVETRQITKHVAQILDSRMNTKYDENDKLIREVKVITLKSKLVSDFRKDFQFYKVREINNYHHAHDAYLNAVVGTALIKKYPKLESEFVYGDYKVYDVRKMIAKSEQEIGKATAKYFFYSNIMNFFKTEITLANGEIRKRPLIETNGETGEIVWDKGRDFATVRKVLSMPQVNIVKKTEVQTGGFSKESILPKRNSDKLIARKKDWDPKKYGGFDSPTVAYSVLVVAKVEKGKSKKLKSVKELLGITIMERSSFEKNPIDFLEAKGYKEVKKDLIIKLPKYSLFELENGRKRMLASAGELQKGNELALPSKYVNFLYLASHYEKLKGSPEDNEQKQLFVEQHKHYLDEIIEQISEFSKRVILADANLDKVLSAYNKHRDKPIREQAENIIHLFTLTNLGAPAAFKYFDTTIDRKRYTSTKEVLDATLIHQSITGLYETRIDLSQLGGDGGPAPGSSGGTVSLQDEHRLFDIPVTTSLPDVWLQDFPQAWAETGGLGRAKCQAPIIIDLKPTAVPVSIKQYPMSLEAHMGIRQHIIKFLELGVLRPCRSPWNTPLLPVKKPGTQDYRPVQDLREINKRTVDIHPTVPNPYNLLSTLKPDYSWYTVLDLKDAFFCLPLAPQSQELFAFEWKDPERGISGQLTWTRLPQGFKNSPTLFDEALHRDLTDFRTQHPEVTLLQYVDDLLLAAPTKKACTQGTRHLLQELGEKGYRASAKKAQICQTKVTYLGYILSEGKRWLTPGRIETVARIPPPRNPREVREFLGTAGFCRLWIPGFAELAAPLYALTKESTPFTWQTEHQLAFEALKKALLSAPALGLPDTSKPFTLFLDERQGIAKGVLTQKLGPWKRPVAYLSKKLDPVAAGWPPCLRIMAATAMLVKDSAKLTLGQPLTVITPHTLEAIVRQPPDRWITNARLTHYQALLLDTDRVQFGPPVTLNPATLLPVPENQPSPHDCRQVLAETHGTREDLKDQELPDADHTWYTDGSSYLDSGTRRAGAAVVDGHNTIWAQSLPPGTSAQKAELIALTKALELSKGKKANIYTDSRYAFATAHTHGSIYERRGLLTSEGKEIKNKAEIIALLKALFLPQEVAIIHCPGHQKGQDPVAVGNRQADRVARQAAMAEVLTLATEPDNTSHITAGKRTADGSEFEKRTADGSEFESPKKKAKVE

SEQ ID NO: 1510 - protein, 2009 aa, synthetic construct
MPAAKRVKLDGGDKKYSIGLDIGTNSVGWAVITDEYKVPSKKFKVLGNTDRHSIKKNLIGALLFDSGETAEATRLKRTARRRYTRRKNRICYLQEIFSNEMAKVDDSFFHRLEESFLVEEDKKHERHPIFGNIVDEVAYHEKYPTIYHLRKKLVDSTDKADLRLIYLALAHMIKFRGHFLIEGDLNPDNSDVDKLFIQLVQTYNQLFEENPINASGVDAKAILSARLSKSRRLENLIAQLPGEKKNGLFGNLIALSLGLTPNFKSNFDLAEDAKLQLSKDTYDDDLDNLLAQIGDQYADLFLAAKNLSDAILLSDILRVNTEITKAPLSASMIKRYDEHHQDLTLLKALVRQQLPEKYKEIFFDQSKNGYAGYIDGGASQEEFYKFIKPILEKMDGTEELLVKLNREDLLRKQRTFDNGSIPHQIHLGELHAILRRQEDFYPFLKDNREKIEKILTFRIPYYVGPLARGNSRFAWMTRKSEETITPWNFEEVVDKGASAQSFIERMTNFDKNLPNEKVLPKHSLLYEYFTVYNELTKVKYVTEGMRKPAFLSGEQKKAIVDLLFKTNRKVTVKQLKEDYFKKIECFDSVEISGVEDRFNASLGTYHDLLKIIKDKDFLDNEENEDILEDIVLTLTLFEDREMIEERLKTYAHLFDDKVMKQLKRRRYTGWGRLSRKLINGIRDKQSGKTILDFLKSDGFANRNFMQLIHDDSLTFKEDIQKAQVSGQGDSLHEHIANLAGSPAIKKGILQTVKVVDELVKVMGRHKPENIVIEMARENQTTQKGQKNSRERMKRIEEGIKELGSQILKEHPVENTQLQNEKLYLYYLQNGRDMYVDQELDINRLSDYDVDHIVPQSFLKDDSIDNKVLTRSDKARGKSDNVPSEEVVKKMKNYWRQLLNAKLITQRKFDNLTKAERGGLSELDKAGFIKRQLVETRQITKHVAQILDSRMNTKYDENDKLIREVKVITLKSKLVSDFRKDFQFYKVREINNYHHAHDAYLNAVVGTALIKKYPKLESEFVYGDYKVYDVRKMIAKSEQEIGKATAKYFFYSNIMNFFKTEITLANGEIRKRPLIETNGETGEIVWDKGRDFATVRKVLSMPQVNIVKKTEVQTGGFSKESILPKRNSDKLIARKKDWDPKKYGGFDSPTVAYSVLVVAKVEKGKSKKLKSVKELLGITIMERSSFEKNPIDFLEAKGYKEVKKDLIIKLPKYSLFELENGRKRMLASAGELQKGNELALPSKYVNFLYLASHYEKLKGSPEDNEQKQLFVEQHKHYLDEIIEQISEFSKRVILADANLDKVLSAYNKHRDKPIREQAENIIHLFTLTNLGAPAAFKYFDTTIDRKRYTSTKEVLDATLIHQSITGLYETRIDLSQLGGDGGEAAAKGGGPAPGGGLEHLPPPPEVSQFPLNPERLQALTDLVSRALEAKHIEPYQGPGNNPIFPVKKPNGKWRFIHDLRATNSVTRDLASPSPGPPDLTSLPQGLPHLRTIDLTDAFFQIPLPTIFQPYFAFTLPQPNNYGPGTRYSWRVLPQGFKNSPTLFEQQLSHILTPVRKTFPNSLIIQYMDDILLASPAPGELAALTDKVTNALTKEGLPLSPEKTQATPGPIHFLGQVISQDCITYETLPSINVKSTWSLAELQSMLGELQWVSKGTPVLRSSLHQLYLALRGHRDPRDTIKLTSIQVQALRTIQKALTLNCRSRLVNQLPILALIMLRPTGTTAVLFQTKQKWPLVWLHTPHPATSLRPWGQLLANAVIILDKYSLQHYGQVCKSFHHNISNQALTYYLHTSDQSSVAILLQHSHRFHNLGAQPSGPWRSLLQMPQIFQNIDVLRPPFTISPVVINHAPCLFSDGSASKAAFIIWDRQVIHQQVLSLPSTCSAQAGELFGLLAGLQKSQPWVALNIFLDSKFLIGHLRRMALGAFPGPSTQCELHTQLLPLLQGKTVYVHHVRSHTLLQDPISRLNEATDALMLAPLLPLAGKRTADGSEFEKRTADGSEFESPKKKAKVE

SEQ ID NO: 1511 - protein, 2001 aa, synthetic construct
MPAAKRVKLDGGDKKYSIGLDIGTNSVGWAVITDEYKVPSKKFKVLGNTDRHSIKKNLIGALLFDSGETAEATRLKRTARRRYTRRKNRICYLQEIFSNEMAKVDDSFFHRLEESFLVEEDKKHERHPIFGNIVDEVAYHEKYPTIYHLRKKLVDSTDKADLRLIYLALAHMIKFRGHFLIEGDLNPDNSDVDKLFIQLVQTYNQLFEENPINASGVDAKAILSARLSKSRRLENLIAQLPGEKKNGLFGNLIALSLGLTPNFKSNFDLAEDAKLQLSKDTYDDDLDNLLAQIGDQYADLFLAAKNLSDAILLSDILRVNTEITKAPLSASMIKRYDEHHQDLTLLKALVRQQLPEKYKEIFFDQSKNGYAGYIDGGASQEEFYKFIKPILEKMDGTEELLVKLNREDLLRKQRTFDNGSIPHQIHLGELHAILRRQEDFYPFLKDNREKIEKILTFRIPYYVGPLARGNSRFAWMTRKSEETITPWNFEEVVDKGASAQSFIERMTNFDKNLPNEKVLPKHSLLYEYFTVYNELTKVKYVTEGMRKPAFLSGEQKKAIVDLLFKTNRKVTVKQLKEDYFKKIECFDSVEISGVEDRFNASLGTYHDLLKIIKDKDFLDNEENEDILEDIVLTLTLFEDREMIEERLKTYAHLFDDKVMKQLKRRRYTGWGRLSRKLINGIRDKQSGKTILDFLKSDGFANRNFMQLIHDDSLTFKEDIQKAQVSGQGDSLHEHIANLAGSPAIKKGILQTVKVVDELVKVMGRHKPENIVIEMARENQTTQKGQKNSRERMKRIEEGIKELGSQILKEHPVENTQLQNEKLYLYYLQNGRDMYVDQELDINRLSDYDVDHIVPQSFLKDDSIDNKVLTRSDKARGKSDNVPSEEVVKKMKNYWRQLLNAKLITQRKFDNLTKAERGGLSELDKAGFIKRQLVETRQITKHVAQILDSRMNTKYDENDKLIREVKVITLKSKLVSDFRKDFQFYKVREINNYHHAHDAYLNAVVGTALIKKYPKLESEFVYGDYKVYDVRKMIAKSEQEIGKATAKYFFYSNIMNFFKTEITLANGEIRKRPLIETNGETGEIVWDKGRDFATVRKVLSMPQVNIVKKTEVQTGGFSKESILPKRNSDKLIARKKDWDPKKYGGFDSPTVAYSVLVVAKVEKGKSKKLKSVKELLGITIMERSSFEKNPIDFLEAKGYKEVKKDLIIKLPKYSLFELENGRKRMLASAGELQKGNELALPSKYVNFLYLASHYEKLKGSPEDNEQKQLFVEQHKHYLDEIIEQISEFSKRVILADANLDKVLSAYNKHRDKPIREQAENIIHLFTLTNLGAPAAFKYFDTTIDRKRYTSTKEVLDATLIHQSITGLYETRIDLSQLGGDGGGGSGGGLEHLPPPPEVSQFPLNPERLQALTDLVSRALEAKHIEPYQGPGNNPIFPVKKPNGKWRFIHDLRATNSVTRDLASPSPGPPDLTSLPQGLPHLRTIDLTDAFFQIPLPTIFQPYFAFTLPQPNNYGPGTRYSWRVLPQGFKNSPTLFQQQLSHILTPVRKTFPNSLIIQYMDDILLASPAPGELAALTDKVTNALTKEGLPLSPEKTQATPGPIHFLGQVISQDCITYETLPSINVKSTWSLAELQSMLGELQWVSKGTPVLRSSLHQLYLALRGHRDPRDTIKLTSIQVQALRTIQKALTLNCRSRLVNQLPILALIMLRPTGTTAVLFQTKQKWPLVWLHTPHPATSLRPWGQLLANAVIILDKYSLQHYGQVCKSFHHNISNQALTYYLHTSDQSSVAILLQHSHRFHNLGAQPSGPWRSLLQMPQIFQNIDVLRPPFTISPVVINHAPCLFSDGSASKAAFIIWDRQVIHQQVLSLPSTCSAQAGELFGLLAGLQKSQPWVALNIFLDSKFLIGHLRRMAWGAFPGPSTQCELHTQLLPLLQGKTVYVHHVRSHTLLQDPISRLNEATDALMLAPLLPLAGKRTADGSEFEKRTADGSEFESPKKKAKVE

SEQ ID NO: 1512 - protein, 2004 aa, synthetic construct
MPAAKRVKLDGGDKKYSIGLDIGTNSVGWAVITDEYKVPSKKFKVLGNTDRHSIKKNLIGALLFDSGETAEATRLKRTARRRYTRRKNRICYLQEIFSNEMAKVDDSFFHRLEESFLVEEDKKHERHPIFGNIVDEVAYHEKYPTIYHLRKKLVDSTDKADLRLIYLALAHMIKFRGHFLIEGDLNPDNSDVDKLFIQLVQTYNQLFEENPINASGVDAKAILSARLSKSRRLENLIAQLPGEKKNGLFGNLIALSLGLTPNFKSNFDLAEDAKLQLSKDTYDDDLDNLLAQIGDQYADLFLAAKNLSDAILLSDILRVNTEITKAPLSASMIKRYDEHHQDLTLLKALVRQQLPEKYKEIFFDQSKNGYAGYIDGGASQEEFYKFIKPILEKMDGTEELLVKLNREDLLRKQRTFDNGSIPHQIHLGELHAILRRQEDFYPFLKDNREKIEKILTFRIPYYVGPLARGNSRFAWMTRKSEETITPWNFEEVVDKGASAQSFIERMTNFDKNLPNEKVLPKHSLLYEYFTVYNELTKVKYVTEGMRKPAFLSGEQKKAIVDLLFKTNRKVTVKQLKEDYFKKIECFDSVEISGVEDRFNASLGTYHDLLKIIKDKDFLDNEENEDILEDIVLTLTLFEDREMIEERLKTYAHLFDDKVMKQLKRRRYTGWGRLSRKLINGIRDKQSGKTILDFLKSDGFANRNFMQLIHDDSLTFKEDIQKAQVSGQGDSLHEHIANLAGSPAIKKGILQTVKVVDELVKVMGRHKPENIVIEMARENQTTQKGQKNSRERMKRIEEGIKELGSQILKEHPVENTQLQNEKLYLYYLQNGRDMYVDQELDINRLSDYDVDHIVPQSFLKDDSIDNKVLTRSDKARGKSDNVPSEEVVKKMKNYWRQLLNAKLITQRKFDNLTKAERGGLSELDKAGFIKRQLVETRQITKHVAQILDSRMNTKYDENDKLIREVKVITLKSKLVSDFRKDFQFYKVREINNYHHAHDAYLNAVVGTALIKKYPKLESEFVYGDYKVYDVRKMIAKSEQEIGKATAKYFFYSNIMNFFKTEITLANGEIRKRPLIETNGETGEIVWDKGRDFATVRKVLSMPQVNIVKKTEVQTGGFSKESILPKRNSDKLIARKKDWDPKKYGGFDSPTVAYSVLVVAKVEKGKSKKLKSVKELLGITIMERSSFEKNPIDFLEAKGYKEVKKDLIIKLPKYSLFELENGRKRMLASAGELQKGNELALPSKYVNFLYLASHYEKLKGSPEDNEQKQLFVEQHKHYLDEIIEQISEFSKRVILADANLDKVLSAYNKHRDKPIREQAENIIHLFTLTNLGAPAAFKYFDTTIDRKRYTSTKEVLDATLIHQSITGLYETRIDLSQLGGDGGGGSGGGGGGLEHLPPPPEVSQFPLNPERLQALTDLVSRALEAKHIEPYQGPGNNPIFPVKKPNGKWRFIHDLRATNSVTRDLASPSPGPPDLTSLPQGLPHLRTIDLTDAFFQIPLPTIFQPYFAFTLPQPNNYGPGTRYSWRVLPQGFKNSPTLFQQQLSHILTPVRKTFPNSLIIQYMDDILLASPAPGELAALTDKVTNALTKEGLPLSPEKTQATPGPIHFLGQVISQDCITYETLPSINVKSTWSLAELQSMLGELQWVSKGTPVLRSSLHQLYLALRGHRDPRDTIKLTSIQVQALRTIQKALTLNCRSRLVNQLPILALIMLRPTGTTAVLFQTKQKWPLVWLHTPHPATSLRPWGQLLANAVIILDKYSLQHYGQVCKSFHHNISNQALTYYLHTSDQSSVAILLQHSHRFHNLGAQPSGPWRSLLQMPQIFQNIDVLRPPFTISPVVINHAPCLFSDGSASKAAFIIWDRQVIHQQVLSLPSTCSAQAGELFGLLAGLQKSQPWVALNIFLDSKFLIGHLRRMAWGAFPGPSTQCELHTQLLPLLQGKTVYVHHVRSHTLLQDPISRLNEATDALMLAPLLPLAGKRTADGSEFEKRTADGSEFESPKKKAKVE

SEQ ID NO: 1513 - protein, 2007 aa, synthetic construct
MPAAKRVKLDGGDKKYSIGLDIGTNSVGWAVITDEYKVPSKKFKVLGNTDRHSIKKNLIGALLFDSGETAEATRLKRTARRRYTRRKNRICYLQEIFSNEMAKVDDSFFHRLEESFLVEEDKKHERHPIFGNIVDEVAYHEKYPTIYHLRKKLVDSTDKADLRLIYLALAHMIKFRGHFLIEGDLNPDNSDVDKLFIQLVQTYNQLFEENPINASGVDAKAILSARLSKSRRLENLIAQLPGEKKNGLFGNLIALSLGLTPNFKSNFDLAEDAKLQLSKDTYDDDLDNLLAQIGDQYADLFLAAKNLSDAILLSDILRVNTEITKAPLSASMIKRYDEHHQDLTLLKALVRQQLPEKYKEIFFDQSKNGYAGYIDGGASQEEFYKFIKPILEKMDGTEELLVKLNREDLLRKQRTFDNGSIPHQIHLGELHAILRRQEDFYPFLKDNREKIEKILTFRIPYYVGPLARGNSRFAWMTRKSEETITPWNFEEVVDKGASAQSFIERMTNFDKNLPNEKVLPKHSLLYEYFTVYNELTKVKYVTEGMRKPAFLSGEQKKAIVDLLFKTNRKVTVKQLKEDYFKKIECFDSVEISGVEDRFNASLGTYHDLLKIIKDKDFLDNEENEDILEDIVLTLTLFEDREMIEERLKTYAHLFDDKVMKQLKRRRYTGWGRLSRKLINGIRDKQSGKTILDFLKSDGFANRNFMQLIHDDSLTFKEDIQKAQVSGQGDSLHEHIANLAGSPAIKKGILQTVKVVDELVKVMGRHKPENIVIEMARENQTTQKGQKNSRERMKRIEEGIKELGSQILKEHPVENTQLQNEKLYLYYLQNGRDMYVDQELDINRLSDYDVDHIVPQSFLKDDSIDNKVLTRSDKARGKSDNVPSEEVVKKMKNYWRQLLNAKLITQRKFDNLTKAERGGLSELDKAGFIKRQLVETRQITKHVAQILDSRMNTKYDENDKLIREVKVITLKSKLVSDFRKDFQFYKVREINNYHHAHDAYLNAVVGTALIKKYPKLESEFVYGDYKVYDVRKMIAKSEQEIGKATAKYFFYSNIMNFFKTEITLANGEIRKRPLIETNGETGEIVWDKGRDFATVRKVLSMPQVNIVKKTEVQTGGFSKESILPKRNSDKLIARKKDWDPKKYGGFDSPTVAYSVLVVAKVEKGKSKKLKSVKELLGITIMERSSFEKNPIDFLEAKGYKEVKKDLIIKLPKYSLFELENGRKRMLASAGELQKGNELALPSKYVNFLYLASHYEKLKGSPEDNEQKQLFVEQHKHYLDEIIEQISEFSKRVILADANLDKVLSAYNKHRDKPIREQAENIIHLFTLTNLGAPAAFKYFDTTIDRKRYTSTKEVLDATLIHQSITGLYETRIDLSQLGGDGGPAPGGGGSSGGGLEHLPPPPEVSQFPLNPERLQALTDLVSRALEAKHIEPYQGPGNNPIFPVKKPNGKWRFIHDLRATNSVTRDLASPSPGPPDLTSLPQGLPHLRTIDLTDAFFQIPLPTIFQPYFAFTLPQPNNYGPGTRYSWRVLPQGFKNSPTLFQQQLSHILTPVRKTFPNSLIIQYMDDILLASPAPGELAALTDKVTNALTKEGLPLSPEKTQATPGPIHFLGQVISQDCITYETLPSINVKSTWSLAELQSMLGELQWVSKGTPVLRSSLHQLYLALRGHRDPRDTIKLTSIQVQALRTIQKALTLNCRSRLVNQLPILALIMLRPTGTTAVLFQTKQKWPLVWLHTPHPATSLRPWGQLLANAVIILDKYSLQHYGQVCKSFHHNISNQALTYYLHTSDQSSVAILLQHSHRFHNLGAQPSGPWRSLLQMPQIFQNIDVLRPPFTISPVVINHAPCLFSDGSASKAAFIIWDRQVIHQQVLSLPSTCSAQAGELFGLLAGLQKSQPWVALNIFLDSKFLIGHLRRMAWGAFPGPSTQCELHTQLLPLLQGKTVYVHHVRSHTLLQDPISRLNEATDALMLAPLLPLAGKRTADGSEFEKRTADGSEFESPKKKAKVE

SEQ ID NO: 1514 - protein, 2007 aa, synthetic construct
MPAAKRVKLDGGDKKYSIGLDIGTNSVGWAVITDEYKVPSKKFKVLGNTDRHSIKKNLIGALLFDSGETAEATRLKRTARRRYTRRKNRICYLQEIFSNEMAKVDDSFFHRLEESFLVEEDKKHERHPIFGNIVDEVAYHEKYPTIYHLRKKLVDSTDKADLRLIYLALAHMIKFRGHFLIEGDLNPDNSDVDKLFIQLVQTYNQLFEENPINASGVDAKAILSARLSKSRRLENLIAQLPGEKKNGLFGNLIALSLGLTPNFKSNFDLAEDAKLQLSKDTYDDDLDNLLAQIGDQYADLFLAAKNLSDAILLSDILRVNTEITKAPLSASMIKRYDEHHQDLTLLKALVRQQLPEKYKEIFFDQSKNGYAGYIDGGASQEEFYKFIKPILEKMDGTEELLVKLNREDLLRKQRTFDNGSIPHQIHLGELHAILRRQEDFYPFLKDNREKIEKILTFRIPYYVGPLARGNSRFAWMTRKSEETITPWNFEEVVDKGASAQSFIERMTNFDKNLPNEKVLPKHSLLYEYFTVYNELTKVKYVTEGMRKPAFLSGEQKKAIVDLLFKTNRKVTVKQLKEDYFKKIECFDSVEISGVEDRFNASLGTYHDLLKIIKDKDFLDNEENEDILEDIVLTLTLFEDREMIEERLKTYAHLFDDKVMKQLKRRRYTGWGRLSRKLINGIRDKQSGKTILDFLKSDGFANRNFMQLIHDDSLTFKEDIQKAQVSGQGDSLHEHIANLAGSPAIKKGILQTVKVVDELVKVMGRHKPENIVIEMARENQTTQKGQKNSRERMKRIEEGIKELGSQILKEHPVENTQLQNEKLYLYYLQNGRDMYVDQELDINRLSDYDVDHIVPQSFLKDDSIDNKVLTRSDKARGKSDNVPSEEVVKKMKNYWRQLLNAKLITQRKFDNLTKAERGGLSELDKAGFIKRQLVETRQITKHVAQILDSRMNTKYDENDKLIREVKVITLKSKLVSDFRKDFQFYKVREINNYHHAHDAYLNAVVGTALIKKYPKLESEFVYGDYKVYDVRKMIAKSEQEIGKATAKYFFYSNIMNFFKTEITLANGEIRKRPLIETNGETGEIVWDKGRDFATVRKVLSMPQVNIVKKTEVQTGGFSKESILPKRNSDKLIARKKDWDPKKYGGFDSPTVAYSVLVVAKVEKGKSKKLKSVKELLGITIMERSSFEKNPIDFLEAKGYKEVKKDLIIKLPKYSLFELENGRKRMLASAGELQKGNELALPSKYVNFLYLASHYEKLKGSPEDNEQKQLFVEQHKHYLDEIIEQISEFSKRVILADANLDKVLSAYNKHRDKPIREQAENIIHLFTLTNLGAPAAFKYFDTTIDRKRYTSTKEVLDATLIHQSITGLYETRIDLSQLGGDGGGGGPAPGSSGGGLEHLPPPPEVSQFPLNPERLQALTDLVSRALEAKHIEPYQGPGNNPIFPVKKPNGKWRFIHDLRATNSVTRDLASPSPGPPDLTSPPQGLPHLRTIDLTDAFFQIPLPTIFQPYFAFTLPQPNNYGPGTRYSWRVLPQGFKNSPTLFQQQLSHILTPVRKTFPNSLIIQYMDDILLASPAPGELAALTDKVTNALTKEGLPLSPEKTQATPGPIHFLGQVISQDCITYETLPSINVKSTWSLAELQSMLGELQWVSKGTPVLRSSLHQLYLALRGHRDPRDTIKLTSIQVQALRTIQKALTLNCRSRLVNQLPILALIMLRPTGTTAVLFQTKQKWPLVWLHTPHPATSLRPWGQLLANAVIILDKYSLQHYGQVCKSFHHNISNQALTYYLHTSDQSSVAILLQHSHRFHNLGAQPSGPWRSLLQMPQIFQNIDVLRPPFTISPVVINHAPCLFSDGSASKAAFIIWDRQVIHQQVLSLPSTCSAQAGELFGLLAGLQKSQPWVALNIFLDSKFLIGHLRRMAWGAFPGPSTQCELHTQLLPLLQGKTVYVHHVRSHTLLQDPISRLNEATDALMLAPLLPLAGKRTADGSEFEKRTADGSEFESPKKKAKVE

SEQ ID NO: 1515 - protein, 2007 aa, synthetic construct
MPAAKRVKLDGGDKKYSIGLDIGTNSVGWAVITDEYKVPSKKFKVLGNTDRHSIKKNLIGALLFDSGETAEATRLKRTARRRYTRRKNRICYLQEIFSNEMAKVDDSFFHRLEESFLVEEDKKHERHPIFGNIVDEVAYHEKYPTIYHLRKKLVDSTDKADLRLIYLALAHMIKFRGHFLIEGDLNPDNSDVDKLFIQLVQTYNQLFEENPINASGVDAKAILSARLSKSRRLENLIAQLPGEKKNGLFGNLIALSLGLTPNFKSNFDLAEDAKLQLSKDTYDDDLDNLLAQIGDQYADLFLAAKNLSDAILLSDILRVNTEITKAPLSASMIKRYDEHHQDLTLLKALVRQQLPEKYKEIFFDQSKNGYAGYIDGGASQEEFYKFIKPILEKMDGTEELLVKLNREDLLRKQRTFDNGSIPHQIHLGELHAILRRQEDFYPFLKDNREKIEKILTFRIPYYVGPLARGNSRFAWMTRKSEETITPWNFEEVVDKGASAQSFIERMTNFDKNLPNEKVLPKHSLLYEYFTVYNELTKVKYVTEGMRKPAFLSGEQKKAIVDLLFKTNRKVTVKQLKEDYFKKIECFDSVEISGVEDRFNASLGTYHDLLKIIKDKDFLDNEENEDILEDIVLTLTLFEDREMIEERLKTYAHLFDDKVMKQLKRRRYTGWGRLSRKLINGIRDKQSGKTILDFLKSDGFANRNFMQLIHDDSLTFKEDIQKAQVSGQGDSLHEHIANLAGSPAIKKGILQTVKVVDELVKVMGRHKPENIVIEMARENQTTQKGQKNSRERMKRIEEGIKELGSQILKEHPVENTQLQNEKLYLYYLQNGRDMYVDQELDINRLSDYDVDHIVPQSFLKDDSIDNKVLTRSDKARGKSDNVPSEEVVKKMKNYWRQLLNAKLITQRKFDNLTKAERGGLSELDKAGFIKRQLVETRQITKHVAQILDSRMNTKYDENDKLIREVKVITLKSKLVSDFRKDFQFYKVREINNYHHAHDAYLNAVVGTALIKKYPKLESEFVYGDYKVYDVRKMIAKSEQEIGKATAKYFFYSNIMNFFKTEITLANGEIRKRPLIETNGETGEIVWDKGRDFATVRKVLSMPQVNIVKKTEVQTGGFSKESILPKRNSDKLIARKKDWDPKKYGGFDSPTVAYSVLVVAKVEKGKSKKLKSVKELLGITIMERSSFEKNPIDFLEAKGYKEVKKDLIIKLPKYSLFELENGRKRMLASAGELQKGNELALPSKYVNFLYLASHYEKLKGSPEDNEQKQLFVEQHKHYLDEIIEQISEFSKRVILADANLDKVLSAYNKHRDKPIREQAENIIHLFTLTNLGAPAAFKYFDTTIDRKRYTSTKEVLDATLIHQSITGLYETRIDLSQLGGDGGGSSGGGPAPGGGLEHLPPPPEVSQFPLNPERLQALTDLVSRALEAKHIEPYQGPGNNPIFPVKKPNGKWRFIHDLRATNSVTRDLASPSPGPPDLTSPPQGLPHLRTIDLTDAFFQIPLPTIFQPYFAFTLPQPNNYGPGTRYSWRVLPQGFKNSPTLFQQQLSHILTPVRKTFPNSLIIQYMDDILLASPAPGELAALTDKVTNALTKEGLPLSPEKTQATPGPIHFLGQVISQDCITYETLPSINVKSTWSLAELQSMLGELQWVSKGTPVLRSSLHQLYLALRGHRDPRDTIKLTSIQVQALRTIQKALTLNCRSRLVNQLPILALIMLRPTGTTAVLFQTKQKWPLVWLHTPHPATSLRPWGQLLANAVIILDKYSLQHYGQVCKSFHHNISNQALTYYLHTSDQSSVAILLQHSHRFHNLGAQPSGPWRSLLQMPQIFQNIDVLRPPFTISPVVINHAPCLFSDGSASKAAFIIWDRQVIHQQVLSLPSTCSAQAGELFGLLAGLQKSQPWVALNIFLDSKFLIGHLRRMAWGAFPGPSTQCELHTQLLPLLQGKTVYVHHVRSHTLLQDPISRLNEATDALMLAPLLPLAGKRTADGSEFEKRTADGSEFESPKKKAKVE

SEQ ID NO: 1516 - protein, 2006 aa, synthetic construct
MPAAKRVKLDGGDKKYSIGLDIGTNSVGWAVITDEYKVPSKKFKVLGNTDRHSIKKNLIGALLFDSGETAEATRLKRTARRRYTRRKNRICYLQEIFSNEMAKVDDSFFHRLEESFLVEEDKKHERHPIFGNIVDEVAYHEKYPTIYHLRKKLVDSTDKADLRLIYLALAHMIKFRGHFLIEGDLNPDNSDVDKLFIQLVQTYNQLFEENPINASGVDAKAILSARLSKSRRLENLIAQLPGEKKNGLFGNLIALSLGLTPNFKSNFDLAEDAKLQLSKDTYDDDLDNLLAQIGDQYADLFLAAKNLSDAILLSDILRVNTEITKAPLSASMIKRYDEHHQDLTLLKALVRQQLPEKYKEIFFDQSKNGYAGYIDGGASQEEFYKFIKPILEKMDGTEELLVKLNREDLLRKQRTFDNGSIPHQIHLGELHAILRRQEDFYPFLKDNREKIEKILTFRIPYYVGPLARGNSRFAWMTRKSEETITPWNFEEVVDKGASAQSFIERMTNFDKNLPNEKVLPKHSLLYEYFTVYNELTKVKYVTEGMRKPAFLSGEQKKAIVDLLFKTNRKVTVKQLKEDYFKKIECFDSVEISGVEDRFNASLGTYHDLLKIIKDKDFLDNEENEDILEDIVLTLTLFEDREMIEERLKTYAHLFDDKVMKQLKRRRYTGWGRLSRKLINGIRDKQSGKTILDFLKSDGFANRNFMQLIHDDSLTFKEDIQKAQVSGQGDSLHEHIANLAGSPAIKKGILQTVKVVDELVKVMGRHKPENIVIEMARENQTTQKGQKNSRERMKRIEEGIKELGSQILKEHPVENTQLQNEKLYLYYLQNGRDMYVDQELDINRLSDYDVDHIVPQSFLKDDSIDNKVLTRSDKARGKSDNVPSEEVVKKMKNYWRQLLNAKLITQRKFDNLTKAERGGLSELDKAGFIKRQLVETRQITKHVAQILDSRMNTKYDENDKLIREVKVITLKSKLVSDFRKDFQFYKVREINNYHHAHDAYLNAVVGTALIKKYPKLESEFVYGDYKVYDVRKMIAKSEQEIGKATAKYFFYSNIMNFFKTEITLANGEIRKRPLIETNGETGEIVWDKGRDFATVRKVLSMPQVNIVKKTEVQTGGFSKESILPKRNSDKLIARKKDWDPKKYGGFDSPTVAYSVLVVAKVEKGKSKKLKSVKELLGITIMERSSFEKNPIDFLEAKGYKEVKKDLIIKLPKYSLFELENGRKRMLASAGELQKGNELALPSKYVNFLYLASHYEKLKGSPEDNEQKQLFVEQHKHYLDEIIEQISEFSKRVILADANLDKVLSAYNKHRDKPIREQAENIIHLFTLTNLGAPAAFKYFDTTIDRKRYTSTKEVLDATLIHQSITGLYETRIDLSQLGGDGGGGSEAAAKGGGLEHLPPPPEVSQFPLNPERLQALTDLVSRALEAKHIEPYQGPGNNPIFPVKKPNGKWRFIHDLRATNSVTRDLASPSPGPPDLTSPPQGLPHLRTIDLTDAFFQIPLPTIFQPYFAFTLPQPNNYGPGTRYSWRVLPQGFKNSPTLFQQQLSHILTPVRKTFPNSLIIQYMDDILLASPAPGELAALTDKVTNALTKEGLPLSPEKTQATPGPIHFLGQVISQDCITYETLPSINVKSTWSLAELQSMLGELQWVSKGTPVLRSSLHQLYLALRGHRDPRDTIKLTSIQVQALRTIQKALTLNCRSRLVNQLPILALIMLRPTGTTAVLFQTKQKWPLVWLHTPHPATSLRPWGQLLANAVIILDKYSLQHYGQVCKSFHHNISNQALTYYLHTSDQSSVAILLQHSHRFHNLGAQPSGPWRSLLQMPQIFQNIDVLRPPFTISPVVINHAPCLFSDGSASKAAFIIWDRQVIHQQVLSLPSTCSAQAGELFGLLAGLQKSQPWVALNIFLDSKFLIGHLRRMAWGAFPGPSTQCELHTQLLPLLQGKTVYVHHVRSHTLLQDPISRLNEATDALMLAPLLPLAGKRTADGSEFEKRTADGSEFESPKKKAKVE

SEQ ID NO: 1517 - protein, 2009 aa, synthetic construct
MPAAKRVKLDGGDKKYSIGLDIGTNSVGWAVITDEYKVPSKKFKVLGNTDRHSIKKNLIGALLFDSGETAEATRLKRTARRRYTRRKNRICYLQEIFSNEMAKVDDSFFHRLEESFLVEEDKKHERHPIFGNIVDEVAYHEKYPTIYHLRKKLVDSTDKADLRLIYLALAHMIKFRGHFLIEGDLNPDNSDVDKLFIQLVQTYNQLFEENPINASGVDAKAILSARLSKSRRLENLIAQLPGEKKNGLFGNLIALSLGLTPNFKSNFDLAEDAKLQLSKDTYDDDLDNLLAQIGDQYADLFLAAKNLSDAILLSDILRVNTEITKAPLSASMIKRYDEHHQDLTLLKALVRQQLPEKYKEIFFDQSKNGYAGYIDGGASQEEFYKFIKPILEKMDGTEELLVKLNREDLLRKQRTFDNGSIPHQIHLGELHAILRRQEDFYPFLKDNREKIEKILTFRIPYYVGPLARGNSRFAWMTRKSEETITPWNFEEVVDKGASAQSFIERMTNFDKNLPNEKVLPKHSLLYEYFTVYNELTKVKYVTEGMRKPAFLSGEQKKAIVDLLFKTNRKVTVKQLKEDYFKKIECFDSVEISGVEDRFNASLGTYHDLLKIIKDKDFLDNEENEDILEDIVLTLTLFEDREMIEERLKTYAHLFDDKVMKQLKRRRYTGWGRLSRKLINGIRDKQSGKTILDFLKSDGFANRNFMQLIHDDSLTFKEDIQKAQVSGQGDSLHEHIANLAGSPAIKKGILQTVKVVDELVKVMGRHKPENIVIEMARENQTTQKGQKNSRERMKRIEEGIKELGSQILKEHPVENTQLQNEKLYLYYLQNGRDMYVDQELDINRLSDYDVDHIVPQSFLKDDSIDNKVLTRSDKARGKSDNVPSEEVVKKMKNYWRQLLNAKLITQRKFDNLTKAERGGLSELDKAGFIKRQLVETRQITKHVAQILDSRMNTKYDENDKLIREVKVITLKSKLVSDFRKDFQFYKVREINNYHHAHDAYLNAVVGTALIKKYPKLESEFVYGDYKVYDVRKMIAKSEQEIGKATAKYFFYSNIMNFFKTEITLANGEIRKRPLIETNGETGEIVWDKGRDFATVRKVLSMPQVNIVKKTEVQTGGFSKESILPKRNSDKLIARKKDWDPKKYGGFDSPTVAYSVLVVAKVEKGKSKKLKSVKELLGITIMERSSFEKNPIDFLEAKGYKEVKKDLIIKLPKYSLFELENGRKRMLASAGELQKGNELALPSKYVNFLYLASHYEKLKGSPEDNEQKQLFVEQHKHYLDEIIEQISEFSKRVILADANLDKVLSAYNKHRDKPIREQAENIIHLFTLTNLGAPAAFKYFDTTIDRKRYTSTKEVLDATLIHQSITGLYETRIDLSQLGGDGGPAPEAAAKGSSGGGLEHLPPPPEVSQFPLNPERLQALTDLVSRALEAKHIEPYQGPGNNPIFPVKKPNGKWRFIHDLRATNSVTRDLASPSPGPPDLTSPPQGLPHLRTIDLTDAFFQIPLPTIFQPYFAFTLPQPNNYGPGTRYSWRVLPQGFKNSPTLFQQQLSHILTPVRKTFPNSLIIQYMDDILLASPAPGELAALTDKVTNALTKEGLPLSPEKTQATPGPIHFLGQVISQDCITYETLPSINVKSTWSLAELQSMLGELQWVSKGTPVLRSSLHQLYLALRGHRDPRDTIKLTSIQVQALRTIQKALTLNCRSRLVNQLPILALIMLRPTGTTAVLFQTKQKWPLVWLHTPHPATSLRPWGQLLANAVIILDKYSLQHYGQVCKSFHHNISNQALTYYLHTSDQSSVAILLQHSHRFHNLGAQPSGPWRSLLQMPQIFQNIDVLRPPFTISPVVINHAPCLFSDGSASKAAFIIWDRQVIHQQVLSLPSTCSAQAGELFGLLAGLQKSQPWVALNIFLDSKFLIGHLRRMAWGAFPGPSTQCELHTQLLPLLQGKTVYVHHVRSHTLLQDPISRLNEATDALMLAPLLPLAGKRTADGSEFEKRTADGSEFESPKKKAKVE

SEQ ID NO: 1518 - protein, 2007 aa, synthetic construct
MPAAKRVKLDGGDKKYSIGLDIGTNSVGWAVITDEYKVPSKKFKVLGNTDRHSIKKNLIGALLFDSGETAEATRLKRTARRRYTRRKNRICYLQEIFSNEMAKVDDSFFHRLEESFLVEEDKKHERHPIFGNIVDEVAYHEKYPTIYHLRKKLVDSTDKADLRLIYLALAHMIKFRGHFLIEGDLNPDNSDVDKLFIQLVQTYNQLFEENPINASGVDAKAILSARLSKSRRLENLIAQLPGEKKNGLFGNLIALSLGLTPNFKSNFDLAEDAKLQLSKDTYDDDLDNLLAQIGDQYADLFLAAKNLSDAILLSDILRVNTEITKAPLSASMIKRYDEHHQDLTLLKALVRQQLPEKYKEIFFDQSKNGYAGYIDGGASQEEFYKFIKPILEKMDGTEELLVKLNREDLLRKQRTFDNGSIPHQIHLGELHAILRRQEDFYPFLKDNREKIEKILTFRIPYYVGPLARGNSRFAWMTRKSEETITPWNFEEVVDKGASAQSFIERMTNFDKNLPNEKVLPKHSLLYEYFTVYNELTKVKYVTEGMRKPAFLSGEQKKAIVDLLFKTNRKVTVKQLKEDYFKKIECFDSVEISGVEDRFNASLGTYHDLLKIIKDKDFLDNEENEDILEDIVLTLTLFEDREMIEERLKTYAHLFDDKVMKQLKRRRYTGWGRLSRKLINGIRDKQSGKTILDFLKSDGFANRNFMQLIHDDSLTFKEDIQKAQVSGQGDSLHEHIANLAGSPAIKKGILQTVKVVDELVKVMGRHKPENIVIEMARENQTTQKGQKNSRERMKRIEEGIKELGSQILKEHPVENTQLQNEKLYLYYLQNGRDMYVDQELDINRLSDYDVDHIVPQSFLKDDSIDNKVLTRSDKARGKSDNVPSEEVVKKMKNYWRQLLNAKLITQRKFDNLTKAERGGLSELDKAGFIKRQLVETRQITKHVAQILDSRMNTKYDENDKLIREVKVITLKSKLVSDFRKDFQFYKVREINNYHHAHDAYLNAVVGTALIKKYPKLESEFVYGDYKVYDVRKMIAKSEQEIGKATAKYFFYSNIMNFFKTEITLANGEIRKRPLIETNGETGEIVWDKGRDFATVRKVLSMPQVNIVKKTEVQTGGFSKESILPKRNSDKLIARKKDWDPKKYGGFDSPTVAYSVLVVAKVEKGKSKKLKSVKELLGITIMERSSFEKNPIDFLEAKGYKEVKKDLIIKLPKYSLFELENGRKRMLASAGELQKGNELALPSKYVNFLYLASHYEKLKGSPEDNEQKQLFVEQHKHYLDEIIEQISEFSKRVILADANLDKVLSAYNKHRDKPIREQAENIIHLFTLTNLGAPAAFKYFDTTIDRKRYTSTKEVLDATLIHQSITGLYETRIDLSQLGGDGGGGGGSSGGSGGGLEHLPPPPEVSQFPLNPERLQALTDLVSRALEAKHIEPYQGPGNNPIFPVKKPNGKWRFIHDLRATNSLTRDLASPSPGPPDLTSLPQDLPHLRTIDLTDAFFQIPLPAVFQPYFAFTLPQPNNHGPGTRYSWRVLPQGFKNSPTLFEQQLSHILAPVRKAFPNSLIIQYMDDILLASPALRELTALTDKVTNALTKEGLPMSLEKTQATPGSIHFLGQVISPDCITYETLPSIHVKSIWSLAELQSMLGELQWVSKGTPVLRSSLHQLYLALRGHRDPRDTIELTSTQVQALKTIQKALALNCRSRLVSQLPILALIILRPTGTTAVLFQTKQKWPLVWLHTPHPATSLRPWGQLLANAIITLDKYSLQHYGQICKSFHHNISNQALTYYLHTSDQSSVAILLQHSHRFHNLGAQPSGPWRSLLQVPQIFQNIDVLRPPFIISPVVIDHAPCLFSDGATSKAAFILWDKQVIHQQVLPLPSTCSAQAGELFGLLAGLQKSKPWPALNIFLDSKFLIGHLRRMALGAFLGPSTQCDLHARLFPLLQGKTVYVHHVRSHTLLQDPISRLNEATDALMLAPLLPLAGKRTADGSEFEKRTADGSEFESPKKKAKVE

SEQ ID NO: 1519 - protein, 2007 aa, synthetic construct
MPAAKRVKLDGGDKKYSIGLDIGTNSVGWAVITDEYKVPSKKFKVLGNTDRHSIKKNLIGALLFDSGETAEATRLKRTARRRYTRRKNRICYLQEIFSNEMAKVDDSFFHRLEESFLVEEDKKHERHPIFGNIVDEVAYHEKYPTIYHLRKKLVDSTDKADLRLIYLALAHMIKFRGHFLIEGDLNPDNSDVDKLFIQLVQTYNQLFEENPINASGVDAKAILSARLSKSRRLENLIAQLPGEKKNGLFGNLIALSLGLTPNFKSNFDLAEDAKLQLSKDTYDDDLDNLLAQIGDQYADLFLAAKNLSDAILLSDILRVNTEITKAPLSASMIKRYDEHHQDLTLLKALVRQQLPEKYKEIFFDQSKNGYAGYIDGGASQEEFYKFIKPILEKMDGTEELLVKLNREDLLRKQRTFDNGSIPHQIHLGELHAILRRQEDFYPFLKDNREKIEKILTFRIPYYVGPLARGNSRFAWMTRKSEETITPWNFEEVVDKGASAQSFIERMTNFDKNLPNEKVLPKHSLLYEYFTVYNELTKVKYVTEGMRKPAFLSGEQKKAIVDLLFKTNRKVTVKQLKEDYFKKIECFDSVEISGVEDRFNASLGTYHDLLKIIKDKDFLDNEENEDILEDIVLTLTLFEDREMIEERLKTYAHLFDDKVMKQLKRRRYTGWGRLSRKLINGIRDKQSGKTILDFLKSDGFANRNFMQLIHDDSLTFKEDIQKAQVSGQGDSLHEHIANLAGSPAIKKGILQTVKVVDELVKVMGRHKPENIVIEMARENQTTQKGQKNSRERMKRIEEGIKELGSQILKEHPVENTQLQNEKLYLYYLQNGRDMYVDQELDINRLSDYDVDHIVPQSFLKDDSIDNKVLTRSDKARGKSDNVPSEEVVKKMKNYWRQLLNAKLITQRKFDNLTKAERGGLSELDKAGFIKRQLVETRQITKHVAQILDSRMNTKYDENDKLIREVKVITLKSKLVSDFRKDFQFYKVREINNYHHAHDAYLNAVVGTALIKKYPKLESEFVYGDYKVYDVRKMIAKSEQEIGKATAKYFFYSNIMNFFKTEITLANGEIRKRPLIETNGETGEIVWDKGRDFATVRKVLSMPQVNIVKKTEVQTGGFSKESILPKRNSDKLIARKKDWDPKKYGGFDSPTVAYSVLVVAKVEKGKSKKLKSVKELLGITIMERSSFEKNPIDFLEAKGYKEVKKDLIIKLPKYSLFELENGRKRMLASAGELQKGNELALPSKYVNFLYLASHYEKLKGSPEDNEQKQLFVEQHKHYLDEIIEQISEFSKRVILADANLDKVLSAYNKHRDKPIREQAENIIHLFTLTNLGAPAAFKYFDTTIDRKRYTSTKEVLDATLIHQSITGLYETRIDLSQLGGDGGGGGGSSPAPGGGLEHLPPPPEVSQFPLNPERLQALTDLVSRALEAKHIEPYQGPGNNPIFPVKKPNGKWRFIHDLRATNSLTRDLASPSPGPPDLTSLPQDLPHLRTIDLTDAFFQIPLPAVFQPYFAFTLPQPNNHGPGTRYSWRVLPQGFKNSPTLFQQQLSHILAPVRKAFPNSLIIQYMDDILLASPALRELTALTDKVTNALTKEGLPMSLEKTQATPGSIHFLGQVISPDCITYETLPSIHVKSIWSLAELQSMLGELQWVSKGTPVLRSSLHQLYLALRGHRDPRDTIELTSTQVQALKTIQKALALNCRSRLVSQLPILALIILRPTGTTAVLFQTKQKWPLVWLHTPHPATSLRPWGQLLANAIITLDKYSLQHYGQICKSFHHNISNQALTYYLHTSDQSSVAILLQHSHRFHNLGAQPSGPWRSLLQVPQIFQNIDVLRPPFIISPVVIDHAPCLFSDGATSKAAFILWDKQVIHQQVLPLPSTCSAQAGELFGLLAGLQKSKPWPALNIFLDSKFLIGHLRRMAWGAFLGPSTQCDLHARLFPLLQGKTVYVHHVRSHTLLQDPISRLNEATDALMLAPLLPLAGKRTADGSEFEKRTADGSEFESPKKKAKVE

SEQ ID NO: 1520 - protein, 2009 aa, synthetic construct
MPAAKRVKLDGGDKKYSIGLDIGTNSVGWAVITDEYKVPSKKFKVLGNTDRHSIKKNLIGALLFDSGETAEATRLKRTARRRYTRRKNRICYLQEIFSNEMAKVDDSFFHRLEESFLVEEDKKHERHPIFGNIVDEVAYHEKYPTIYHLRKKLVDSTDKADLRLIYLALAHMIKFRGHFLIEGDLNPDNSDVDKLFIQLVQTYNQLFEENPINASGVDAKAILSARLSKSRRLENLIAQLPGEKKNGLFGNLIALSLGLTPNFKSNFDLAEDAKLQLSKDTYDDDLDNLLAQIGDQYADLFLAAKNLSDAILLSDILRVNTEITKAPLSASMIKRYDEHHQDLTLLKALVRQQLPEKYKEIFFDQSKNGYAGYIDGGASQEEFYKFIKPILEKMDGTEELLVKLNREDLLRKQRTFDNGSIPHQIHLGELHAILRRQEDFYPFLKDNREKIEKILTFRIPYYVGPLARGNSRFAWMTRKSEETITPWNFEEVVDKGASAQSFIERMTNFDKNLPNEKVLPKHSLLYEYFTVYNELTKVKYVTEGMRKPAFLSGEQKKAIVDLLFKTNRKVTVKQLKEDYFKKIECFDSVEISGVEDRFNASLGTYHDLLKIIKDKDFLDNEENEDILEDIVLTLTLFEDREMIEERLKTYAHLFDDKVMKQLKRRRYTGWGRLSRKLINGIRDKQSGKTILDFLKSDGFANRNFMQLIHDDSLTFKEDIQKAQVSGQGDSLHEHIANLAGSPAIKKGILQTVKVVDELVKVMGRHKPENIVIEMARENQTTQKGQKNSRERMKRIEEGIKELGSQILKEHPVENTQLQNEKLYLYYLQNGRDMYVDQELDINRLSDYDVDHIVPQSFLKDDSIDNKVLTRSDKARGKSDNVPSEEVVKKMKNYWRQLLNAKLITQRKFDNLTKAERGGLSELDKAGFIKRQLVETRQITKHVAQILDSRMNTKYDENDKLIREVKVITLKSKLVSDFRKDFQFYKVREINNYHHAHDAYLNAVVGTALIKKYPKLESEFVYGDYKVYDVRKMIAKSEQEIGKATAKYFFYSNIMNFFKTEITLANGEIRKRPLIETNGETGEIVWDKGRDFATVRKVLSMPQVNIVKKTEVQTGGFSKESILPKRNSDKLIARKKDWDPKKYGGFDSPTVAYSVLVVAKVEKGKSKKLKSVKELLGITIMERSSFEKNPIDFLEAKGYKEVKKDLIIKLPKYSLFELENGRKRMLASAGELQKGNELALPSKYVNFLYLASHYEKLKGSPEDNEQKQLFVEQHKHYLDEIIEQISEFSKRVILADANLDKVLSAYNKHRDKPIREQAENIIHLFTLTNLGAPAAFKYFDTTIDRKRYTSTKEVLDATLIHQSITGLYETRIDLSQLGGDGGPAPEAAAKGGGGGGLEHLPPPPEVSQFPLNPERLQALTDLVSRALEAKHIEPYQGPGNNPIFPVKKPNGKWRFIHDLRATNSLTRDLASPSPGPPDLTSLPQDLPHLRTIDLTDAFFQIPLPAVFQPYFAFTLPQPNNHGPGTRYSWRVLPQGFKNSPTLFQQQLSHILAPVRKAFPNSLIIQYMDDILLASPALRELTALTDKVTNALTKEGLPMSLEKTQATPGSIHFLGQVISPDCITYETLPSIHVKSIWSLAELQSMLGELQWVSKGTPVLRSSLHQLYLALRGHRDPRDTIELTSTQVQALKTIQKALALNCRSRLVSQLPILALIILRPTGTTAVLFQTKQKWPLVWLHTPHPATSLRPWGQLLANAIITLDKYSLQHYGQICKSFHHNISNQALTYYLHTSDQSSVAILLQHSHRFHNLGAQPSGPWRSLLQVPQIFQNIDVLRPPFIISPVVIDHAPCLFSDGATSKAAFILWDKQVIHQQVLPLPSTCSAQAGELFGLLAGLQKSKPWPALNIFLDSKFLIGHLRRMAWGAFLGPSTQCDLHARLFPLLQGKTVYVHHVRSHTLLQDPISRLNEATDALMLAPLLPLAGKRTADGSEFEKRTADGSEFESPKKKAKVE

SEQ ID NO: 1521 - protein, 2023 aa, synthetic construct
MPAAKRVKLDGGDKKYSIGLDIGTNSVGWAVITDEYKVPSKKFKVLGNTDRHSIKKNLIGALLFDSGETAEATRLKRTARRRYTRRKNRICYLQEIFSNEMAKVDDSFFHRLEESFLVEEDKKHERHPIFGNIVDEVAYHEKYPTIYHLRKKLVDSTDKADLRLIYLALAHMIKFRGHFLIEGDLNPDNSDVDKLFIQLVQTYNQLFEENPINASGVDAKAILSARLSKSRRLENLIAQLPGEKKNGLFGNLIALSLGLTPNFKSNFDLAEDAKLQLSKDTYDDDLDNLLAQIGDQYADLFLAAKNLSDAILLSDILRVNTEITKAPLSASMIKRYDEHHQDLTLLKALVRQQLPEKYKEIFFDQSKNGYAGYIDGGASQEEFYKFIKPILEKMDGTEELLVKLNREDLLRKQRTFDNGSIPHQIHLGELHAILRRQEDFYPFLKDNREKIEKILTFRIPYYVGPLARGNSRFAWMTRKSEETITPWNFEEVVDKGASAQSFIERMTNFDKNLPNEKVLPKHSLLYEYFTVYNELTKVKYVTEGMRKPAFLSGEQKKAIVDLLFKTNRKVTVKQLKEDYFKKIECFDSVEISGVEDRFNASLGTYHDLLKIIKDKDFLDNEENEDILEDIVLTLTLFEDREMIEERLKTYAHLFDDKVMKQLKRRRYTGWGRLSRKLINGIRDKQSGKTILDFLKSDGFANRNFMQLIHDDSLTFKEDIQKAQVSGQGDSLHEHIANLAGSPAIKKGILQTVKVVDELVKVMGRHKPENIVIEMARENQTTQKGQKNSRERMKRIEEGIKELGSQILKEHPVENTQLQNEKLYLYYLQNGRDMYVDQELDINRLSDYDVDHIVPQSFLKDDSIDNKVLTRSDKARGKSDNVPSEEVVKKMKNYWRQLLNAKLITQRKFDNLTKAERGGLSELDKAGFIKRQLVETRQITKHVAQILDSRMNTKYDENDKLIREVKVITLKSKLVSDFRKDFQFYKVREINNYHHAHDAYLNAVVGTALIKKYPKLESEFVYGDYKVYDVRKMIAKSEQEIGKATAKYFFYSNIMNFFKTEITLANGEIRKRPLIETNGETGEIVWDKGRDFATVRKVLSMPQVNIVKKTEVQTGGFSKESILPKRNSDKLIARKKDWDPKKYGGFDSPTVAYSVLVVAKVEKGKSKKLKSVKELLGITIMERSSFEKNPIDFLEAKGYKEVKKDLIIKLPKYSLFELENGRKRMLASAGELQKGNELALPSKYVNFLYLASHYEKLKGSPEDNEQKQLFVEQHKHYLDEIIEQISEFSKRVILADANLDKVLSAYNKHRDKPIREQAENIIHLFTLTNLGAPAAFKYFDTTIDRKRYTSTKEVLDATLIHQSITGLYETRIDLSQLGGDGGGGGGSGGGGSGGGGSGGGGSGGGGSGGGLEHLPPPPEVSQFPLNPERLQALTDLVSRALEAKHIEPYQGPGNNPIFPVKKPNGKWRFIHDLRATNSLTRDLASPSPGPPDLTSLPQDLPHLRTIDLTDAFFQIPLPAVFQPYFAFTLPQPNNHGPGTRYSWRVLPQGFKNSPTLFQQQLSHILAPVRKAFPNSLIIQYMDDILLASPALRELTALTDKVTNALTKEGLPMSLEKTQATPGSIHFLGQVISPDCITYETLPSIHVKSIWSLAELQSMLGELQWVSKGTPVLRSSLHQLYLALRGHRDPRDTIELTSTQVQALKTIQKALALNCRSRLVSQLPILALIILRPTGTTAVLFQTKQKWPLVWLHTPHPATSLRPWGQLLANAIITLDKYSLQHYGQICKSFHHNISNQALTYYLHTSDQSSVAILLQHSHRFHNLGAQPSGPWRSLLQVPQIFQNIDVLRPPFIISPVVIDHAPCLFSDGATSKAAFILWDKQVIHQQVLPLPSTCSAQAGELFGLLAGLQKSKPWPALNIFLDSKFLIGHLRRMAWGAFLGPSTQCDLHARLFPLLQGKTVYVHHVRSHTLLQDPISRLNEATDALMLAPLLPLAGKRTADGSEFEKRTADGSEFESPKKKAKVE

SEQ ID NO: 1522 - protein, 2006 aa, synthetic construct
MPAAKRVKLDGGDKKYSIGLDIGTNSVGWAVITDEYKVPSKKFKVLGNTDRHSIKKNLIGALLFDSGETAEATRLKRTARRRYTRRKNRICYLQEIFSNEMAKVDDSFFHRLEESFLVEEDKKHERHPIFGNIVDEVAYHEKYPTIYHLRKKLVDSTDKADLRLIYLALAHMIKFRGHFLIEGDLNPDNSDVDKLFIQLVQTYNQLFEENPINASGVDAKAILSARLSKSRRLENLIAQLPGEKKNGLFGNLIALSLGLTPNFKSNFDLAEDAKLQLSKDTYDDDLDNLLAQIGDQYADLFLAAKNLSDAILLSDILRVNTEITKAPLSASMIKRYDEHHQDLTLLKALVRQQLPEKYKEIFFDQSKNGYAGYIDGGASQEEFYKFIKPILEKMDGTEELLVKLNREDLLRKQRTFDNGSIPHQIHLGELHAILRRQEDFYPFLKDNREKIEKILTFRIPYYVGPLARGNSRFAWMTRKSEETITPWNFEEVVDKGASAQSFIERMTNFDKNLPNEKVLPKHSLLYEYFTVYNELTKVKYVTEGMRKPAFLSGEQKKAIVDLLFKTNRKVTVKQLKEDYFKKIECFDSVEISGVEDRFNASLGTYHDLLKIIKDKDFLDNEENEDILEDIVLTLTLFEDREMIEERLKTYAHLFDDKVMKQLKRRRYTGWGRLSRKLINGIRDKQSGKTILDFLKSDGFANRNFMQLIHDDSLTFKEDIQKAQVSGQGDSLHEHIANLAGSPAIKKGILQTVKVVDELVKVMGRHKPENIVIEMARENQTTQKGQKNSRERMKRIEEGIKELGSQILKEHPVENTQLQNEKLYLYYLQNGRDMYVDQELDINRLSDYDVDHIVPQSFLKDDSIDNKVLTRSDKARGKSDNVPSEEVVKKMKNYWRQLLNAKLITQRKFDNLTKAERGGLSELDKAGFIKRQLVETRQITKHVAQILDSRMNTKYDENDKLIREVKVITLKSKLVSDFRKDFQFYKVREINNYHHAHDAYLNAVVGTALIKKYPKLESEFVYGDYKVYDVRKMIAKSEQEIGKATAKYFFYSNIMNFFKTEITLANGEIRKRPLIETNGETGEIVWDKGRDFATVRKVLSMPQVNIVKKTEVQTGGFSKESILPKRNSDKLIARKKDWDPKKYGGFDSPTVAYSVLVVAKVEKGKSKKLKSVKELLGITIMERSSFEKNPIDFLEAKGYKEVKKDLIIKLPKYSLFELENGRKRMLASAGELQKGNELALPSKYVNFLYLASHYEKLKGSPEDNEQKQLFVEQHKHYLDEIIEQISEFSKRVILADANLDKVLSAYNKHRDKPIREQAENIIHLFTLTNLGAPAAFKYFDTTIDRKRYTSTKEVLDATLIHQSITGLYETRIDLSQLGGDGGEAAAKGGSGGGLEHLPPPPEVSQFPLNPERLQALTDLVSRALEAKHIEPYQGPGNNPIFPVKKPNGKWRFIHDLRATNSLTRDLASPSPGPPDLTSLPQDLPHLRTIDLTDAFFQIPLPAVFQPYFAFTLPQPNNHGPGTRYSWRVLPQGFKNSPTLFQQQLSHILAPVRKAFPNSLIIQYMDDILLASPALRELTALTDKVTNALTKEGLPMSLEKTQATPGSIHFLGQVISPDCITYETLPSIHVKSIWSLAELQSMLGELQWVSKGTPVLRSSLHQLYLALRGHRDPRDTIELTSTQVQALKTIQKALALNCRSRLVSQLPILALIILRPTGTTAVLFQTKQKWPLVWLHTPHPATSLRPWGQLLANAIITLDKYSLQHYGQICKSFHHNISNQALTYYLHTSDQSSVAILLQHSHRFHNLGAQPSGPWRSLLQVPQIFQNIDVLRPPFIISPVVIDHAPCLFSDGATSKAAFILWDKQVIHQQVLPLPSTCSAQAGELFGLLAGLQKSKPWPALNIFLDSKFLIGHLRRMAWGAFLGPSTQCDLHARLFPLLQGKTVYVHHVRSHTLLQDPISRLNEATDALMLAPLLPLAGKRTADGSEFEKRTADGSEFESPKKKAKVE

SEQ ID NO: 1523 - protein, 2007 aa, synthetic construct
MPAAKRVKLDGGDKKYSIGLDIGTNSVGWAVITDEYKVPSKKFKVLGNTDRHSIKKNLIGALLFDSGETAEATRLKRTARRRYTRRKNRICYLQEIFSNEMAKVDDSFFHRLEESFLVEEDKKHERHPIFGNIVDEVAYHEKYPTIYHLRKKLVDSTDKADLRLIYLALAHMIKFRGHFLIEGDLNPDNSDVDKLFIQLVQTYNQLFEENPINASGVDAKAILSARLSKSRRLENLIAQLPGEKKNGLFGNLIALSLGLTPNFKSNFDLAEDAKLQLSKDTYDDDLDNLLAQIGDQYADLFLAAKNLSDAILLSDILRVNTEITKAPLSASMIKRYDEHHQDLTLLKALVRQQLPEKYKEIFFDQSKNGYAGYIDGGASQEEFYKFIKPILEKMDGTEELLVKLNREDLLRKQRTFDNGSIPHQIHLGELHAILRRQEDFYPFLKDNREKIEKILTFRIPYYVGPLARGNSRFAWMTRKSEETITPWNFEEVVDKGASAQSFIERMTNFDKNLPNEKVLPKHSLLYEYFTVYNELTKVKYVTEGMRKPAFLSGEQKKAIVDLLFKTNRKVTVKQLKEDYFKKIECFDSVEISGVEDRFNASLGTYHDLLKIIKDKDFLDNEENEDILEDIVLTLTLFEDREMIEERLKTYAHLFDDKVMKQLKRRRYTGWGRLSRKLINGIRDKQSGKTILDFLKSDGFANRNFMQLIHDDSLTFKEDIQKAQVSGQGDSLHEHIANLAGSPAIKKGILQTVKVVDELVKVMGRHKPENIVIEMARENQTTQKGQKNSRERMKRIEEGIKELGSQILKEHPVENTQLQNEKLYLYYLQNGRDMYVDQELDINRLSDYDVDHIVPQSFLKDDSIDNKVLTRSDKARGKSDNVPSEEVVKKMKNYWRQLLNAKLITQRKFDNLTKAERGGLSELDKAGFIKRQLVETRQITKHVAQILDSRMNTKYDENDKLIREVKVITLKSKLVSDFRKDFQFYKVREINNYHHAHDAYLNAVVGTALIKKYPKLESEFVYGDYKVYDVRKMIAKSEQEIGKATAKYFFYSNIMNFFKTEITLANGEIRKRPLIETNGETGEIVWDKGRDFATVRKVLSMPQVNIVKKTEVQTGGFSKESILPKRNSDKLIARKKDWDPKKYGGFDSPTVAYSVLVVAKVEKGKSKKLKSVKELLGITIMERSSFEKNPIDFLEAKGYKEVKKDLIIKLPKYSLFELENGRKRMLASAGELQKGNELALPSKYVNFLYLASHYEKLKGSPEDNEQKQLFVEQHKHYLDEIIEQISEFSKRVILADANLDKVLSAYNKHRDKPIREQAENIIHLFTLTNLGAPAAFKYFDTTIDRKRYTSTKEVLDATLIHQSITGLYETRIDLSQLGGDGGGGGGSSGGSGGGLEHLPPPPEVSQFPLNPERLQALTDLVSRALEAKHIEPYQGPGNNPIFPVKKPNGKWRFIHDLRATNSLTRDLASPSPGPPDLTSLPQDLPHLRTIDLTDAFFQIPLPAVFQPYFAFTLPQPNNHGPGTRYSWRVLPQGFKNSPTLFQQQLSHILAPVRKAFPNSLIIQYMDDILLASPALRELTALTDKVTNALTKEGLPMSLEKTQATPGSIHFLGQVISPDCITYETLPSIHVKSIWSLAELQSMLGELQWVSKGTPVLRSSLHQLYLALRGHRDPRDTIELTSTQVQALKTIQKALALNCRSRLVSQLPILALIILRPTGTTAVLFQTKQKWPLVWLHTPHPATSLRPWGQLLANAIITLDKYSLQHYGQICKSFHHNISNQALTYYLHTSDQSSVAILLQHSHRFHNLGAQPSGPWRSLLQVPQIFQNIDVLRPPFIISPVVIDHAPCLFSDGATSKAAFILWDKQVIHQQVLPLPSTCSAQAGELFGLLAGLQKSKPWPALNIFLDSKFLIGHLRRMAWGAFLGPSTQCDLHARLFPLLQGKTVYVHHVRSHTLLQDPISRLNEATDALMLAPLLPLAGKRTADGSEFEKRTADGSEFESPKKKAKVE

SEQ ID NO: 1524 - protein, 2009 aa, synthetic construct
MPAAKRVKLDGGDKKYSIGLDIGTNSVGWAVITDEYKVPSKKFKVLGNTDRHSIKKNLIGALLFDSGETAEATRLKRTARRRYTRRKNRICYLQEIFSNEMAKVDDSFFHRLEESFLVEEDKKHERHPIFGNIVDEVAYHEKYPTIYHLRKKLVDSTDKADLRLIYLALAHMIKFRGHFLIEGDLNPDNSDVDKLFIQLVQTYNQLFEENPINASGVDAKAILSARLSKSRRLENLIAQLPGEKKNGLFGNLIALSLGLTPNFKSNFDLAEDAKLQLSKDTYDDDLDNLLAQIGDQYADLFLAAKNLSDAILLSDILRVNTEITKAPLSASMIKRYDEHHQDLTLLKALVRQQLPEKYKEIFFDQSKNGYAGYIDGGASQEEFYKFIKPILEKMDGTEELLVKLNREDLLRKQRTFDNGSIPHQIHLGELHAILRRQEDFYPFLKDNREKIEKILTFRIPYYVGPLARGNSRFAWMTRKSEETITPWNFEEVVDKGASAQSFIERMTNFDKNLPNEKVLPKHSLLYEYFTVYNELTKVKYVTEGMRKPAFLSGEQKKAIVDLLFKTNRKVTVKQLKEDYFKKIECFDSVEISGVEDRFNASLGTYHDLLKIIKDKDFLDNEENEDILEDIVLTLTLFEDREMIEERLKTYAHLFDDKVMKQLKRRRYTGWGRLSRKLINGIRDKQSGKTILDFLKSDGFANRNFMQLIHDDSLTFKEDIQKAQVSGQGDSLHEHIANLAGSPAIKKGILQTVKVVDELVKVMGRHKPENIVIEMARENQTTQKGQKNSRERMKRIEEGIKELGSQILKEHPVENTQLQNEKLYLYYLQNGRDMYVDQELDINRLSDYDVDHIVPQSFLKDDSIDNKVLTRSDKARGKSDNVPSEEVVKKMKNYWRQLLNAKLITQRKFDNLTKAERGGLSELDKAGFIKRQLVETRQITKHVAQILDSRMNTKYDENDKLIREVKVITLKSKLVSDFRKDFQFYKVREINNYHHAHDAYLNAVVGTALIKKYPKLESEFVYGDYKVYDVRKMIAKSEQEIGKATAKYFFYSNIMNFFKTEITLANGEIRKRPLIETNGETGEIVWDKGRDFATVRKVLSMPQVNIVKKTEVQTGGFSKESILPKRNSDKLIARKKDWDPKKYGGFDSPTVAYSVLVVAKVEKGKSKKLKSVKELLGITIMERSSFEKNPIDFLEAKGYKEVKKDLIIKLPKYSLFELENGRKRMLASAGELQKGNELALPSKYVNFLYLASHYEKLKGSPEDNEQKQLFVEQHKHYLDEIIEQISEFSKRVILADANLDKVLSAYNKHRDKPIREQAENIIHLFTLTNLGAPAAFKYFDTTIDRKRYTSTKEVLDATLIHQSITGLYETRIDLSQLGGDGGEAAAKGGSGGGGGGLEHLPPPPEVSQFPLNPERLQALTDLVSRALEAKHIEPYQGPGNNPIFPVKKPNGKWRFIHDLRATNSLTRDLASPSPGPPDLTSLPQDLPHLRTIDLTDAFFQIPLPAVFQPYFAFTLPQPNNHGPGTRYSWRVLPQGFKNSPTLFQQQLSHILAPVRKAFPNSLIIQYMDDILLASPALRELTALTDKVTNALTKEGLPMSLEKTQATPGSIHFLGQVISPDCITYETLPSIHVKSIWSLAELQSMLGELQWVSKGTPVLRSSLHQLYLALRGHRDPRDTIELTSTQVQALKTIQKALALNCRSRLVSQLPILALIILRPTGTTAVLFQTKQKWPLVWLHTPHPATSLRPWGQLLANAIITLDKYSLQHYGQICKSFHHNISNQALTYYLHTSDQSSVAILLQHSHRFHNLGAQPSGPWRSLLQVPQIFQNIDVLRPPFIISPVVIDHAPCLFSDGATSKAAFILWDKQVIHQQVLPLPSTCSAQAGELFGLLAGLQKSKPWPALNIFLDSKFLIGHLRRMAWGAFLGPSTQCDLHARLFPLLQGKTVYVHHVRSHTLLQDPISRLNEATDALMLAPLLPLAGKRTADGSEFEKRTADGSEFESPKKKAKVE

SEQ ID NO: 1525 - protein, 2007 aa, synthetic construct
MPAAKRVKLDGGDKKYSIGLDIGTNSVGWAVITDEYKVPSKKFKVLGNTDRHSIKKNLIGALLFDSGETAEATRLKRTARRRYTRRKNRICYLQEIFSNEMAKVDDSFFHRLEESFLVEEDKKHERHPIFGNIVDEVAYHEKYPTIYHLRKKLVDSTDKADLRLIYLALAHMIKFRGHFLIEGDLNPDNSDVDKLFIQLVQTYNQLFEENPINASGVDAKAILSARLSKSRRLENLIAQLPGEKKNGLFGNLIALSLGLTPNFKSNFDLAEDAKLQLSKDTYDDDLDNLLAQIGDQYADLFLAAKNLSDAILLSDILRVNTEITKAPLSASMIKRYDEHHQDLTLLKALVRQQLPEKYKEIFFDQSKNGYAGYIDGGASQEEFYKFIKPILEKMDGTEELLVKLNREDLLRKQRTFDNGSIPHQIHLGELHAILRRQEDFYPFLKDNREKIEKILTFRIPYYVGPLARGNSRFAWMTRKSEETITPWNFEEVVDKGASAQSFIERMTNFDKNLPNEKVLPKHSLLYEYFTVYNELTKVKYVTEGMRKPAFLSGEQKKAIVDLLFKTNRKVTVKQLKEDYFKKIECFDSVEISGVEDRFNASLGTYHDLLKIIKDKDFLDNEENEDILEDIVLTLTLFEDREMIEERLKTYAHLFDDKVMKQLKRRRYTGWGRLSRKLINGIRDKQSGKTILDFLKSDGFANRNFMQLIHDDSLTFKEDIQKAQVSGQGDSLHEHIANLAGSPAIKKGILQTVKVVDELVKVMGRHKPENIVIEMARENQTTQKGQKNSRERMKRIEEGIKELGSQILKEHPVENTQLQNEKLYLYYLQNGRDMYVDQELDINRLSDYDVDHIVPQSFLKDDSIDNKVLTRSDKARGKSDNVPSEEVVKKMKNYWRQLLNAKLITQRKFDNLTKAERGGLSELDKAGFIKRQLVETRQITKHVAQILDSRMNTKYDENDKLIREVKVITLKSKLVSDFRKDFQFYKVREINNYHHAHDAYLNAVVGTALIKKYPKLESEFVYGDYKVYDVRKMIAKSEQEIGKATAKYFFYSNIMNFFKTEITLANGEIRKRPLIETNGETGEIVWDKGRDFATVRKVLSMPQVNIVKKTEVQTGGFSKESILPKRNSDKLIARKKDWDPKKYGGFDSPTVAYSVLVVAKVEKGKSKKLKSVKELLGITIMERSSFEKNPIDFLEAKGYKEVKKDLIIKLPKYSLFELENGRKRMLASAGELQKGNELALPSKYVNFLYLASHYEKLKGSPEDNEQKQLFVEQHKHYLDEIIEQISEFSKRVILADANLDKVLSAYNKHRDKPIREQAENIIHLFTLTNLGAPAAFKYFDTTIDRKRYTSTKEVLDATLIHQSITGLYETRIDLSQLGGDGGGSSPAPGGGGGGLEHLPPPPEVSQFPLNPERLQALTDLVSRALEAKHIEPYQGPGNNPIFPVKKPNGKWRFIHDLRATNSLTRDLASPSPGPPDLTSLPQDLPHLRTIDLTDAFFQIPLPAVFQPYFAFTLPQPNNHGPGTRYSWRVLPQGFKNSPTLFQQQLSHILAPVRKAFPNSLIIQYMDDILLASPALRELTALTDKVTNALTKEGLPMSLEKTQATPGSIHFLGQVISPDCITYETLPSIHVKSIWSLAELQSMLGELQWVSKGTPVLRSSLHQLYLALRGHRDPRDTIELTSTQVQALKTIQKALALNCRSRLVSQLPILALIILRPTGTTAVLFQTKQKWPLVWLHTPHPATSLRPWGQLLANAIITLDKYSLQHYGQICKSFHHNISNQALTYYLHTSDQSSVAILLQHSHRFHNLGAQPSGPWRSLLQVPQIFQNIDVLRPPFIISPVVIDHAPCLFSDGATSKAAFILWDKQVIHQQVLPLPSTCSAQAGELFGLLAGLQKSKPWPALNIFLDSKFLIGHLRRMAWGAFLGPSTQCDLHARLFPLLQGKTVYVHHVRSHTLLQDPISRLNEATDALMLAPLLPLAGKRTADGSEFEKRTADGSEFESPKKKAKVE

SEQ ID NO: 1526 - protein, 2009 aa, synthetic construct
MPAAKRVKLDGGDKKYSIGLDIGTNSVGWAVITDEYKVPSKKFKVLGNTDRHSIKKNLIGALLFDSGETAEATRLKRTARRRYTRRKNRICYLQEIFSNEMAKVDDSFFHRLEESFLVEEDKKHERHPIFGNIVDEVAYHEKYPTIYHLRKKLVDSTDKADLRLIYLALAHMIKFRGHFLIEGDLNPDNSDVDKLFIQLVQTYNQLFEENPINASGVDAKAILSARLSKSRRLENLIAQLPGEKKNGLFGNLIALSLGLTPNFKSNFDLAEDAKLQLSKDTYDDDLDNLLAQIGDQYADLFLAAKNLSDAILLSDILRVNTEITKAPLSASMIKRYDEHHQDLTLLKALVRQQLPEKYKEIFFDQSKNGYAGYIDGGASQEEFYKFIKPILEKMDGTEELLVKLNREDLLRKQRTFDNGSIPHQIHLGELHAILRRQEDFYPFLKDNREKIEKILTFRIPYYVGPLARGNSRFAWMTRKSEETITPWNFEEVVDKGASAQSFIERMTNFDKNLPNEKVLPKHSLLYEYFTVYNELTKVKYVTEGMRKPAFLSGEQKKAIVDLLFKTNRKVTVKQLKEDYFKKIECFDSVEISGVEDRFNASLGTYHDLLKIIKDKDFLDNEENEDILEDIVLTLTLFEDREMIEERLKTYAHLFDDKVMKQLKRRRYTGWGRLSRKLINGIRDKQSGKTILDFLKSDGFANRNFMQLIHDDSLTFKEDIQKAQVSGQGDSLHEHIANLAGSPAIKKGILQTVKVVDELVKVMGRHKPENIVIEMARENQTTQKGQKNSRERMKRIEEGIKELGSQILKEHPVENTQLQNEKLYLYYLQNGRDMYVDQELDINRLSDYDVDHIVPQSFLKDDSIDNKVLTRSDKARGKSDNVPSEEVVKKMKNYWRQLLNAKLITQRKFDNLTKAERGGLSELDKAGFIKRQLVETRQITKHVAQILDSRMNTKYDENDKLIREVKVITLKSKLVSDFRKDFQFYKVREINNYHHAHDAYLNAVVGTALIKKYPKLESEFVYGDYKVYDVRKMIAKSEQEIGKATAKYFFYSNIMNFFKTEITLANGEIRKRPLIETNGETGEIVWDKGRDFATVRKVLSMPQVNIVKKTEVQTGGFSKESILPKRNSDKLIARKKDWDPKKYGGFDSPTVAYSVLVVAKVEKGKSKKLKSVKELLGITIMERSSFEKNPIDFLEAKGYKEVKKDLIIKLPKYSLFELENGRKRMLASAGELQKGNELALPSKYVNFLYLASHYEKLKGSPEDNEQKQLFVEQHKHYLDEIIEQISEFSKRVILADANLDKVLSAYNKHRDKPIREQAENIIHLFTLTNLGAPAAFKYFDTTIDRKRYTSTKEVLDATLIHQSITGLYETRIDLSQLGGDGGEAAAKGGGGSSGGGLEHLPPPPEVSQFPLNPERLQALTDLVSRALEAKHIEPYQGPGNNPIFPVKKPNGKWRFIHDLRATNSLTRDLASPSPGPPDLTSLPQDLPHLRTIDLTDAFFQIPLPAVFQPYFAFTLPQPNNHGPGTRYSWRVLPQGFKNSPTLFQQQLSHILAPVRKAFPNSLIIQYMDDILLASPALRELTALTDKVTNALTKEGLPMSLEKTQATPGSIHFLGQVISPDCITYETLPSIHVKSIWSLAELQSMLGELQWVSKGTPVLRSSLHQLYLALRGHRDPRDTIELTSTQVQALKTIQKALALNCRSRLVSQLPILALIILRPTGTTAVLFQTKQKWPLVWLHTPHPATSLRPWGQLLANAIITLDKYSLQHYGQICKSFHHNISNQALTYYLHTSDQSSVAILLQHSHRFHNLGAQPSGPWRSLLQVPQIFQNIDVLRPPFIISPVVIDHAPCLFSDGATSKAAFILWDKQVIHQQVLPLPSTCSAQAGELFGLLAGLQKSKPWPALNIFLDSKFLIGHLRRMAWGAFLGPSTQCDLHARLFPLLQGKTVYVHHVRSHTLLQDPISRLNEATDALMLAPLLPLAGKRTADGSEFEKRTADGSEFESPKKKAKVE

SEQ ID NO: 1527 - protein, 2007 aa, synthetic construct
MPAAKRVKLDGGDKKYSIGLDIGTNSVGWAVITDEYKVPSKKFKVLGNTDRHSIKKNLIGALLFDSGETAEATRLKRTARRRYTRRKNRICYLQEIFSNEMAKVDDSFFHRLEESFLVEEDKKHERHPIFGNIVDEVAYHEKYPTIYHLRKKLVDSTDKADLRLIYLALAHMIKFRGHFLIEGDLNPDNSDVDKLFIQLVQTYNQLFEENPINASGVDAKAILSARLSKSRRLENLIAQLPGEKKNGLFGNLIALSLGLTPNFKSNFDLAEDAKLQLSKDTYDDDLDNLLAQIGDQYADLFLAAKNLSDAILLSDILRVNTEITKAPLSASMIKRYDEHHQDLTLLKALVRQQLPEKYKEIFFDQSKNGYAGYIDGGASQEEFYKFIKPILEKMDGTEELLVKLNREDLLRKQRTFDNGSIPHQIHLGELHAILRRQEDFYPFLKDNREKIEKILTFRIPYYVGPLARGNSRFAWMTRKSEETITPWNFEEVVDKGASAQSFIERMTNFDKNLPNEKVLPKHSLLYEYFTVYNELTKVKYVTEGMRKPAFLSGEQKKAIVDLLFKTNRKVTVKQLKEDYFKKIECFDSVEISGVEDRFNASLGTYHDLLKIIKDKDFLDNEENEDILEDIVLTLTLFEDREMIEERLKTYAHLFDDKVMKQLKRRRYTGWGRLSRKLINGIRDKQSGKTILDFLKSDGFANRNFMQLIHDDSLTFKEDIQKAQVSGQGDSLHEHIANLAGSPAIKKGILQTVKVVDELVKVMGRHKPENIVIEMARENQTTQKGQKNSRERMKRIEEGIKELGSQILKEHPVENTQLQNEKLYLYYLQNGRDMYVDQELDINRLSDYDVDHIVPQSFLKDDSIDNKVLTRSDKARGKSDNVPSEEVVKKMKNYWRQLLNAKLITQRKFDNLTKAERGGLSELDKAGFIKRQLVETRQITKHVAQILDSRMNTKYDENDKLIREVKVITLKSKLVSDFRKDFQFYKVREINNYHHAHDAYLNAVVGTALIKKYPKLESEFVYGDYKVYDVRKMIAKSEQEIGKATAKYFFYSNIMNFFKTEITLANGEIRKRPLIETNGETGEIVWDKGRDFATVRKVLSMPQVNIVKKTEVQTGGFSKESILPKRNSDKLIARKKDWDPKKYGGFDSPTVAYSVLVVAKVEKGKSKKLKSVKELLGITIMERSSFEKNPIDFLEAKGYKEVKKDLIIKLPKYSLFELENGRKRMLASAGELQKGNELALPSKYVNFLYLASHYEKLKGSPEDNEQKQLFVEQHKHYLDEIIEQISEFSKRVILADANLDKVLSAYNKHRDKPIREQAENIIHLFTLTNLGAPAAFKYFDTTIDRKRYTSTKEVLDATLIHQSITGLYETRIDLSQLGGDGGPAPGGGGSSGGGLEHLPPPPEVSQFPLNPERLQALTDLVSRALEAKHIEPYQGPGNNPIFPVKKPNGKWRFIHDLRATNSLTRDLASPSPGPPDLTSPPQDLPHLRTIDLTDAFFQIPLPAVFQPYFAFTLPQPNNHGPGTRYSWRVLPQGFKNSPTLFQQQLSHILAPVRKAFPNSLIIQYMDDILLASPALRELTALTDKVTNALTKEGLPMSLEKTQATPGSIHFLGQVISPDCITYETLPSIHVKSIWSLAELQSMLGELQWVSKGTPVLRSSLHQLYLALRGHRDPRDTIELTSTQVQALKTIQKALALNCRSRLVSQLPILALIILRPTGTTAVLFQTKQKWPLVWLHTPHPATSLRPWGQLLANAIITLDKYSLQHYGQICKSFHHNISNQALTYYLHTSDQSSVAILLQHSHRFHNLGAQPSGPWRSLLQVPQIFQNIDVLRPPFIISPVVIDHAPCLFSDGATSKAAFILWDKQVIHQQVLPLPSTCSAQAGELFGLLAGLQKSKPWPALNIFLDSKFLIGHLRRMAWGAFLGPSTQCDLHARLFPLLQGKTVYVHHVRSHTLLQDPISRLNEATDALMLAPLLPLAGKRTADGSEFEKRTADGSEFESPKKKAKVE

SEQ ID NO: 1528 - protein, 2028 aa, synthetic construct
MPAAKRVKLDGGDKKYSIGLDIGTNSVGWAVITDEYKVPSKKFKVLGNTDRHSIKKNLIGALLFDSGETAEATRLKRTARRRYTRRKNRICYLQEIFSNEMAKVDDSFFHRLEESFLVEEDKKHERHPIFGNIVDEVAYHEKYPTIYHLRKKLVDSTDKADLRLIYLALAHMIKFRGHFLIEGDLNPDNSDVDKLFIQLVQTYNQLFEENPINASGVDAKAILSARLSKSRRLENLIAQLPGEKKNGLFGNLIALSLGLTPNFKSNFDLAEDAKLQLSKDTYDDDLDNLLAQIGDQYADLFLAAKNLSDAILLSDILRVNTEITKAPLSASMIKRYDEHHQDLTLLKALVRQQLPEKYKEIFFDQSKNGYAGYIDGGASQEEFYKFIKPILEKMDGTEELLVKLNREDLLRKQRTFDNGSIPHQIHLGELHAILRRQEDFYPFLKDNREKIEKILTFRIPYYVGPLARGNSRFAWMTRKSEETITPWNFEEVVDKGASAQSFIERMTNFDKNLPNEKVLPKHSLLYEYFTVYNELTKVKYVTEGMRKPAFLSGEQKKAIVDLLFKTNRKVTVKQLKEDYFKKIECFDSVEISGVEDRFNASLGTYHDLLKIIKDKDFLDNEENEDILEDIVLTLTLFEDREMIEERLKTYAHLFDDKVMKQLKRRRYTGWGRLSRKLINGIRDKQSGKTILDFLKSDGFANRNFMQLIHDDSLTFKEDIQKAQVSGQGDSLHEHIANLAGSPAIKKGILQTVKVVDELVKVMGRHKPENIVIEMARENQTTQKGQKNSRERMKRIEEGIKELGSQILKEHPVENTQLQNEKLYLYYLQNGRDMYVDQELDINRLSDYDVDHIVPQSFLKDDSIDNKVLTRSDKARGKSDNVPSEEVVKKMKNYWRQLLNAKLITQRKFDNLTKAERGGLSELDKAGFIKRQLVETRQITKHVAQILDSRMNTKYDENDKLIREVKVITLKSKLVSDFRKDFQFYKVREINNYHHAHDAYLNAVVGTALIKKYPKLESEFVYGDYKVYDVRKMIAKSEQEIGKATAKYFFYSNIMNFFKTEITLANGEIRKRPLIETNGETGEIVWDKGRDFATVRKVLSMPQVNIVKKTEVQTGGFSKESILPKRNSDKLIARKKDWDPKKYGGFDSPTVAYSVLVVAKVEKGKSKKLKSVKELLGITIMERSSFEKNPIDFLEAKGYKEVKKDLIIKLPKYSLFELENGRKRMLASAGELQKGNELALPSKYVNFLYLASHYEKLKGSPEDNEQKQLFVEQHKHYLDEIIEQISEFSKRVILADANLDKVLSAYNKHRDKPIREQAENIIHLFTLTNLGAPAAFKYFDTTIDRKRYTSTKEVLDATLIHQSITGLYETRIDLSQLGGDGGGGGGSGGGGSGGGGSGGGGSGGGGSGGGGSGGGLEHLPPPPEVSQFPLNPERLQALTDLVSRALEAKHIEPYQGPGNNPIFPVKKPNGKWRFIHDLRATNSLTRDLASPSPGPPDLTSPPQDLPHLRTIDLTDAFFQIPLPAVFQPYFAFTLPQPNNHGPGTRYSWRVLPQGFKNSPTLFQQQLSHILAPVRKAFPNSLIIQYMDDILLASPALRELTALTDKVTNALTKEGLPMSLEKTQATPGSIHFLGQVISPDCITYETLPSIHVKSIWSLAELQSMLGELQWVSKGTPVLRSSLHQLYLALRGHRDPRDTIELTSTQVQALKTIQKALALNCRSRLVSQLPILALIILRPTGTTAVLFQTKQKWPLVWLHTPHPATSLRPWGQLLANAIITLDKYSLQHYGQICKSFHHNISNQALTYYLHTSDQSSVAILLQHSHRFHNLGAQPSGPWRSLLQVPQIFQNIDVLRPPFIISPVVIDHAPCLFSDGATSKAAFILWDKQVIHQQVLPLPSTCSAQAGELFGLLAGLQKSKPWPALNIFLDSKFLIGHLRRMAWGAFLGPSTQCDLHARLFPLLQGKTVYVHHVRSHTLLQDPISRLNEATDALMLAPLLPLAGKRTADGSEFEKRTADGSEFESPKKKAKVE

SEQ ID NO: 1529 - protein, 2007 aa, synthetic construct
MPAAKRVKLDGGDKKYSIGLDIGTNSVGWAVITDEYKVPSKKFKVLGNTDRHSIKKNLIGALLFDSGETAEATRLKRTARRRYTRRKNRICYLQEIFSNEMAKVDDSFFHRLEESFLVEEDKKHERHPIFGNIVDEVAYHEKYPTIYHLRKKLVDSTDKADLRLIYLALAHMIKFRGHFLIEGDLNPDNSDVDKLFIQLVQTYNQLFEENPINASGVDAKAILSARLSKSRRLENLIAQLPGEKKNGLFGNLIALSLGLTPNFKSNFDLAEDAKLQLSKDTYDDDLDNLLAQIGDQYADLFLAAKNLSDAILLSDILRVNTEITKAPLSASMIKRYDEHHQDLTLLKALVRQQLPEKYKEIFFDQSKNGYAGYIDGGASQEEFYKFIKPILEKMDGTEELLVKLNREDLLRKQRTFDNGSIPHQIHLGELHAILRRQEDFYPFLKDNREKIEKILTFRIPYYVGPLARGNSRFAWMTRKSEETITPWNFEEVVDKGASAQSFIERMTNFDKNLPNEKVLPKHSLLYEYFTVYNELTKVKYVTEGMRKPAFLSGEQKKAIVDLLFKTNRKVTVKQLKEDYFKKIECFDSVEISGVEDRFNASLGTYHDLLKIIKDKDFLDNEENEDILEDIVLTLTLFEDREMIEERLKTYAHLFDDKVMKQLKRRRYTGWGRLSRKLINGIRDKQSGKTILDFLKSDGFANRNFMQLIHDDSLTFKEDIQKAQVSGQGDSLHEHIANLAGSPAIKKGILQTVKVVDELVKVMGRHKPENIVIEMARENQTTQKGQKNSRERMKRIEEGIKELGSQILKEHPVENTQLQNEKLYLYYLQNGRDMYVDQELDINRLSDYDVDHIVPQSFLKDDSIDNKVLTRSDKARGKSDNVPSEEVVKKMKNYWRQLLNAKLITQRKFDNLTKAERGGLSELDKAGFIKRQLVETRQITKHVAQILDSRMNTKYDENDKLIREVKVITLKSKLVSDFRKDFQFYKVREINNYHHAHDAYLNAVVGTALIKKYPKLESEFVYGDYKVYDVRKMIAKSEQEIGKATAKYFFYSNIMNFFKTEITLANGEIRKRPLIETNGETGEIVWDKGRDFATVRKVLSMPQVNIVKKTEVQTGGFSKESILPKRNSDKLIARKKDWDPKKYGGFDSPTVAYSVLVVAKVEKGKSKKLKSVKELLGITIMERSSFEKNPIDFLEAKGYKEVKKDLIIKLPKYSLFELENGRKRMLASAGELQKGNELALPSKYVNFLYLASHYEKLKGSPEDNEQKQLFVEQHKHYLDEIIEQISEFSKRVILADANLDKVLSAYNKHRDKPIREQAENIIHLFTLTNLGAPAAFKYFDTTIDRKRYTSTKEVLDATLIHQSITGLYETRIDLSQLGGDGGGGGGGSPAPGGGLEHLPPPPEVSQFPLNPERLQALTDLVSRALEAKHIEPYQGPGNNPIFPVKKPNGKWRFIHDLRATNSLTRDLASPSPGPPDLTSPPQDLPHLRTIDLTDAFFQIPLPAVFQPYFAFTLPQPNNHGPGTRYSWRVLPQGFKNSPTLFQQQLSHILAPVRKAFPNSLIIQYMDDILLASPALRELTALTDKVTNALTKEGLPMSLEKTQATPGSIHFLGQVISPDCITYETLPSIHVKSIWSLAELQSMLGELQWVSKGTPVLRSSLHQLYLALRGHRDPRDTIELTSTQVQALKTIQKALALNCRSRLVSQLPILALIILRPTGTTAVLFQTKQKWPLVWLHTPHPATSLRPWGQLLANAIITLDKYSLQHYGQICKSFHHNISNQALTYYLHTSDQSSVAILLQHSHRFHNLGAQPSGPWRSLLQVPQIFQNIDVLRPPFIISPVVIDHAPCLFSDGATSKAAFILWDKQVIHQQVLPLPSTCSAQAGELFGLLAGLQKSKPWPALNIFLDSKFLIGHLRRMAWGAFLGPSTQCDLHARLFPLLQGKTVYVHHVRSHTLLQDPISRLNEATDALMLAPLLPLAGKRTADGSEFEKRTADGSEFESPKKKAKVE

SEQ ID NO: 1530 - protein, 2004 aa, synthetic construct
MPAAKRVKLDGGDKKYSIGLDIGTNSVGWAVITDEYKVPSKKFKVLGNTDRHSIKKNLIGALLFDSGETAEATRLKRTARRRYTRRKNRICYLQEIFSNEMAKVDDSFFHRLEESFLVEEDKKHERHPIFGNIVDEVAYHEKYPTIYHLRKKLVDSTDKADLRLIYLALAHMIKFRGHFLIEGDLNPDNSDVDKLFIQLVQTYNQLFEENPINASGVDAKAILSARLSKSRRLENLIAQLPGEKKNGLFGNLIALSLGLTPNFKSNFDLAEDAKLQLSKDTYDDDLDNLLAQIGDQYADLFLAAKNLSDAILLSDILRVNTEITKAPLSASMIKRYDEHHQDLTLLKALVRQQLPEKYKEIFFDQSKNGYAGYIDGGASQEEFYKFIKPILEKMDGTEELLVKLNREDLLRKQRTFDNGSIPHQIHLGELHAILRRQEDFYPFLKDNREKIEKILTFRIPYYVGPLARGNSRFAWMTRKSEETITPWNFEEVVDKGASAQSFIERMTNFDKNLPNEKVLPKHSLLYEYFTVYNELTKVKYVTEGMRKPAFLSGEQKKAIVDLLFKTNRKVTVKQLKEDYFKKIECFDSVEISGVEDRFNASLGTYHDLLKIIKDKDFLDNEENEDILEDIVLTLTLFEDREMIEERLKTYAHLFDDKVMKQLKRRRYTGWGRLSRKLINGIRDKQSGKTILDFLKSDGFANRNFMQLIHDDSLTFKEDIQKAQVSGQGDSLHEHIANLAGSPAIKKGILQTVKVVDELVKVMGRHKPENIVIEMARENQTTQKGQKNSRERMKRIEEGIKELGSQILKEHPVENTQLQNEKLYLYYLQNGRDMYVDQELDINRLSDYDVDHIVPQSFLKDDSIDNKVLTRSDKARGKSDNVPSEEVVKKMKNYWRQLLNAKLITQRKFDNLTKAERGGLSELDKAGFIKRQLVETRQITKHVAQILDSRMNTKYDENDKLIREVKVITLKSKLVSDFRKDFQFYKVREINNYHHAHDAYLNAVVGTALIKKYPKLESEFVYGDYKVYDVRKMIAKSEQEIGKATAKYFFYSNIMNFFKTEITLANGEIRKRPLIETNGETGEIVWDKGRDFATVRKVLSMPQVNIVKKTEVQTGGFSKESILPKRNSDKLIARKKDWDPKKYGGFDSPTVAYSVLVVAKVEKGKSKKLKSVKELLGITIMERSSFEKNPIDFLEAKGYKEVKKDLIIKLPKYSLFELENGRKRMLASAGELQKGNELALPSKYVNFLYLASHYEKLKGSPEDNEQKQLFVEQHKHYLDEIIEQISEFSKRVILADANLDKVLSAYNKHRDKPIREQAENIIHLFTLTNLGAPAAFKYFDTTIDRKRYTSTKEVLDATLIHQSITGLYETRIDLSQLGGDGGGGGPAPGGHLPPPPQVDQFPLNLPERLQALNDLVSKALEAGHIEPYSGPGNNPVFPVKKPNGKWRFIHDLRATNAITTTLTSPSPGPPDLTSLPTALPHLQTIDLTDAFFQIPLPKQYQPYFAFTIPQPCNYGPGTRYAWTVLPQGFKNSPTLFQQQLAAVLNPMRKMFPTSTIVQYMDDILLASPTNEELQQLSQLTLQALTTHGLPISQEKTQQTPGQIRFLGQVISPNHITYESTPTIPIKSQWTLTELQVILGEIQWVSKGTPILRKHLQSLYSALHPYRDPRACITLTPQQLHALHAIQQALQHNCRGRLNPALPLLGLISLSTSGTTSVIFQPKQNWPLAWLHTPHPPTSLCPWGHLLACTILTLDKYTLQHYGQLCQSFHHNMSKQALCDFLRNSPHPSVGILIHHMGRFHNLGSQPSGPWKTLLHLPTLLQEPRLLRPIFTLSPVVLDTAPCLFSDGSPQKAAYVLWDQTILQQDITPLPSHETHSAQKGELLALICGLRAAKPWPSLNIFLDSKYLIKYLHSLAIGAFLGTSAHQTLQAALPPLLQGKTIYLHHVRSHTNLPDPISTFNEYTDSLILAPLVPLAGKRTADGSEFEKRTADGSEFESPKKKAKVE

SEQ ID NO: 1531 - protein, 2009 aa, synthetic construct
MPAAKRVKLDGGDKKYSIGLDIGTNSVGWAVITDEYKVPSKKFKVLGNTDRHSIKKNLIGALLFDSGETAEATRLKRTARRRYTRRKNRICYLQEIFSNEMAKVDDSFFHRLEESFLVEEDKKHERHPIFGNIVDEVAYHEKYPTIYHLRKKLVDSTDKADLRLIYLALAHMIKFRGHFLIEGDLNPDNSDVDKLFIQLVQTYNQLFEENPINASGVDAKAILSARLSKSRRLENLIAQLPGEKKNGLFGNLIALSLGLTPNFKSNFDLAEDAKLQLSKDTYDDDLDNLLAQIGDQYADLFLAAKNLSDAILLSDILRVNTEITKAPLSASMIKRYDEHHQDLTLLKALVRQQLPEKYKEIFFDQSKNGYAGYIDGGASQEEFYKFIKPILEKMDGTEELLVKLNREDLLRKQRTFDNGSIPHQIHLGELHAILRRQEDFYPFLKDNREKIEKILTFRIPYYVGPLARGNSRFAWMTRKSEETITPWNFEEVVDKGASAQSFIERMTNFDKNLPNEKVLPKHSLLYEYFTVYNELTKVKYVTEGMRKPAFLSGEQKKAIVDLLFKTNRKVTVKQLKEDYFKKIECFDSVEISGVEDRFNASLGTYHDLLKIIKDKDFLDNEENEDILEDIVLTLTLFEDREMIEERLKTYAHLFDDKVMKQLKRRRYTGWGRLSRKLINGIRDKQSGKTILDFLKSDGFANRNFMQLIHDDSLTFKEDIQKAQVSGQGDSLHEHIANLAGSPAIKKGILQTVKVVDELVKVMGRHKPENIVIEMARENQTTQKGQKNSRERMKRIEEGIKELGSQILKEHPVENTQLQNEKLYLYYLQNGRDMYVDQELDINRLSDYDVDHIVPQSFLKDDSIDNKVLTRSDKARGKSDNVPSEEVVKKMKNYWRQLLNAKLITQRKFDNLTKAERGGLSELDKAGFIKRQLVETRQITKHVAQILDSRMNTKYDENDKLIREVKVITLKSKLVSDFRKDFQFYKVREINNYHHAHDAYLNAVVGTALIKKYPKLESEFVYGDYKVYDVRKMIAKSEQEIGKATAKYFFYSNIMNFFKTEITLANGEIRKRPLIETNGETGEIVWDKGRDFATVRKVLSMPQVNIVKKTEVQTGGFSKESILPKRNSDKLIARKKDWDPKKYGGFDSPTVAYSVLVVAKVEKGKSKKLKSVKELLGITIMERSSFEKNPIDFLEAKGYKEVKKDLIIKLPKYSLFELENGRKRMLASAGELQKGNELALPSKYVNFLYLASHYEKLKGSPEDNEQKQLFVEQHKHYLDEIIEQISEFSKRVILADANLDKVLSAYNKHRDKPIREQAENIIHLFTLTNLGAPAAFKYFDTTIDRKRYTSTKEVLDATLIHQSITGLYETRIDLSQLGGDGGEAAAKGSSGGGGGHLPPPPQVDQFPLNLPERLQALNDLVSKALEAGHIEPYSGPGNNPVFPVKKPNGKWRFIHDLRATNAITTTLTSPSPGPPDLTSLPTALPHLQTIDLTDAFFQIPLPKQYQPYFAFTIPQPCNYGPGTRYAWTVLPQGFKNSPTLFQQQLAAVLNPMRKMFPTSTIVQYMDDILLASPTNEELQQLSQLTLQALTTHGLPISQEKTQQTPGQIRFLGQVISPNHITYESTPTIPIKSQWTLTELQVILGEIQWVSKGTPILRKHLQSLYSALHPYRDPRACITLTPQQLHALHAIQQALQHNCRGRLNPALPLLGLISLSTSGTTSVIFQPKQNWPLAWLHTPHPPTSLCPWGHLLACTILTLDKYTLQHYGQLCQSFHHNMSKQALCDFLRNSPHPSVGILIHHMGRFHNLGSQPSGPWKTLLHLPTLLQEPRLLRPIFTLSPVVLDTAPCLFSDGSPQKAAYVLWDQTILQQDITPLPSHETHSAQKGELLALICGLRAAKPWPSLNIFLDSKYLIKYLHSLAIGAFLGTSAHQTLQAALPPLLQGKTIYLHHVRSHTNLPDPISTFNEYTDSLILAPLVPLAGKRTADGSEFEKRTADGSEFESPKKKAKVE

SEQ ID NO: 1532 - protein, 2009 aa, synthetic construct
MPAAKRVKLDGGDKKYSIGLDIGTNSVGWAVITDEYKVPSKKFKVLGNTDRHSIKKNLIGALLFDSGETAEATRLKRTARRRYTRRKNRICYLQEIFSNEMAKVDDSFFHRLEESFLVEEDKKHERHPIFGNIVDEVAYHEKYPTIYHLRKKLVDSTDKADLRLIYLALAHMIKFRGHFLIEGDLNPDNSDVDKLFIQLVQTYNQLFEENPINASGVDAKAILSARLSKSRRLENLIAQLPGEKKNGLFGNLIALSLGLTPNFKSNFDLAEDAKLQLSKDTYDDDLDNLLAQIGDQYADLFLAAKNLSDAILLSDILRVNTEITKAPLSASMIKRYDEHHQDLTLLKALVRQQLPEKYKEIFFDQSKNGYAGYIDGGASQEEFYKFIKPILEKMDGTEELLVKLNREDLLRKQRTFDNGSIPHQIHLGELHAILRRQEDFYPFLKDNREKIEKILTFRIPYYVGPLARGNSRFAWMTRKSEETITPWNFEEVVDKGASAQSFIERMTNFDKNLPNEKVLPKHSLLYEYFTVYNELTKVKYVTEGMRKPAFLSGEQKKAIVDLLFKTNRKVTVKQLKEDYFKKIECFDSVEISGVEDRFNASLGTYHDLLKIIKDKDFLDNEENEDILEDIVLTLTLFEDREMIEERLKTYAHLFDDKVMKQLKRRRYTGWGRLSRKLINGIRDKQSGKTILDFLKSDGFANRNFMQLIHDDSLTFKEDIQKAQVSGQGDSLHEHIANLAGSPAIKKGILQTVKVVDELVKVMGRHKPENIVIEMARENQTTQKGQKNSRERMKRIEEGIKELGSQILKEHPVENTQLQNEKLYLYYLQNGRDMYVDQELDINRLSDYDVDHIVPQSFLKDDSIDNKVLTRSDKARGKSDNVPSEEVVKKMKNYWRQLLNAKLITQRKFDNLTKAERGGLSELDKAGFIKRQLVETRQITKHVAQILDSRMNTKYDENDKLIREVKVITLKSKLVSDFRKDFQFYKVREINNYHHAHDAYLNAVVGTALIKKYPKLESEFVYGDYKVYDVRKMIAKSEQEIGKATAKYFFYSNIMNFFKTEITLANGEIRKRPLIETNGETGEIVWDKGRDFATVRKVLSMPQVNIVKKTEVQTGGFSKESILPKRNSDKLIARKKDWDPKKYGGFDSPTVAYSVLVVAKVEKGKSKKLKSVKELLGITIMERSSFEKNPIDFLEAKGYKEVKKDLIIKLPKYSLFELENGRKRMLASAGELQKGNELALPSKYVNFLYLASHYEKLKGSPEDNEQKQLFVEQHKHYLDEIIEQISEFSKRVILADANLDKVLSAYNKHRDKPIREQAENIIHLFTLTNLGAPAAFKYFDTTIDRKRYTSTKEVLDATLIHQSITGLYETRIDLSQLGGDGGEAAAKGGSPAPGGHLPPPPQVDQFPLNLPERLQALNDLVSKALEAGHIEPYSGPGNNPVFPVKKPNGKWRFIHDLRATNAITTTLTSPSPGPPDLTSLPTALPHLQTIDLTDAFFQIPLPKQYQPYFAFTIPQPCNYGPGTRYAWTVLPQGFKNSPTLFQQQLAAVLNPMRKMFPTSTIVQYMDDILLASPTNEELQQLSQLTLQALTTHGLPISQEKTQQTPGQIRFLGQVISPNHITYESTPTIPIKSQWTLTELQVILGEIQWVSKGTPILRKHLQSLYSALHPYRDPRACITLTPQQLHALHAIQQALQHNCRGRLNPALPLLGLISLSTSGTTSVIFQPKQNWPLAWLHTPHPPTSLCPWGHLLACTILTLDKYTLQHYGQLCQSFHHNMSKQALCDFLRNSPHPSVGILIHHMGRFHNLGSQPSGPWKTLLHLPTLLQEPRLLRPIFTLSPVVLDTAPCLFSDGSPQKAAYVLWDQTILQQDITPLPSHETHSAQKGELLALICGLRAAKPWPSLNIFLDSKYLIKYLHSLAIGAFLGTSAHQTLQAALPPLLQGKTIYLHHVRSHTNLPDPISTFNEYTDSLILAPLVPLAGKRTADGSEFEKRTADGSEFESPKKKAKVE

SEQ ID NO: 1533 - protein, 2031 aa, synthetic construct
MPAAKRVKLDGGDKKYSIGLDIGTNSVGWAVITDEYKVPSKKFKVLGNTDRHSIKKNLIGALLFDSGETAEATRLKRTARRRYTRRKNRICYLQEIFSNEMAKVDDSFFHRLEESFLVEEDKKHERHPIFGNIVDEVAYHEKYPTIYHLRKKLVDSTDKADLRLIYLALAHMIKFRGHFLIEGDLNPDNSDVDKLFIQLVQTYNQLFEENPINASGVDAKAILSARLSKSRRLENLIAQLPGEKKNGLFGNLIALSLGLTPNFKSNFDLAEDAKLQLSKDTYDDDLDNLLAQIGDQYADLFLAAKNLSDAILLSDILRVNTEITKAPLSASMIKRYDEHHQDLTLLKALVRQQLPEKYKEIFFDQSKNGYAGYIDGGASQEEFYKFIKPILEKMDGTEELLVKLNREDLLRKQRTFDNGSIPHQIHLGELHAILRRQEDFYPFLKDNREKIEKILTFRIPYYVGPLARGNSRFAWMTRKSEETITPWNFEEVVDKGASAQSFIERMTNFDKNLPNEKVLPKHSLLYEYFTVYNELTKVKYVTEGMRKPAFLSGEQKKAIVDLLFKTNRKVTVKQLKEDYFKKIECFDSVEISGVEDRFNASLGTYHDLLKIIKDKDFLDNEENEDILEDIVLTLTLFEDREMIEERLKTYAHLFDDKVMKQLKRRRYTGWGRLSRKLINGIRDKQSGKTILDFLKSDGFANRNFMQLIHDDSLTFKEDIQKAQVSGQGDSLHEHIANLAGSPAIKKGILQTVKVVDELVKVMGRHKPENIVIEMARENQTTQKGQKNSRERMKRIEEGIKELGSQILKEHPVENTQLQNEKLYLYYLQNGRDMYVDQELDINRLSDYDVDHIVPQSFLKDDSIDNKVLTRSDKARGKSDNVPSEEVVKKMKNYWRQLLNAKLITQRKFDNLTKAERGGLSELDKAGFIKRQLVETRQITKHVAQILDSRMNTKYDENDKLIREVKVITLKSKLVSDFRKDFQFYKVREINNYHHAHDAYLNAVVGTALIKKYPKLESEFVYGDYKVYDVRKMIAKSEQEIGKATAKYFFYSNIMNFFKTEITLANGEIRKRPLIETNGETGEIVWDKGRDFATVRKVLSMPQVNIVKKTEVQTGGFSKESILPKRNSDKLIARKKDWDPKKYGGFDSPTVAYSVLVVAKVEKGKSKKLKSVKELLGITIMERSSFEKNPIDFLEAKGYKEVKKDLIIKLPKYSLFELENGRKRMLASAGELQKGNELALPSKYVNFLYLASHYEKLKGSPEDNEQKQLFVEQHKHYLDEIIEQISEFSKRVILADANLDKVLSAYNKHRDKPIREQAENIIHLFTLTNLGAPAAFKYFDTTIDRKRYTSTKEVLDATLIHQSITGLYETRIDLSQLGGDGGSGGSSGGSSGSETPGTSESATPESSGGSSGGSSGGHLPPPPQVDQFPLNLPERLQALNDLVSKALEAGHIEPYSGPGNNPVFPVKKPNGKWRFIHDLRATNAITTTLTSPSPGPPDLTSLPTALPHLQTIDLTDAFFQIPLPKQYQPYFAFTIPQPCNYGPGTRYAWTVLPQGFKNSPTLFQQQLAAVLNPMRKMFPTSTIVQYMDDILLASPTNEELQQLSQLTLQALTTHGLPISQEKTQQTPGQIRFLGQVISPNHITYESTPTIPIKSQWTLTELQVILGEIQWVSKGTPILRKHLQSLYSALHPYRDPRACITLTPQQLHALHAIQQALQHNCRGRLNPALPLLGLISLSTSGTTSVIFQPKQNWPLAWLHTPHPPTSLCPWGHLLACTILTLDKYTLQHYGQLCQSFHHNMSKQALCDFLRNSPHPSVGILIHHMGRFHNLGSQPSGPWKTLLHLPTLLQEPRLLRPIFTLSPVVLDTAPCLFSDGSPQKAAYVLWDQTILQQDITPLPSHETHSAQKGELLALICGLRAAKPWPSLNIFLDSKYLIKYLHSLAIGAFLGTSAHQTLQAALPPLLQGKTIYLHHVRSHTNLPDPISTFNEYTDSLILAPLVPLAGKRTADGSEFEKRTADGSEFESPKKKAKVE

SEQ ID NO: 1534 - protein, 2006 aa, synthetic construct
MPAAKRVKLDGGDKKYSIGLDIGTNSVGWAVITDEYKVPSKKFKVLGNTDRHSIKKNLIGALLFDSGETAEATRLKRTARRRYTRRKNRICYLQEIFSNEMAKVDDSFFHRLEESFLVEEDKKHERHPIFGNIVDEVAYHEKYPTIYHLRKKLVDSTDKADLRLIYLALAHMIKFRGHFLIEGDLNPDNSDVDKLFIQLVQTYNQLFEENPINASGVDAKAILSARLSKSRRLENLIAQLPGEKKNGLFGNLIALSLGLTPNFKSNFDLAEDAKLQLSKDTYDDDLDNLLAQIGDQYADLFLAAKNLSDAILLSDILRVNTEITKAPLSASMIKRYDEHHQDLTLLKALVRQQLPEKYKEIFFDQSKNGYAGYIDGGASQEEFYKFIKPILEKMDGTEELLVKLNREDLLRKQRTFDNGSIPHQIHLGELHAILRRQEDFYPFLKDNREKIEKILTFRIPYYVGPLARGNSRFAWMTRKSEETITPWNFEEVVDKGASAQSFIERMTNFDKNLPNEKVLPKHSLLYEYFTVYNELTKVKYVTEGMRKPAFLSGEQKKAIVDLLFKTNRKVTVKQLKEDYFKKIECFDSVEISGVEDRFNASLGTYHDLLKIIKDKDFLDNEENEDILEDIVLTLTLFEDREMIEERLKTYAHLFDDKVMKQLKRRRYTGWGRLSRKLINGIRDKQSGKTILDFLKSDGFANRNFMQLIHDDSLTFKEDIQKAQVSGQGDSLHEHIANLAGSPAIKKGILQTVKVVDELVKVMGRHKPENIVIEMARENQTTQKGQKNSRERMKRIEEGIKELGSQILKEHPVENTQLQNEKLYLYYLQNGRDMYVDQELDINRLSDYDVDHIVPQSFLKDDSIDNKVLTRSDKARGKSDNVPSEEVVKKMKNYWRQLLNAKLITQRKFDNLTKAERGGLSELDKAGFIKRQLVETRQITKHVAQILDSRMNTKYDENDKLIREVKVITLKSKLVSDFRKDFQFYKVREINNYHHAHDAYLNAVVGTALIKKYPKLESEFVYGDYKVYDVRKMIAKSEQEIGKATAKYFFYSNIMNFFKTEITLANGEIRKRPLIETNGETGEIVWDKGRDFATVRKVLSMPQVNIVKKTEVQTGGFSKESILPKRNSDKLIARKKDWDPKKYGGFDSPTVAYSVLVVAKVEKGKSKKLKSVKELLGITIMERSSFEKNPIDFLEAKGYKEVKKDLIIKLPKYSLFELENGRKRMLASAGELQKGNELALPSKYVNFLYLASHYEKLKGSPEDNEQKQLFVEQHKHYLDEIIEQISEFSKRVILADANLDKVLSAYNKHRDKPIREQAENIIHLFTLTNLGAPAAFKYFDTTIDRKRYTSTKEVLDATLIHQSITGLYETRIDLSQLGGDGGPAPEAAAKGGHLPPPPQVDQFPLNLPERLQALNDLVSKALEAGHIEPYSGPGNNPVFPVKKPNGKWRFIHDLRATNAITTTLTSPSPGPPDLTSLPTALPHLQTIDLTDAFFQIPLPKQYQPYFAFTIPQPCNYGPGTRYAWTVLPQGFKNSPTLFQQQLAAVLNPMRKMFPTSTIVQYMDDILLASPTNEELQQLSQLTLQALTTHGLPISQEKTQQTPGQIRFLGQVISPNHITYESTPTIPIKSQWTLTELQVILGEIQWVSKGTPILRKHLQSLYSALHPYRDPRACITLTPQQLHALHAIQQALQHNCRGRLNPALPLLGLISLSTSGTTSVIFQPKQNWPLAWLHTPHPPTSLCPWGHLLACTILTLDKYTLQHYGQLCQSFHHNMSKQALCDFLRNSPHPSVGILIHHMGRFHNLGSQPSGPWKTLLHLPTLLQEPRLLRPIFTLSPVVLDTAPCLFSDGSPQKAAYVLWDQTILQQDITPLPSHETHSAQKGELLALICGLRAAKPWPSLNIFLDSKYLIKYLHSLAIGAFLGTSAHQTLQAALPPLLQGKTIYLHHVRSHTNLPDPISTFNEYTDSLILAPLVPLAGKRTADGSEFEKRTADGSEFESPKKKAKVE

SEQ ID NO: 1535 - protein, 2007 aa, synthetic construct
MPAAKRVKLDGGDKKYSIGLDIGTNSVGWAVITDEYKVPSKKFKVLGNTDRHSIKKNLIGALLFDSGETAEATRLKRTARRRYTRRKNRICYLQEIFSNEMAKVDDSFFHRLEESFLVEEDKKHERHPIFGNIVDEVAYHEKYPTIYHLRKKLVDSTDKADLRLIYLALAHMIKFRGHFLIEGDLNPDNSDVDKLFIQLVQTYNQLFEENPINASGVDAKAILSARLSKSRRLENLIAQLPGEKKNGLFGNLIALSLGLTPNFKSNFDLAEDAKLQLSKDTYDDDLDNLLAQIGDQYADLFLAAKNLSDAILLSDILRVNTEITKAPLSASMIKRYDEHHQDLTLLKALVRQQLPEKYKEIFFDQSKNGYAGYIDGGASQEEFYKFIKPILEKMDGTEELLVKLNREDLLRKQRTFDNGSIPHQIHLGELHAILRRQEDFYPFLKDNREKIEKILTFRIPYYVGPLARGNSRFAWMTRKSEETITPWNFEEVVDKGASAQSFIERMTNFDKNLPNEKVLPKHSLLYEYFTVYNELTKVKYVTEGMRKPAFLSGEQKKAIVDLLFKTNRKVTVKQLKEDYFKKIECFDSVEISGVEDRFNASLGTYHDLLKIIKDKDFLDNEENEDILEDIVLTLTLFEDREMIEERLKTYAHLFDDKVMKQLKRRRYTGWGRLSRKLINGIRDKQSGKTILDFLKSDGFANRNFMQLIHDDSLTFKEDIQKAQVSGQGDSLHEHIANLAGSPAIKKGILQTVKVVDELVKVMGRHKPENIVIEMARENQTTQKGQKNSRERMKRIEEGIKELGSQILKEHPVENTQLQNEKLYLYYLQNGRDMYVDQELDINRLSDYDVDHIVPQSFLKDDSIDNKVLTRSDKARGKSDNVPSEEVVKKMKNYWRQLLNAKLITQRKFDNLTKAERGGLSELDKAGFIKRQLVETRQITKHVAQILDSRMNTKYDENDKLIREVKVITLKSKLVSDFRKDFQFYKVREINNYHHAHDAYLNAVVGTALIKKYPKLESEFVYGDYKVYDVRKMIAKSEQEIGKATAKYFFYSNIMNFFKTEITLANGEIRKRPLIETNGETGEIVWDKGRDFATVRKVLSMPQVNIVKKTEVQTGGFSKESILPKRNSDKLIARKKDWDPKKYGGFDSPTVAYSVLVVAKVEKGKSKKLKSVKELLGITIMERSSFEKNPIDFLEAKGYKEVKKDLIIKLPKYSLFELENGRKRMLASAGELQKGNELALPSKYVNFLYLASHYEKLKGSPEDNEQKQLFVEQHKHYLDEIIEQISEFSKRVILADANLDKVLSAYNKHRDKPIREQAENIIHLFTLTNLGAPAAFKYFDTTIDRKRYTSTKEVLDATLIHQSITGLYETRIDLSQLGGDGGGSSGGSGGGGGHLPPPPQVDQFPLNLPERLQALNDLVSKALEAGHIEPYSGPGNNPVFPVKKPNGKWRFIHDLRATNAITTTLTSPSPGPPDLTSLPTALPHLQTIDLTDAFFQIPLPKQYQPYFAFTIPQPCNYGPGTRYAWTVLPQGFKNSPTLFQQQLAAVLNPMRKMFPTSTIVQYMDDILLASPTNEELQQLSQLTLQALTTHGLPISQEKTQQTPGQIRFLGQVISPNHITYESTPTIPIKSQWTLTELQVILGEIQWVSKGTPILRKHLQSLYSALHPYRDPRACITLTPQQLHALHAIQQALQHNCRGRLNPALPLLGLISLSTSGTTSVIFQPKQNWPLAWLHTPHPPTSLCPWGHLLACTILTLDKYTLQHYGQLCQSFHHNMSKQALCDFLRNSPHPSVGILIHHMGRFHNLGSQPSGPWKTLLHLPTLLQEPRLLRPIFTLSPVVLDTAPCLFSDGSPQKAAYVLWDQTILQQDITPLPSHETHSAQKGELLALICGLRAAKPWPSLNIFLDSKYLIKYLHSLAIGAFLGTSAHQTLQAALPPLLQGKTIYLHHVRSHTNLPDPISTFNEYTDSLILAPLVPLAGKRTADGSEFEKRTADGSEFESPKKKAKVE

SEQ ID NO: 1536 - protein, 2007 aa, synthetic construct
MPAAKRVKLDGGDKKYSIGLDIGTNSVGWAVITDEYKVPSKKFKVLGNTDRHSIKKNLIGALLFDSGETAEATRLKRTARRRYTRRKNRICYLQEIFSNEMAKVDDSFFHRLEESFLVEEDKKHERHPIFGNIVDEVAYHEKYPTIYHLRKKLVDSTDKADLRLIYLALAHMIKFRGHFLIEGDLNPDNSDVDKLFIQLVQTYNQLFEENPINASGVDAKAILSARLSKSRRLENLIAQLPGEKKNGLFGNLIALSLGLTPNFKSNFDLAEDAKLQLSKDTYDDDLDNLLAQIGDQYADLFLAAKNLSDAILLSDILRVNTEITKAPLSASMIKRYDEHHQDLTLLKALVRQQLPEKYKEIFFDQSKNGYAGYIDGGASQEEFYKFIKPILEKMDGTEELLVKLNREDLLRKQRTFDNGSIPHQIHLGELHAILRRQEDFYPFLKDNREKIEKILTFRIPYYVGPLARGNSRFAWMTRKSEETITPWNFEEVVDKGASAQSFIERMTNFDKNLPNEKVLPKHSLLYEYFTVYNELTKVKYVTEGMRKPAFLSGEQKKAIVDLLFKTNRKVTVKQLKEDYFKKIECFDSVEISGVEDRFNASLGTYHDLLKIIKDKDFLDNEENEDILEDIVLTLTLFEDREMIEERLKTYAHLFDDKVMKQLKRRRYTGWGRLSRKLINGIRDKQSGKTILDFLKSDGFANRNFMQLIHDDSLTFKEDIQKAQVSGQGDSLHEHIANLAGSPAIKKGILQTVKVVDELVKVMGRHKPENIVIEMARENQTTQKGQKNSRERMKRIEEGIKELGSQILKEHPVENTQLQNEKLYLYYLQNGRDMYVDQELDINRLSDYDVDHIVPQSFLKDDSIDNKVLTRSDKARGKSDNVPSEEVVKKMKNYWRQLLNAKLITQRKFDNLTKAERGGLSELDKAGFIKRQLVETRQITKHVAQILDSRMNTKYDENDKLIREVKVITLKSKLVSDFRKDFQFYKVREINNYHHAHDAYLNAVVGTALIKKYPKLESEFVYGDYKVYDVRKMIAKSEQEIGKATAKYFFYSNIMNFFKTEITLANGEIRKRPLIETNGETGEIVWDKGRDFATVRKVLSMPQVNIVKKTEVQTGGFSKESILPKRNSDKLIARKKDWDPKKYGGFDSPTVAYSVLVVAKVEKGKSKKLKSVKELLGITIMERSSFEKNPIDFLEAKGYKEVKKDLIIKLPKYSLFELENGRKRMLASAGELQKGNELALPSKYVNFLYLASHYEKLKGSPEDNEQKQLFVEQHKHYLDEIIEQISEFSKRVILADANLDKVLSAYNKHRDKPIREQAENIIHLFTLTNLGAPAAFKYFDTTIDRKRYTSTKEVLDATLIHQSITGLYETRIDLSQLGGDGGPAPAPAPAPGGHLPPPPQVDQFPLNLPERLQALNDLVSKALEAGHIEPYSGPGNNPVFPVKKPNGKWRFIHDLRATNAITTTLTSPSPGPPDLTSLPTALPHLQTIDLTDAFFQIPLPKQYQPYFAFTIPQPCNYGPGTRYAWTVLPQGFKNSPTLFQQQLAAVLNPMRKMFPTSTIVQYMDDILLASPTNEELQQLSQLTLQALTTHGLPISQEKTQQTPGQIRFLGQVISPNHITYESTPTIPIKSQWTLTELQVILGEIQWVSKGTPILRKHLQSLYSALHPYRDPRACITLTPQQLHALHAIQQALQHNCRGRLNPALPLLGLISLSTSGTTSVIFQPKQNWPLAWLHTPHPPTSLCPWGHLLACTILTLDKYTLQHYGQLCQSFHHNMSKQALCDFLRNSPHPSVGILIHHMGRFHNLGSQPSGPWKTLLHLPTLLQEPRLLRPIFTLSPVVLDTAPCLFSDGSPQKAAYVLWDQTILQQDITPLPSHETHSAQKGELLALICGLRAAKPWPSLNIFLDSKYLIKYLHSLAIGAFLGTSAHQTLQAALPPLLQGKTIYLHHVRSHTNLPDPISTFNEYTDSLILAPLVPLAGKRTADGSEFEKRTADGSEFESPKKKAKVE

SEQ ID NO: 1537 - protein, 2010 aa, synthetic construct
MPAAKRVKLDGGDKKYSIGLDIGTNSVGWAVITDEYKVPSKKFKVLGNTDRHSIKKNLIGALLFDSGETAEATRLKRTARRRYTRRKNRICYLQEIFSNEMAKVDDSFFHRLEESFLVEEDKKHERHPIFGNIVDEVAYHEKYPTIYHLRKKLVDSTDKADLRLIYLALAHMIKFRGHFLIEGDLNPDNSDVDKLFIQLVQTYNQLFEENPINASGVDAKAILSARLSKSRRLENLIAQLPGEKKNGLFGNLIALSLGLTPNFKSNFDLAEDAKLQLSKDTYDDDLDNLLAQIGDQYADLFLAAKNLSDAILLSDILRVNTEITKAPLSASMIKRYDEHHQDLTLLKALVRQQLPEKYKEIFFDQSKNGYAGYIDGGASQEEFYKFIKPILEKMDGTEELLVKLNREDLLRKQRTFDNGSIPHQIHLGELHAILRRQEDFYPFLKDNREKIEKILTFRIPYYVGPLARGNSRFAWMTRKSEETITPWNFEEVVDKGASAQSFIERMTNFDKNLPNEKVLPKHSLLYEYFTVYNELTKVKYVTEGMRKPAFLSGEQKKAIVDLLFKTNRKVTVKQLKEDYFKKIECFDSVEISGVEDRFNASLGTYHDLLKIIKDKDFLDNEENEDILEDIVLTLTLFEDREMIEERLKTYAHLFDDKVMKQLKRRRYTGWGRLSRKLINGIRDKQSGKTILDFLKSDGFANRNFMQLIHDDSLTFKEDIQKAQVSGQGDSLHEHIANLAGSPAIKKGILQTVKVVDELVKVMGRHKPENIVIEMARENQTTQKGQKNSRERMKRIEEGIKELGSQILKEHPVENTQLQNEKLYLYYLQNGRDMYVDQELDINRLSDYDVDHIVPQSFLKDDSIDNKVLTRSDKARGKSDNVPSEEVVKKMKNYWRQLLNAKLITQRKFDNLTKAERGGLSELDKAGFIKRQLVETRQITKHVAQILDSRMNTKYDENDKLIREVKVITLKSKLVSDFRKDFQFYKVREINNYHHAHDAYLNAVVGTALIKKYPKLESEFVYGDYKVYDVRKMIAKSEQEIGKATAKYFFYSNIMNFFKTEITLANGEIRKRPLIETNGETGEIVWDKGRDFATVRKVLSMPQVNIVKKTEVQTGGFSKESILPKRNSDKLIARKKDWDPKKYGGFDSPTVAYSVLVVAKVEKGKSKKLKSVKELLGITIMERSSFEKNPIDFLEAKGYKEVKKDLIIKLPKYSLFELENGRKRMLASAGELQKGNELALPSKYVNFLYLASHYEKLKGSPEDNEQKQLFVEQHKHYLDEIIEQISEFSKRVILADANLDKVLSAYNKHRDKPIREQAENIIHLFTLTNLGAPAAFKYFDTTIDRKRYTSTKEVLDATLIHQSITGLYETRIDLSQLGGDGGEAAAKEAAAKEAAAKGGPLGTSDSPVTHADPIDWKSEEPVWVDQWPLTQEKLSAAQQLVQEQLRLGHIEPSTSAWNSPIFVIKKKSGKWRLLQDLRKVNETMMHMGALQPGLPTPSAIPDKSYIIVIDLKDCFYTIPLAPQDCKRFAFSLPSVNFKEPMQRYQWRVLPQGMTNSPTLCQKFVATAIAPVRQRFPQLYLVHYMDDILLAHTDEHLLYQAFSILKQHLSLNGLVIADEKIQTHFPYNYLGFSLYPRVYNTQLVKLQTDHLKTLNDFQKLLGDINWIRPYLKLPTYTLQPLFDILKGDSDPASPRTLSLEGRTALQSIEEAIRQQQITYCDYQRSWGLYILPTPRAPTGVLYQDKPLRWIYLSATPTKHLLPYYELVAKIIAKGRHEAIQYFGMEPPFICVPYALEQQDWLFQFSDNWSIAFANYPGQITHHYPSDKLLQFASSHAFIFPKIVRRQPIPEATLIFTDGSSNGTAALIINHQTYYAQTSFSSAQVVELFAVHQALLTVPTSFNLFTDSSYVVGALQMIETVPIIGTTSPEVLNLFTLIQQVLHCRQHPCFFGHIRAHSTLPGALVQGNHTADVLTKQVFFQSAGKRTADGSEFEKRTADGSEFESPKKKAKVE

SEQ ID NO: 1538 - protein, 2001 aa, synthetic construct
MPAAKRVKLDGGDKKYSIGLDIGTNSVGWAVITDEYKVPSKKFKVLGNTDRHSIKKNLIGALLFDSGETAEATRLKRTARRRYTRRKNRICYLQEIFSNEMAKVDDSFFHRLEESFLVEEDKKHERHPIFGNIVDEVAYHEKYPTIYHLRKKLVDSTDKADLRLIYLALAHMIKFRGHFLIEGDLNPDNSDVDKLFIQLVQTYNQLFEENPINASGVDAKAILSARLSKSRRLENLIAQLPGEKKNGLFGNLIALSLGLTPNFKSNFDLAEDAKLQLSKDTYDDDLDNLLAQIGDQYADLFLAAKNLSDAILLSDILRVNTEITKAPLSASMIKRYDEHHQDLTLLKALVRQQLPEKYKEIFFDQSKNGYAGYIDGGASQEEFYKFIKPILEKMDGTEELLVKLNREDLLRKQRTFDNGSIPHQIHLGELHAILRRQEDFYPFLKDNREKIEKILTFRIPYYVGPLARGNSRFAWMTRKSEETITPWNFEEVVDKGASAQSFIERMTNFDKNLPNEKVLPKHSLLYEYFTVYNELTKVKYVTEGMRKPAFLSGEQKKAIVDLLFKTNRKVTVKQLKEDYFKKIECFDSVEISGVEDRFNASLGTYHDLLKIIKDKDFLDNEENEDILEDIVLTLTLFEDREMIEERLKTYAHLFDDKVMKQLKRRRYTGWGRLSRKLINGIRDKQSGKTILDFLKSDGFANRNFMQLIHDDSLTFKEDIQKAQVSGQGDSLHEHIANLAGSPAIKKGILQTVKVVDELVKVMGRHKPENIVIEMARENQTTQKGQKNSRERMKRIEEGIKELGSQILKEHPVENTQLQNEKLYLYYLQNGRDMYVDQELDINRLSDYDVDHIVPQSFLKDDSIDNKVLTRSDKARGKSDNVPSEEVVKKMKNYWRQLLNAKLITQRKFDNLTKAERGGLSELDKAGFIKRQLVETRQITKHVAQILDSRMNTKYDENDKLIREVKVITLKSKLVSDFRKDFQFYKVREINNYHHAHDAYLNAVVGTALIKKYPKLESEFVYGDYKVYDVRKMIAKSEQEIGKATAKYFFYSNIMNFFKTEITLANGEIRKRPLIETNGETGEIVWDKGRDFATVRKVLSMPQVNIVKKTEVQTGGFSKESILPKRNSDKLIARKKDWDPKKYGGFDSPTVAYSVLVVAKVEKGKSKKLKSVKELLGITIMERSSFEKNPIDFLEAKGYKEVKKDLIIKLPKYSLFELENGRKRMLASAGELQKGNELALPSKYVNFLYLASHYEKLKGSPEDNEQKQLFVEQHKHYLDEIIEQISEFSKRVILADANLDKVLSAYNKHRDKPIREQAENIIHLFTLTNLGAPAAFKYFDTTIDRKRYTSTKEVLDATLIHQSITGLYETRIDLSQLGGDGGGSSGGGGGPLGTSDSPVTHADPIDWKSEEPVWVDQWPLTQEKLSAAQQLVQEQLRLGHIEPSTSAWNSPIFVIKKKSGKWRLLQDLRKVNETMMHMGALQPGLPTPSAIPDKSYIIVIDLKDCFYTIPLAPQDCKRFAFSLPSVNFKEPMQRYQWRVLPQGMTNSPTLCQKFVATAIAPVRQRFPQLYLVHYMDDILLAHTDEHLLYQAFSILKQHLSLNGLVIADEKIQTHFPYNYLGFSLYPRVYNTQLVKLQTDHLKTLNDFQKLLGDINWIRPYLKLPTYTLQPLFDILKGDSDPASPRTLSLEGRTALQSIEEAIRQQQITYCDYQRSWGLYILPTPRAPTGVLYQDKPLRWIYLSATPTKHLLPYYELVAKIIAKGRHEAIQYFGMEPPFICVPYALEQQDWLFQFSDNWSIAFANYPGQITHHYPSDKLLQFASSHAFIFPKIVRRQPIPEATLIFTDGSSNGTAALIINHQTYYAQTSFSSAQVVELFAVHQALLTVPTSFNLFTDSSYVVGALQMIETVPIIGTTSPEVLNLFTLIQQVLHCRQHPCFFGHIRAHSTLPGALVQGNHTADVLTKQVFFQSAGKRTADGSEFEKRTADGSEFESPKKKAKVE

SEQ ID NO: 1539 - protein, 2106 aa, synthetic construct
MPAAKRVKLDGGDKKYSIGLDIGTNSVGWAVITDEYKVPSKKFKVLGNTDRHSIKKNLIGALLFDSGETAEATRLKRTARRRYTRRKNRICYLQEIFSNEMAKVDDSFFHRLEESFLVEEDKKHERHPIFGNIVDEVAYHEKYPTIYHLRKKLVDSTDKADLRLIYLALAHMIKFRGHFLIEGDLNPDNSDVDKLFIQLVQTYNQLFEENPINASGVDAKAILSARLSKSRRLENLIAQLPGEKKNGLFGNLIALSLGLTPNFKSNFDLAEDAKLQLSKDTYDDDLDNLLAQIGDQYADLFLAAKNLSDAILLSDILRVNTEITKAPLSASMIKRYDEHHQDLTLLKALVRQQLPEKYKEIFFDQSKNGYAGYIDGGASQEEFYKFIKPILEKMDGTEELLVKLNREDLLRKQRTFDNGSIPHQIHLGELHAILRRQEDFYPFLKDNREKIEKILTFRIPYYVGPLARGNSRFAWMTRKSEETITPWNFEEVVDKGASAQSFIERMTNFDKNLPNEKVLPKHSLLYEYFTVYNELTKVKYVTEGMRKPAFLSGEQKKAIVDLLFKTNRKVTVKQLKEDYFKKIECFDSVEISGVEDRFNASLGTYHDLLKIIKDKDFLDNEENEDILEDIVLTLTLFEDREMIEERLKTYAHLFDDKVMKQLKRRRYTGWGRLSRKLINGIRDKQSGKTILDFLKSDGFANRNFMQLIHDDSLTFKEDIQKAQVSGQGDSLHEHIANLAGSPAIKKGILQTVKVVDELVKVMGRHKPENIVIEMARENQTTQKGQKNSRERMKRIEEGIKELGSQILKEHPVENTQLQNEKLYLYYLQNGRDMYVDQELDINRLSDYDVDHIVPQSFLKDDSIDNKVLTRSDKARGKSDNVPSEEVVKKMKNYWRQLLNAKLITQRKFDNLTKAERGGLSELDKAGFIKRQLVETRQITKHVAQILDSRMNTKYDENDKLIREVKVITLKSKLVSDFRKDFQFYKVREINNYHHAHDAYLNAVVGTALIKKYPKLESEFVYGDYKVYDVRKMIAKSEQEIGKATAKYFFYSNIMNFFKTEITLANGEIRKRPLIETNGETGEIVWDKGRDFATVRKVLSMPQVNIVKKTEVQTGGFSKESILPKRNSDKLIARKKDWDPKKYGGFDSPTVAYSVLVVAKVEKGKSKKLKSVKELLGITIMERSSFEKNPIDFLEAKGYKEVKKDLIIKLPKYSLFELENGRKRMLASAGELQKGNELALPSKYVNFLYLASHYEKLKGSPEDNEQKQLFVEQHKHYLDEIIEQISEFSKRVILADANLDKVLSAYNKHRDKPIREQAENIIHLFTLTNLGAPAAFKYFDTTIDRKRYTSTKEVLDATLIHQSITGLYETRIDLSQLGGDGGEAAAKGGGGSEAAAKGGTVSLQDEHRLFDIPVTTSLPDVWLQDFPQAWAETGGLGRAKCQAPIIIDLKPTAVPVSIKQYPMSLEAHMGIRQHIIKFLELGVLRPCRSPWNTPLLPVKKPGTQDYRPVQDLREINKRTVDIHPTVPNPYNLLSTLKPDYSWYTVLDLKDAFFCLPLAPQSQELFAFEWKDPERGISGQLTWTRLPQGFKNSPTLFNEALHRDLTDFRTQHPEVTLLQYVDDLLLAAPTKKACTQGTRHLLQELGEKGYRASAKKAQICQTKVTYLGYILSEGKRWLTPGRIETVARIPPPRNPREVREFLGTAGFCRLWIPGFAELAAPLYALTKPSTPFTWQTEHQLAFEALKKALLSAPALGLPDTSKPFTLFLDERQGIAKGVLTQKLGPWKRPVAYLSKKLDPVAAGWPPCLRIMAATAMLVKDSAKLTLGQPLTVITPHTLEAIVRQPPDRWITNARLTHYQALLLDTDRVQFGPPVTLNPATLLPVPENQPSPHDCRQVLAETHGTREDLKDQELPDADHTWYTDGSSYLDSGTRRAGAAVVDGHNTIWAQSLPPGTSAQKAELIALTKALELSKGKKANIYTDSRYAFATAHTHGSIYERRGWLTSEGKEIKNKAEIIALLKALFLPQEVAIIHCPGHQKGQDPVAVGNRQADRVARQAAMAEVLTLATEPDNTSHITAGKRTADGSEFEKRTADGSEFESPKKKAKVE

SEQ ID NO: 1540 - protein, 2102 aa, synthetic construct
MPAAKRVKLDGGDKKYSIGLDIGTNSVGWAVITDEYKVPSKKFKVLGNTDRHSIKKNLIGALLFDSGETAEATRLKRTARRRYTRRKNRICYLQEIFSNEMAKVDDSFFHRLEESFLVEEDKKHERHPIFGNIVDEVAYHEKYPTIYHLRKKLVDSTDKADLRLIYLALAHMIKFRGHFLIEGDLNPDNSDVDKLFIQLVQTYNQLFEENPINASGVDAKAILSARLSKSRRLENLIAQLPGEKKNGLFGNLIALSLGLTPNFKSNFDLAEDAKLQLSKDTYDDDLDNLLAQIGDQYADLFLAAKNLSDAILLSDILRVNTEITKAPLSASMIKRYDEHHQDLTLLKALVRQQLPEKYKEIFFDQSKNGYAGYIDGGASQEEFYKFIKPILEKMDGTEELLVKLNREDLLRKQRTFDNGSIPHQIHLGELHAILRRQEDFYPFLKDNREKIEKILTFRIPYYVGPLARGNSRFAWMTRKSEETITPWNFEEVVDKGASAQSFIERMTNFDKNLPNEKVLPKHSLLYEYFTVYNELTKVKYVTEGMRKPAFLSGEQKKAIVDLLFKTNRKVTVKQLKEDYFKKIECFDSVEISGVEDRFNASLGTYHDLLKIIKDKDFLDNEENEDILEDIVLTLTLFEDREMIEERLKTYAHLFDDKVMKQLKRRRYTGWGRLSRKLINGIRDKQSGKTILDFLKSDGFANRNFMQLIHDDSLTFKEDIQKAQVSGQGDSLHEHIANLAGSPAIKKGILQTVKVVDELVKVMGRHKPENIVIEMARENQTTQKGQKNSRERMKRIEEGIKELGSQILKEHPVENTQLQNEKLYLYYLQNGRDMYVDQELDINRLSDYDVDHIVPQSFLKDDSIDNKVLTRSDKARGKSDNVPSEEVVKKMKNYWRQLLNAKLITQRKFDNLTKAERGGLSELDKAGFIKRQLVETRQITKHVAQILDSRMNTKYDENDKLIREVKVITLKSKLVSDFRKDFQFYKVREINNYHHAHDAYLNAVVGTALIKKYPKLESEFVYGDYKVYDVRKMIAKSEQEIGKATAKYFFYSNIMNFFKTEITLANGEIRKRPLIETNGETGEIVWDKGRDFATVRKVLSMPQVNIVKKTEVQTGGFSKESILPKRNSDKLIARKKDWDPKKYGGFDSPTVAYSVLVVAKVEKGKSKKLKSVKELLGITIMERSSFEKNPIDFLEAKGYKEVKKDLIIKLPKYSLFELENGRKRMLASAGELQKGNELALPSKYVNFLYLASHYEKLKGSPEDNEQKQLFVEQHKHYLDEIIEQISEFSKRVILADANLDKVLSAYNKHRDKPIREQAENIIHLFTLTNLGAPAAFKYFDTTIDRKRYTSTKEVLDATLIHQSITGLYETRIDLSQLGGDGGGGGGSSEAAAKGGTVSLQDEHRLFDIPVTTSLPDVWLQDFPQAWAETGGLGRAKCQAPIIIDLKPTAVPVSIKQYPMSLEAHMGIRQHIIKFLELGVLRPCRSPWNTPLLPVKKPGTQDYRPVQDLREINKRTVDIHPTVPNPYNLLSTLKPDYSWYTVLDLKDAFFCLPLAPQSQELFAFEWKDPERGISGQLTWTRLPQGFKNSPTLFNEALHRDLTDFRTQHPEVTLLQYVDDLLLAAPTKKACTQGTRHLLQELGEKGYRASAKKAQICQTKVTYLGYILSEGKRWLTPGRIETVARIPPPRNPREVREFLGTAGFCRLWIPGFAELAAPLYALTKPSTPFTWQTEHQLAFEALKKALLSAPALGLPDTSKPFTLFLDERQGIAKGVLTQKLGPWKRPVAYLSKKLDPVAAGWPPCLRIMAATAMLVKDSAKLTLGQPLTVITPHTLEAIVRQPPDRWITNARLTHYQALLLDTDRVQFGPPVTLNPATLLPVPENQPSPHDCRQVLAETHGTREDLKDQELPDADHTWYTDGSSYLDSGTRRAGAAVVDGHNTIWAQSLPPGTSAQKAELIALTKALELSKGKKANIYTDSRYAFATAHTHGSIYERRGWLTSEGKEIKNKAEIIALLKALFLPQEVAIIHCPGHQKGQDPVAVGNRQADRVARQAAMAEVLTLATEPDNTSHITAGKRTADGSEFEKRTADGSEFESPKKKAKVE

SEQ ID NO: 1541 - protein, 2094 aa, synthetic construct
MPAAKRVKLDGGDKKYSIGLDIGTNSVGWAVITDEYKVPSKKFKVLGNTDRHSIKKNLIGALLFDSGETAEATRLKRTARRRYTRRKNRICYLQEIFSNEMAKVDDSFFHRLEESFLVEEDKKHERHPIFGNIVDEVAYHEKYPTIYHLRKKLVDSTDKADLRLIYLALAHMIKFRGHFLIEGDLNPDNSDVDKLFIQLVQTYNQLFEENPINASGVDAKAILSARLSKSRRLENLIAQLPGEKKNGLFGNLIALSLGLTPNFKSNFDLAEDAKLQLSKDTYDDDLDNLLAQIGDQYADLFLAAKNLSDAILLSDILRVNTEITKAPLSASMIKRYDEHHQDLTLLKALVRQQLPEKYKEIFFDQSKNGYAGYIDGGASQEEFYKFIKPILEKMDGTEELLVKLNREDLLRKQRTFDNGSIPHQIHLGELHAILRRQEDFYPFLKDNREKIEKILTFRIPYYVGPLARGNSRFAWMTRKSEETITPWNFEEVVDKGASAQSFIERMTNFDKNLPNEKVLPKHSLLYEYFTVYNELTKVKYVTEGMRKPAFLSGEQKKAIVDLLFKTNRKVTVKQLKEDYFKKIECFDSVEISGVEDRFNASLGTYHDLLKIIKDKDFLDNEENEDILEDIVLTLTLFEDREMIEERLKTYAHLFDDKVMKQLKRRRYTGWGRLSRKLINGIRDKQSGKTILDFLKSDGFANRNFMQLIHDDSLTFKEDIQKAQVSGQGDSLHEHIANLAGSPAIKKGILQTVKVVDELVKVMGRHKPENIVIEMARENQTTQKGQKNSRERMKRIEEGIKELGSQILKEHPVENTQLQNEKLYLYYLQNGRDMYVDQELDINRLSDYDVDHIVPQSFLKDDSIDNKVLTRSDKARGKSDNVPSEEVVKKMKNYWRQLLNAKLITQRKFDNLTKAERGGLSELDKAGFIKRQLVETRQITKHVAQILDSRMNTKYDENDKLIREVKVITLKSKLVSDFRKDFQFYKVREINNYHHAHDAYLNAVVGTALIKKYPKLESEFVYGDYKVYDVRKMIAKSEQEIGKATAKYFFYSNIMNFFKTEITLANGEIRKRPLIETNGETGEIVWDKGRDFATVRKVLSMPQVNIVKKTEVQTGGFSKESILPKRNSDKLIARKKDWDPKKYGGFDSPTVAYSVLVVAKVEKGKSKKLKSVKELLGITIMERSSFEKNPIDFLEAKGYKEVKKDLIIKLPKYSLFELENGRKRMLASAGELQKGNELALPSKYVNFLYLASHYEKLKGSPEDNEQKQLFVEQHKHYLDEIIEQISEFSKRVILADANLDKVLSAYNKHRDKPIREQAENIIHLFTLTNLGAPAAFKYFDTTIDRKRYTSTKEVLDATLIHQSITGLYETRIDLSQLGGDGGGGSGGTVSLQDEHRLFDIPVTTSLPDVWLQDFPQAWAETGGLGRAKCQAPIIIDLKPTAVPVSIKQYPMSLEAHMGIRQHIIKFLELGVLRPCRSPWNTPLLPVKKPGTQDYRPVQDLREINKRTVDIHPTVPNPYNLLSTLKPDYSWYTVLDLKDAFFCLPLAPQSQELFAFEWKDPERGISGQLTWTRLPQGFKNSPTLFNEALHRDLTDFRTQHPEVTLLQYVDDLLLAAPTKKACTQGTRHLLQELGEKGYRASAKKAQICQTKVTYLGYILSEGKRWLTPGRIETVARIPPPRNPREVREFLGTAGFCRLWIPGFAELAAPLYALTKPSTPFTWQTEHQLAFEALKKALLSAPALGLPDTSKPFTLFLDERQGIAKGVLTQKLGPWKRPVAYLSKKLDPVAAGWPPCLRIMAATAMLVKDSAKLTLGQPLTVITPHTLEAIVRQPPDRWITNARLTHYQALLLDTDRVQFGPPVTLNPATLLPVPENQPSPHDCRQVLAETHGTREDLKDQELPDADHTWYTDGSSYLDSGTRRAGAAVVDGHNTIWAQSLPPGTSAQKAELIALTKALELSKGKKANIYTDSRYAFATAHTHGSIYERRGWLTSEGKEIKNKAEIIALLKALFLPQEVAIIHCPGHQKGQDPVAVGNRQADRVARQAAMAEVLTLATEPDNTSHITAGKRTADGSEFEKRTADGSEFESPKKKAKVE

SEQ ID NO: 1542 - protein, 2137 aa, synthetic construct
MPAAKRVKLDGGDKKYSIGLDIGTNSVGWAVITDEYKVPSKKFKVLGNTDRHSIKKNLIGALLFDSGETAEATRLKRTARRRYTRRKNRICYLQEIFSNEMAKVDDSFFHRLEESFLVEEDKKHERHPIFGNIVDEVAYHEKYPTIYHLRKKLVDSTDKADLRLIYLALAHMIKFRGHFLIEGDLNPDNSDVDKLFIQLVQTYNQLFEENPINASGVDAKAILSARLSKSRRLENLIAQLPGEKKNGLFGNLIALSLGLTPNFKSNFDLAEDAKLQLSKDTYDDDLDNLLAQIGDQYADLFLAAKNLSDAILLSDILRVNTEITKAPLSASMIKRYDEHHQDLTLLKALVRQQLPEKYKEIFFDQSKNGYAGYIDGGASQEEFYKFIKPILEKMDGTEELLVKLNREDLLRKQRTFDNGSIPHQIHLGELHAILRRQEDFYPFLKDNREKIEKILTFRIPYYVGPLARGNSRFAWMTRKSEETITPWNFEEVVDKGASAQSFIERMTNFDKNLPNEKVLPKHSLLYEYFTVYNELTKVKYVTEGMRKPAFLSGEQKKAIVDLLFKTNRKVTVKQLKEDYFKKIECFDSVEISGVEDRFNASLGTYHDLLKIIKDKDFLDNEENEDILEDIVLTLTLFEDREMIEERLKTYAHLFDDKVMKQLKRRRYTGWGRLSRKLINGIRDKQSGKTILDFLKSDGFANRNFMQLIHDDSLTFKEDIQKAQVSGQGDSLHEHIANLAGSPAIKKGILQTVKVVDELVKVMGRHKPENIVIEMARENQTTQKGQKNSRERMKRIEEGIKELGSQILKEHPVENTQLQNEKLYLYYLQNGRDMYVDQELDINRLSDYDVDHIVPQSFLKDDSIDNKVLTRSDKARGKSDNVPSEEVVKKMKNYWRQLLNAKLITQRKFDNLTKAERGGLSELDKAGFIKRQLVETRQITKHVAQILDSRMNTKYDENDKLIREVKVITLKSKLVSDFRKDFQFYKVREINNYHHAHDAYLNAVVGTALIKKYPKLESEFVYGDYKVYDVRKMIAKSEQEIGKATAKYFFYSNIMNFFKTEITLANGEIRKRPLIETNGETGEIVWDKGRDFATVRKVLSMPQVNIVKKTEVQTGGFSKESILPKRNSDKLIARKKDWDPKKYGGFDSPTVAYSVLVVAKVEKGKSKKLKSVKELLGITIMERSSFEKNPIDFLEAKGYKEVKKDLIIKLPKYSLFELENGRKRMLASAGELQKGNELALPSKYVNFLYLASHYEKLKGSPEDNEQKQLFVEQHKHYLDEIIEQISEFSKRVILADANLDKVLSAYNKHRDKPIREQAENIIHLFTLTNLGAPAAFKYFDTTIDRKRYTSTKEVLDATLIHQSITGLYETRIDLSQLGGDGGAEAAAKEAAAKEAAAKEAAAKALEAEAAAKEAAAKEAAAKEAAAKAGGTVSLQDEHRLFDIPVTTSLPDVWLQDFPQAWAETGGLGRAKCQAPIIIDLKPTAVPVSIKQYPMSLEAHMGIRQHIIKFLELGVLRPCRSPWNTPLLPVKKPGTQDYRPVQDLREINKRTVDIHPTVPNPYNLLSTLKPDYSWYTVLDLKDAFFCLPLAPQSQELFAFEWKDPERGISGQLTWTRLPQGFKNSPTLFNEALHRDLTDFRTQHPEVTLLQYVDDLLLAAPTKKACTQGTRHLLQELGEKGYRASAKKAQICQTKVTYLGYILSEGKRWLTPGRIETVARIPPPRNPREVREFLGTAGFCRLWIPGFAELAAPLYALTKPSTPFTWQTEHQLAFEALKKALLSAPALGLPDTSKPFTLFLDERQGIAKGVLTQKLGPWKRPVAYLSKKLDPVAAGWPPCLRIMAATAMLVKDSAKLTLGQPLTVITPHTLEAIVRQPPDRWITNARLTHYQALLLDTDRVQFGPPVTLNPATLLPVPENQPSPHDCRQVLAETHGTREDLKDQELPDADHTWYTDGSSYLDSGTRRAGAAVVDGHNTIWAQSLPPGTSAQKAELIALTKALELSKGKKANIYTDSRYAFATAHTHGSIYERRGWLTSEGKEIKNKAEIIALLKALFLPQEVAIIHCPGHQKGQDPVAVGNRQADRVARQAAMAEVLTLATEPDNTSHITAGKRTADGSEFEKRTADGSEFESPKKKAKVE

SEQ ID NO: 1543 - protein, 2116 aa, synthetic construct
MPAAKRVKLDGGDKKYSIGLDIGTNSVGWAVITDEYKVPSKKFKVLGNTDRHSIKKNLIGALLFDSGETAEATRLKRTARRRYTRRKNRICYLQEIFSNEMAKVDDSFFHRLEESFLVEEDKKHERHPIFGNIVDEVAYHEKYPTIYHLRKKLVDSTDKADLRLIYLALAHMIKFRGHFLIEGDLNPDNSDVDKLFIQLVQTYNQLFEENPINASGVDAKAILSARLSKSRRLENLIAQLPGEKKNGLFGNLIALSLGLTPNFKSNFDLAEDAKLQLSKDTYDDDLDNLLAQIGDQYADLFLAAKNLSDAILLSDILRVNTEITKAPLSASMIKRYDEHHQDLTLLKALVRQQLPEKYKEIFFDQSKNGYAGYIDGGASQEEFYKFIKPILEKMDGTEELLVKLNREDLLRKQRTFDNGSIPHQIHLGELHAILRRQEDFYPFLKDNREKIEKILTFRIPYYVGPLARGNSRFAWMTRKSEETITPWNFEEVVDKGASAQSFIERMTNFDKNLPNEKVLPKHSLLYEYFTVYNELTKVKYVTEGMRKPAFLSGEQKKAIVDLLFKTNRKVTVKQLKEDYFKKIECFDSVEISGVEDRFNASLGTYHDLLKIIKDKDFLDNEENEDILEDIVLTLTLFEDREMIEERLKTYAHLFDDKVMKQLKRRRYTGWGRLSRKLINGIRDKQSGKTILDFLKSDGFANRNFMQLIHDDSLTFKEDIQKAQVSGQGDSLHEHIANLAGSPAIKKGILQTVKVVDELVKVMGRHKPENIVIEMARENQTTQKGQKNSRERMKRIEEGIKELGSQILKEHPVENTQLQNEKLYLYYLQNGRDMYVDQELDINRLSDYDVDHIVPQSFLKDDSIDNKVLTRSDKARGKSDNVPSEEVVKKMKNYWRQLLNAKLITQRKFDNLTKAERGGLSELDKAGFIKRQLVETRQITKHVAQILDSRMNTKYDENDKLIREVKVITLKSKLVSDFRKDFQFYKVREINNYHHAHDAYLNAVVGTALIKKYPKLESEFVYGDYKVYDVRKMIAKSEQEIGKATAKYFFYSNIMNFFKTEITLANGEIRKRPLIETNGETGEIVWDKGRDFATVRKVLSMPQVNIVKKTEVQTGGFSKESILPKRNSDKLIARKKDWDPKKYGGFDSPTVAYSVLVVAKVEKGKSKKLKSVKELLGITIMERSSFEKNPIDFLEAKGYKEVKKDLIIKLPKYSLFELENGRKRMLASAGELQKGNELALPSKYVNFLYLASHYEKLKGSPEDNEQKQLFVEQHKHYLDEIIEQISEFSKRVILADANLDKVLSAYNKHRDKPIREQAENIIHLFTLTNLGAPAAFKYFDTTIDRKRYTSTKEVLDATLIHQSITGLYETRIDLSQLGGDGGGGGGSGGGGSGGGGSGGGGSGGGGSGGTVSLQDEHRLFDIPVTTSLPDVWLQDFPQAWAETGGLGRAKCQAPIIIDLKPTAVPVSIKQYPMSLEAHMGIRQHIIKFLELGVLRPCRSPWNTPLLPVKKPGTQDYRPVQDLREINKRTVDIHPTVPNPYNLLSTLKPDYSWYTVLDLKDAFFCLPLAPQSQELFAFEWKDPERGISGQLTWTRLPQGFKNSPTLFNEALHRDLTDFRTQHPEVTLLQYVDDLLLAAPTKKACTQGTRHLLQELGEKGYRASAKKAQICQTKVTYLGYILSEGKRWLTPGRIETVARIPPPRNPREVREFLGTAGFCRLWIPGFAELAAPLYALTKPSTPFTWQTEHQLAFEALKKALLSAPALGLPDTSKPFTLFLDERQGIAKGVLTQKLGPWKRPVAYLSKKLDPVAAGWPPCLRIMAATAMLVKDSAKLTLGQPLTVITPHTLEAIVRQPPDRWITNARLTHYQALLLDTDRVQFGPPVTLNPATLLPVPENQPSPHDCRQVLAETHGTREDLKDQELPDADHTWYTDGSSYLDSGTRRAGAAVVDGHNTIWAQSLPPGTSAQKAELIALTKALELSKGKKANIYTDSRYAFATAHTHGSIYERRGWLTSEGKEIKNKAEIIALLKALFLPQEVAIIHCPGHQKGQDPVAVGNRQADRVARQAAMAEVLTLATEPDNTSHITAGKRTADGSEFEKRTADGSEFESPKKKAKVE

SEQ ID NO: 1544 - protein, 2099 aa, synthetic construct
MPAAKRVKLDGGDKKYSIGLDIGTNSVGWAVITDEYKVPSKKFKVLGNTDRHSIKKNLIGALLFDSGETAEATRLKRTARRRYTRRKNRICYLQEIFSNEMAKVDDSFFHRLEESFLVEEDKKHERHPIFGNIVDEVAYHEKYPTIYHLRKKLVDSTDKADLRLIYLALAHMIKFRGHFLIEGDLNPDNSDVDKLFIQLVQTYNQLFEENPINASGVDAKAILSARLSKSRRLENLIAQLPGEKKNGLFGNLIALSLGLTPNFKSNFDLAEDAKLQLSKDTYDDDLDNLLAQIGDQYADLFLAAKNLSDAILLSDILRVNTEITKAPLSASMIKRYDEHHQDLTLLKALVRQQLPEKYKEIFFDQSKNGYAGYIDGGASQEEFYKFIKPILEKMDGTEELLVKLNREDLLRKQRTFDNGSIPHQIHLGELHAILRRQEDFYPFLKDNREKIEKILTFRIPYYVGPLARGNSRFAWMTRKSEETITPWNFEEVVDKGASAQSFIERMTNFDKNLPNEKVLPKHSLLYEYFTVYNELTKVKYVTEGMRKPAFLSGEQKKAIVDLLFKTNRKVTVKQLKEDYFKKIECFDSVEISGVEDRFNASLGTYHDLLKIIKDKDFLDNEENEDILEDIVLTLTLFEDREMIEERLKTYAHLFDDKVMKQLKRRRYTGWGRLSRKLINGIRDKQSGKTILDFLKSDGFANRNFMQLIHDDSLTFKEDIQKAQVSGQGDSLHEHIANLAGSPAIKKGILQTVKVVDELVKVMGRHKPENIVIEMARENQTTQKGQKNSRERMKRIEEGIKELGSQILKEHPVENTQLQNEKLYLYYLQNGRDMYVDQELDINRLSDYDVDHIVPQSFLKDDSIDNKVLTRSDKARGKSDNVPSEEVVKKMKNYWRQLLNAKLITQRKFDNLTKAERGGLSELDKAGFIKRQLVETRQITKHVAQILDSRMNTKYDENDKLIREVKVITLKSKLVSDFRKDFQFYKVREINNYHHAHDAYLNAVVGTALIKKYPKLESEFVYGDYKVYDVRKMIAKSEQEIGKATAKYFFYSNIMNFFKTEITLANGEIRKRPLIETNGETGEIVWDKGRDFATVRKVLSMPQVNIVKKTEVQTGGFSKESILPKRNSDKLIARKKDWDPKKYGGFDSPTVAYSVLVVAKVEKGKSKKLKSVKELLGITIMERSSFEKNPIDFLEAKGYKEVKKDLIIKLPKYSLFELENGRKRMLASAGELQKGNELALPSKYVNFLYLASHYEKLKGSPEDNEQKQLFVEQHKHYLDEIIEQISEFSKRVILADANLDKVLSAYNKHRDKPIREQAENIIHLFTLTNLGAPAAFKYFDTTIDRKRYTSTKEVLDATLIHQSITGLYETRIDLSQLGGDGGEAAAKPAPGGTVSLQDEHRLFDIPVTTSLPDVWLQDFPQAWAETGGLGRAKCQAPIIIDLKPTAVPVSIKQYPMSLEAHMGIRQHIIKFLELGVLRPCRSPWNTPLLPVKKPGTQDYRPVQDLREINKRTVDIHPTVPNPYNLLSTLKPDYSWYTVLDLKDAFFCLPLAPQSQELFAFEWKDPERGISGQLTWTRLPQGFKNSPTLFNEALHRDLTDFRTQHPEVTLLQYVDDLLLAAPTKKACTQGTRHLLQELGEKGYRASAKKAQICQTKVTYLGYILSEGKRWLTPGRIETVARIPPPRNPREVREFLGTAGFCRLWIPGFAELAAPLYALTKPSTPFTWQTEHQLAFEALKKALLSAPALGLPDTSKPFTLFLDERQGIAKGVLTQKLGPWKRPVAYLSKKLDPVAAGWPPCLRIMAATAMLVKDSAKLTLGQPLTVITPHTLEAIVRQPPDRWITNARLTHYQALLLDTDRVQFGPPVTLNPATLLPVPENQPSPHDCRQVLAETHGTREDLKDQELPDADHTWYTDGSSYLDSGTRRAGAAVVDGHNTIWAQSLPPGTSAQKAELIALTKALELSKGKKANIYTDSRYAFATAHTHGSIYERRGWLTSEGKEIKNKAEIIALLKALFLPQEVAIIHCPGHQKGQDPVAVGNRQADRVARQAAMAEVLTLATEPDNTSHITAGKRTADGSEFEKRTADGSEFESPKKKAKVE

SEQ ID NO: 1545 - protein, 2094 aa, synthetic construct
MPAAKRVKLDGGDKKYSIGLDIGTNSVGWAVITDEYKVPSKKFKVLGNTDRHSIKKNLIGALLFDSGETAEATRLKRTARRRYTRRKNRICYLQEIFSNEMAKVDDSFFHRLEESFLVEEDKKHERHPIFGNIVDEVAYHEKYPTIYHLRKKLVDSTDKADLRLIYLALAHMIKFRGHFLIEGDLNPDNSDVDKLFIQLVQTYNQLFEENPINASGVDAKAILSARLSKSRRLENLIAQLPGEKKNGLFGNLIALSLGLTPNFKSNFDLAEDAKLQLSKDTYDDDLDNLLAQIGDQYADLFLAAKNLSDAILLSDILRVNTEITKAPLSASMIKRYDEHHQDLTLLKALVRQQLPEKYKEIFFDQSKNGYAGYIDGGASQEEFYKFIKPILEKMDGTEELLVKLNREDLLRKQRTFDNGSIPHQIHLGELHAILRRQEDFYPFLKDNREKIEKILTFRIPYYVGPLARGNSRFAWMTRKSEETITPWNFEEVVDKGASAQSFIERMTNFDKNLPNEKVLPKHSLLYEYFTVYNELTKVKYVTEGMRKPAFLSGEQKKAIVDLLFKTNRKVTVKQLKEDYFKKIECFDSVEISGVEDRFNASLGTYHDLLKIIKDKDFLDNEENEDILEDIVLTLTLFEDREMIEERLKTYAHLFDDKVMKQLKRRRYTGWGRLSRKLINGIRDKQSGKTILDFLKSDGFANRNFMQLIHDDSLTFKEDIQKAQVSGQGDSLHEHIANLAGSPAIKKGILQTVKVVDELVKVMGRHKPENIVIEMARENQTTQKGQKNSRERMKRIEEGIKELGSQILKEHPVENTQLQNEKLYLYYLQNGRDMYVDQELDINRLSDYDVDHIVPQSFLKDDSIDNKVLTRSDKARGKSDNVPSEEVVKKMKNYWRQLLNAKLITQRKFDNLTKAERGGLSELDKAGFIKRQLVETRQITKHVAQILDSRMNTKYDENDKLIREVKVITLKSKLVSDFRKDFQFYKVREINNYHHAHDAYLNAVVGTALIKKYPKLESEFVYGDYKVYDVRKMIAKSEQEIGKATAKYFFYSNIMNFFKTEITLANGEIRKRPLIETNGETGEIVWDKGRDFATVRKVLSMPQVNIVKKTEVQTGGFSKESILPKRNSDKLIARKKDWDPKKYGGFDSPTVAYSVLVVAKVEKGKSKKLKSVKELLGITIMERSSFEKNPIDFLEAKGYKEVKKDLIIKLPKYSLFELENGRKRMLASAGELQKGNELALPSKYVNFLYLASHYEKLKGSPEDNEQKQLFVEQHKHYLDEIIEQISEFSKRVILADANLDKVLSAYNKHRDKPIREQAENIIHLFTLTNLGAPAAFKYFDTTIDRKRYTSTKEVLDATLIHQSITGLYETRIDLSQLGGDGGGSSGGTVSLQDEHRLFDIPVTTSLPDVWLQDFPQAWAETGGLGRAKCQAPIIIDLKPTAVPVSIKQYPMSLEAHMGIRQHIIKFLELGVLRPCRSPWNTPLLPVKKPGTQDYRPVQDLREINKRTVDIHPTVPNPYNLLSTLKPDYSWYTVLDLKDAFFCLPLAPQSQELFAFEWKDPERGISGQLTWTRLPQGFKNSPTLFNEALHRDLTDFRTQHPEVTLLQYVDDLLLAAPTKKACTQGTRHLLQELGEKGYRASAKKAQICQTKVTYLGYILSEGKRWLTPGRIETVARIPPPRNPREVREFLGTAGFCRLWIPGFAELAAPLYALTKPSTPFTWQTEHQLAFEALKKALLSAPALGLPDTSKPFTLFLDERQGIAKGVLTQKLGPWKRPVAYLSKKLDPVAAGWPPCLRIMAATAMLVKDSAKLTLGQPLTVITPHTLEAIVRQPPDRWITNARLTHYQALLLDTDRVQFGPPVTLNPATLLPVPENQPSPHDCRQVLAETHGTREDLKDQELPDADHTWYTDGSSYLDSGTRRAGAAVVDGHNTIWAQSLPPGTSAQKAELIALTKALELSKGKKANIYTDSRYAFATAHTHGSIYERRGWLTSEGKEIKNKAEIIALLKALFLPQEVAIIHCPGHQKGQDPVAVGNRQADRVARQAAMAEVLTLATEPDNTSHITAGKRTADGSEFEKRTADGSEFESPKKKAKVE

SEQ ID NO: 1546 - protein, 2116 aa, synthetic construct
MPAAKRVKLDGGDKKYSIGLDIGTNSVGWAVITDEYKVPSKKFKVLGNTDRHSIKKNLIGALLFDSGETAEATRLKRTARRRYTRRKNRICYLQEIFSNEMAKVDDSFFHRLEESFLVEEDKKHERHPIFGNIVDEVAYHEKYPTIYHLRKKLVDSTDKADLRLIYLALAHMIKFRGHFLIEGDLNPDNSDVDKLFIQLVQTYNQLFEENPINASGVDAKAILSARLSKSRRLENLIAQLPGEKKNGLFGNLIALSLGLTPNFKSNFDLAEDAKLQLSKDTYDDDLDNLLAQIGDQYADLFLAAKNLSDAILLSDILRVNTEITKAPLSASMIKRYDEHHQDLTLLKALVRQQLPEKYKEIFFDQSKNGYAGYIDGGASQEEFYKFIKPILEKMDGTEELLVKLNREDLLRKQRTFDNGSIPHQIHLGELHAILRRQEDFYPFLKDNREKIEKILTFRIPYYVGPLARGNSRFAWMTRKSEETITPWNFEEVVDKGASAQSFIERMTNFDKNLPNEKVLPKHSLLYEYFTVYNELTKVKYVTEGMRKPAFLSGEQKKAIVDLLFKTNRKVTVKQLKEDYFKKIECFDSVEISGVEDRFNASLGTYHDLLKIIKDKDFLDNEENEDILEDIVLTLTLFEDREMIEERLKTYAHLFDDKVMKQLKRRRYTGWGRLSRKLINGIRDKQSGKTILDFLKSDGFANRNFMQLIHDDSLTFKEDIQKAQVSGQGDSLHEHIANLAGSPAIKKGILQTVKVVDELVKVMGRHKPENIVIEMARENQTTQKGQKNSRERMKRIEEGIKELGSQILKEHPVENTQLQNEKLYLYYLQNGRDMYVDQELDINRLSDYDVDHIVPQSFLKDDSIDNKVLTRSDKARGKSDNVPSEEVVKKMKNYWRQLLNAKLITQRKFDNLTKAERGGLSELDKAGFIKRQLVETRQITKHVAQILDSRMNTKYDENDKLIREVKVITLKSKLVSDFRKDFQFYKVREINNYHHAHDAYLNAVVGTALIKKYPKLESEFVYGDYKVYDVRKMIAKSEQEIGKATAKYFFYSNIMNFFKTEITLANGEIRKRPLIETNGETGEIVWDKGRDFATVRKVLSMPQVNIVKKTEVQTGGFSKESILPKRNSDKLIARKKDWDPKKYGGFDSPTVAYSVLVVAKVEKGKSKKLKSVKELLGITIMERSSFEKNPIDFLEAKGYKEVKKDLIIKLPKYSLFELENGRKRMLASAGELQKGNELALPSKYVNFLYLASHYEKLKGSPEDNEQKQLFVEQHKHYLDEIIEQISEFSKRVILADANLDKVLSAYNKHRDKPIREQAENIIHLFTLTNLGAPAAFKYFDTTIDRKRYTSTKEVLDATLIHQSITGLYETRIDLSQLGGDGGEAAAKEAAAKEAAAKEAAAKEAAAKGGTVSLQDEHRLFDIPVTTSLPDVWLQDFPQAWAETGGLGRAKCQAPIIIDLKPTAVPVSIKQYPMSLEAHMGIRQHIIKFLELGVLRPCRSPWNTPLLPVKKPGTQDYRPVQDLREINKRTVDIHPTVPNPYNLLSTLKPDYSWYTVLDLKDAFFCLPLAPQSQELFAFEWKDPERGISGQLTWTRLPQGFKNSPTLFNEALHRDLTDFRTQHPEVTLLQYVDDLLLAAPTKKACTQGTRHLLQELGEKGYRASAKKAQICQTKVTYLGYILSEGKRWLTPGRIETVARIPPPRNPREVREFLGTAGFCRLWIPGFAELAAPLYALTKPSTPFTWQTEHQLAFEALKKALLSAPALGLPDTSKPFTLFLDERQGIAKGVLTQKLGPWKRPVAYLSKKLDPVAAGWPPCLRIMAATAMLVKDSAKLTLGQPLTVITPHTLEAIVRQPPDRWITNARLTHYQALLLDTDRVQFGPPVTLNPATLLPVPENQPSPHDCRQVLAETHGTREDLKDQELPDADHTWYTDGSSYLDSGTRRAGAAVVDGHNTIWAQSLPPGTSAQKAELIALTKALELSKGKKANIYTDSRYAFATAHTHGSIYERRGWLTSEGKEIKNKAEIIALLKALFLPQEVAIIHCPGHQKGQDPVAVGNRQADRVARQAAMAEVLTLATEPDNTSHITAGKRTADGSEFEKRTADGSEFESPKKKAKVE

SEQ ID NO: 1547 - protein, 2099 aa, synthetic construct
MPAAKRVKLDGGDKKYSIGLDIGTNSVGWAVITDEYKVPSKKFKVLGNTDRHSIKKNLIGALLFDSGETAEATRLKRTARRRYTRRKNRICYLQEIFSNEMAKVDDSFFHRLEESFLVEEDKKHERHPIFGNIVDEVAYHEKYPTIYHLRKKLVDSTDKADLRLIYLALAHMIKFRGHFLIEGDLNPDNSDVDKLFIQLVQTYNQLFEENPINASGVDAKAILSARLSKSRRLENLIAQLPGEKKNGLFGNLIALSLGLTPNFKSNFDLAEDAKLQLSKDTYDDDLDNLLAQIGDQYADLFLAAKNLSDAILLSDILRVNTEITKAPLSASMIKRYDEHHQDLTLLKALVRQQLPEKYKEIFFDQSKNGYAGYIDGGASQEEFYKFIKPILEKMDGTEELLVKLNREDLLRKQRTFDNGSIPHQIHLGELHAILRRQEDFYPFLKDNREKIEKILTFRIPYYVGPLARGNSRFAWMTRKSEETITPWNFEEVVDKGASAQSFIERMTNFDKNLPNEKVLPKHSLLYEYFTVYNELTKVKYVTEGMRKPAFLSGEQKKAIVDLLFKTNRKVTVKQLKEDYFKKIECFDSVEISGVEDRFNASLGTYHDLLKIIKDKDFLDNEENEDILEDIVLTLTLFEDREMIEERLKTYAHLFDDKVMKQLKRRRYTGWGRLSRKLINGIRDKQSGKTILDFLKSDGFANRNFMQLIHDDSLTFKEDIQKAQVSGQGDSLHEHIANLAGSPAIKKGILQTVKVVDELVKVMGRHKPENIVIEMARENQTTQKGQKNSRERMKRIEEGIKELGSQILKEHPVENTQLQNEKLYLYYLQNGRDMYVDQELDINRLSDYDVDHIVPQSFLKDDSIDNKVLTRSDKARGKSDNVPSEEVVKKMKNYWRQLLNAKLITQRKFDNLTKAERGGLSELDKAGFIKRQLVETRQITKHVAQILDSRMNTKYDENDKLIREVKVITLKSKLVSDFRKDFQFYKVREINNYHHAHDAYLNAVVGTALIKKYPKLESEFVYGDYKVYDVRKMIAKSEQEIGKATAKYFFYSNIMNFFKTEITLANGEIRKRPLIETNGETGEIVWDKGRDFATVRKVLSMPQVNIVKKTEVQTGGFSKESILPKRNSDKLIARKKDWDPKKYGGFDSPTVAYSVLVVAKVEKGKSKKLKSVKELLGITIMERSSFEKNPIDFLEAKGYKEVKKDLIIKLPKYSLFELENGRKRMLASAGELQKGNELALPSKYVNFLYLASHYEKLKGSPEDNEQKQLFVEQHKHYLDEIIEQISEFSKRVILADANLDKVLSAYNKHRDKPIREQAENIIHLFTLTNLGAPAAFKYFDTTIDRKRYTSTKEVLDATLIHQSITGLYETRIDLSQLGGDGGEAAAKGGGGGTVSLQDEHRLFDIPVTTSLPDVWLQDFPQAWAETGGLGRAKCQAPIIIDLKPTAVPVSIKQYPMSLEAHMGIRQHIIKFLELGVLRPCRSPWNTPLLPVKKPGTQDYRPVQDLREINKRTVDIHPTVPNPYNLLSTLKPDYSWYTVLDLKDAFFCLPLAPQSQELFAFEWKDPERGISGQLTWTRLPQGFKNSPTLFNEALHRDLTDFRTQHPEVTLLQYVDDLLLAAPTKKACTQGTRHLLQELGEKGYRASAKKAQICQTKVTYLGYILSEGKRWLTPGRIETVARIPPPRNPREVREFLGTAGFCRLWIPGFAELAAPLYALTKPSTPFTWQTEHQLAFEALKKALLSAPALGLPDTSKPFTLFLDERQGIAKGVLTQKLGPWKRPVAYLSKKLDPVAAGWPPCLRIMAATAMLVKDSAKLTLGQPLTVITPHTLEAIVRQPPDRWITNARLTHYQALLLDTDRVQFGPPVTLNPATLLPVPENQPSPHDCRQVLAETHGTREDLKDQELPDADHTWYTDGSSYLDSGTRRAGAAVVDGHNTIWAQSLPPGTSAQKAELIALTKALELSKGKKANIYTDSRYAFATAHTHGSIYERRGWLTSEGKEIKNKAEIIALLKALFLPQEVAIIHCPGHQKGQDPVAVGNRQADRVARQAAMAEVLTLATEPDNTSHITAGKRTADGSEFEKRTADGSEFESPKKKAKVE

SEQ ID NO: 1548 - protein, 2097 aa, synthetic construct
MPAAKRVKLDGGDKKYSIGLDIGTNSVGWAVITDEYKVPSKKFKVLGNTDRHSIKKNLIGALLFDSGETAEATRLKRTARRRYTRRKNRICYLQEIFSNEMAKVDDSFFHRLEESFLVEEDKKHERHPIFGNIVDEVAYHEKYPTIYHLRKKLVDSTDKADLRLIYLALAHMIKFRGHFLIEGDLNPDNSDVDKLFIQLVQTYNQLFEENPINASGVDAKAILSARLSKSRRLENLIAQLPGEKKNGLFGNLIALSLGLTPNFKSNFDLAEDAKLQLSKDTYDDDLDNLLAQIGDQYADLFLAAKNLSDAILLSDILRVNTEITKAPLSASMIKRYDEHHQDLTLLKALVRQQLPEKYKEIFFDQSKNGYAGYIDGGASQEEFYKFIKPILEKMDGTEELLVKLNREDLLRKQRTFDNGSIPHQIHLGELHAILRRQEDFYPFLKDNREKIEKILTFRIPYYVGPLARGNSRFAWMTRKSEETITPWNFEEVVDKGASAQSFIERMTNFDKNLPNEKVLPKHSLLYEYFTVYNELTKVKYVTEGMRKPAFLSGEQKKAIVDLLFKTNRKVTVKQLKEDYFKKIECFDSVEISGVEDRFNASLGTYHDLLKIIKDKDFLDNEENEDILEDIVLTLTLFEDREMIEERLKTYAHLFDDKVMKQLKRRRYTGWGRLSRKLINGIRDKQSGKTILDFLKSDGFANRNFMQLIHDDSLTFKEDIQKAQVSGQGDSLHEHIANLAGSPAIKKGILQTVKVVDELVKVMGRHKPENIVIEMARENQTTQKGQKNSRERMKRIEEGIKELGSQILKEHPVENTQLQNEKLYLYYLQNGRDMYVDQELDINRLSDYDVDHIVPQSFLKDDSIDNKVLTRSDKARGKSDNVPSEEVVKKMKNYWRQLLNAKLITQRKFDNLTKAERGGLSELDKAGFIKRQLVETRQITKHVAQILDSRMNTKYDENDKLIREVKVITLKSKLVSDFRKDFQFYKVREINNYHHAHDAYLNAVVGTALIKKYPKLESEFVYGDYKVYDVRKMIAKSEQEIGKATAKYFFYSNIMNFFKTEITLANGEIRKRPLIETNGETGEIVWDKGRDFATVRKVLSMPQVNIVKKTEVQTGGFSKESILPKRNSDKLIARKKDWDPKKYGGFDSPTVAYSVLVVAKVEKGKSKKLKSVKELLGITIMERSSFEKNPIDFLEAKGYKEVKKDLIIKLPKYSLFELENGRKRMLASAGELQKGNELALPSKYVNFLYLASHYEKLKGSPEDNEQKQLFVEQHKHYLDEIIEQISEFSKRVILADANLDKVLSAYNKHRDKPIREQAENIIHLFTLTNLGAPAAFKYFDTTIDRKRYTSTKEVLDATLIHQSITGLYETRIDLSQLGGDGGGSSGGGGGTVSLQDEHRLFDIPVTTSLPDVWLQDFPQAWAETGGLGRAKCQAPIIIDLKPTAVPVSIKQYPMSLEAHMGIRQHIIKFLELGVLRPCRSPWNTPLLPVKKPGTQDYRPVQDLREINKRTVDIHPTVPNPYNLLSTLKPDYSWYTVLDLKDAFFCLPLAPQSQELFAFEWKDPERGISGQLTWTRLPQGFKNSPTLFNEALHRDLTDFRTQHPEVTLLQYVDDLLLAAPTKKACTQGTRHLLQELGEKGYRASAKKAQICQTKVTYLGYILSEGKRWLTPGRIETVARIPPPRNPREVREFLGTAGFCRLWIPGFAELAAPLYALTKPSTPFTWQTEHQLAFEALKKALLSAPALGLPDTSKPFTLFLDERQGIAKGVLTQKLGPWKRPVAYLSKKLDPVAAGWPPCLRIMAATAMLVKDSAKLTLGQPLTVITPHTLEAIVRQPPDRWITNARLTHYQALLLDTDRVQFGPPVTLNPATLLPVPENQPSPHDCRQVLAETHGTREDLKDQELPDADHTWYTDGSSYLDSGTRRAGAAVVDGHNTIWAQSLPPGTSAQKAELIALTKALELSKGKKANIYTDSRYAFATAHTHGSIYERRGWLTSEGKEIKNKAEIIALLKALFLPQEVAIIHCPGHQKGQDPVAVGNRQADRVARQAAMAEVLTLATEPDNTSHITAGKRTADGSEFEKRTADGSEFESPKKKAKVE

SEQ ID NO: 1549 - protein, 2102 aa, synthetic construct
MPAAKRVKLDGGDKKYSIGLDIGTNSVGWAVITDEYKVPSKKFKVLGNTDRHSIKKNLIGALLFDSGETAEATRLKRTARRRYTRRKNRICYLQEIFSNEMAKVDDSFFHRLEESFLVEEDKKHERHPIFGNIVDEVAYHEKYPTIYHLRKKLVDSTDKADLRLIYLALAHMIKFRGHFLIEGDLNPDNSDVDKLFIQLVQTYNQLFEENPINASGVDAKAILSARLSKSRRLENLIAQLPGEKKNGLFGNLIALSLGLTPNFKSNFDLAEDAKLQLSKDTYDDDLDNLLAQIGDQYADLFLAAKNLSDAILLSDILRVNTEITKAPLSASMIKRYDEHHQDLTLLKALVRQQLPEKYKEIFFDQSKNGYAGYIDGGASQEEFYKFIKPILEKMDGTEELLVKLNREDLLRKQRTFDNGSIPHQIHLGELHAILRRQEDFYPFLKDNREKIEKILTFRIPYYVGPLARGNSRFAWMTRKSEETITPWNFEEVVDKGASAQSFIERMTNFDKNLPNEKVLPKHSLLYEYFTVYNELTKVKYVTEGMRKPAFLSGEQKKAIVDLLFKTNRKVTVKQLKEDYFKKIECFDSVEISGVEDRFNASLGTYHDLLKIIKDKDFLDNEENEDILEDIVLTLTLFEDREMIEERLKTYAHLFDDKVMKQLKRRRYTGWGRLSRKLINGIRDKQSGKTILDFLKSDGFANRNFMQLIHDDSLTFKEDIQKAQVSGQGDSLHEHIANLAGSPAIKKGILQTVKVVDELVKVMGRHKPENIVIEMARENQTTQKGQKNSRERMKRIEEGIKELGSQILKEHPVENTQLQNEKLYLYYLQNGRDMYVDQELDINRLSDYDVDHIVPQSFLKDDSIDNKVLTRSDKARGKSDNVPSEEVVKKMKNYWRQLLNAKLITQRKFDNLTKAERGGLSELDKAGFIKRQLVETRQITKHVAQILDSRMNTKYDENDKLIREVKVITLKSKLVSDFRKDFQFYKVREINNYHHAHDAYLNAVVGTALIKKYPKLESEFVYGDYKVYDVRKMIAKSEQEIGKATAKYFFYSNIMNFFKTEITLANGEIRKRPLIETNGETGEIVWDKGRDFATVRKVLSMPQVNIVKKTEVQTGGFSKESILPKRNSDKLIARKKDWDPKKYGGFDSPTVAYSVLVVAKVEKGKSKKLKSVKELLGITIMERSSFEKNPIDFLEAKGYKEVKKDLIIKLPKYSLFELENGRKRMLASAGELQKGNELALPSKYVNFLYLASHYEKLKGSPEDNEQKQLFVEQHKHYLDEIIEQISEFSKRVILADANLDKVLSAYNKHRDKPIREQAENIIHLFTLTNLGAPAAFKYFDTTIDRKRYTSTKEVLDATLIHQSITGLYETRIDLSQLGGDGGGGSGSSEAAAKGGTVSLQDEHRLFDIPVTTSLPDVWLQDFPQAWAETGGLGRAKCQAPIIIDLKPTAVPVSIKQYPMSLEAHMGIRQHIIKFLELGVLRPCRSPWNTPLLPVKKPGTQDYRPVQDLREINKRTVDIHPTVPNPYNLLSTLKPDYSWYTVLDLKDAFFCLPLAPQSQELFAFEWKDPERGISGQLTWTRLPQGFKNSPTLFNEALHRDLTDFRTQHPEVTLLQYVDDLLLAAPTKKACTQGTRHLLQELGEKGYRASAKKAQICQTKVTYLGYILSEGKRWLTPGRIETVARIPPPRNPREVREFLGTAGFCRLWIPGFAELAAPLYALTKPSTPFTWQTEHQLAFEALKKALLSAPALGLPDTSKPFTLFLDERQGIAKGVLTQKLGPWKRPVAYLSKKLDPVAAGWPPCLRIMAATAMLVKDSAKLTLGQPLTVITPHTLEAIVRQPPDRWITNARLTHYQALLLDTDRVQFGPPVTLNPATLLPVPENQPSPHDCRQVLAETHGTREDLKDQELPDADHTWYTDGSSYLDSGTRRAGAAVVDGHNTIWAQSLPPGTSAQKAELIALTKALELSKGKKANIYTDSRYAFATAHTHGSIYERRGWLTSEGKEIKNKAEIIALLKALFLPQEVAIIHCPGHQKGQDPVAVGNRQADRVARQAAMAEVLTLATEPDNTSHITAGKRTADGSEFEKRTADGSEFESPKKKAKVE

SEQ ID NO: 1550 - protein, 2100 aa, synthetic construct
MPAAKRVKLDGGDKKYSIGLDIGTNSVGWAVITDEYKVPSKKFKVLGNTDRHSIKKNLIGALLFDSGETAEATRLKRTARRRYTRRKNRICYLQEIFSNEMAKVDDSFFHRLEESFLVEEDKKHERHPIFGNIVDEVAYHEKYPTIYHLRKKLVDSTDKADLRLIYLALAHMIKFRGHFLIEGDLNPDNSDVDKLFIQLVQTYNQLFEENPINASGVDAKAILSARLSKSRRLENLIAQLPGEKKNGLFGNLIALSLGLTPNFKSNFDLAEDAKLQLSKDTYDDDLDNLLAQIGDQYADLFLAAKNLSDAILLSDILRVNTEITKAPLSASMIKRYDEHHQDLTLLKALVRQQLPEKYKEIFFDQSKNGYAGYIDGGASQEEFYKFIKPILEKMDGTEELLVKLNREDLLRKQRTFDNGSIPHQIHLGELHAILRRQEDFYPFLKDNREKIEKILTFRIPYYVGPLARGNSRFAWMTRKSEETITPWNFEEVVDKGASAQSFIERMTNFDKNLPNEKVLPKHSLLYEYFTVYNELTKVKYVTEGMRKPAFLSGEQKKAIVDLLFKTNRKVTVKQLKEDYFKKIECFDSVEISGVEDRFNASLGTYHDLLKIIKDKDFLDNEENEDILEDIVLTLTLFEDREMIEERLKTYAHLFDDKVMKQLKRRRYTGWGRLSRKLINGIRDKQSGKTILDFLKSDGFANRNFMQLIHDDSLTFKEDIQKAQVSGQGDSLHEHIANLAGSPAIKKGILQTVKVVDELVKVMGRHKPENIVIEMARENQTTQKGQKNSRERMKRIEEGIKELGSQILKEHPVENTQLQNEKLYLYYLQNGRDMYVDQELDINRLSDYDVDHIVPQSFLKDDSIDNKVLTRSDKARGKSDNVPSEEVVKKMKNYWRQLLNAKLITQRKFDNLTKAERGGLSELDKAGFIKRQLVETRQITKHVAQILDSRMNTKYDENDKLIREVKVITLKSKLVSDFRKDFQFYKVREINNYHHAHDAYLNAVVGTALIKKYPKLESEFVYGDYKVYDVRKMIAKSEQEIGKATAKYFFYSNIMNFFKTEITLANGEIRKRPLIETNGETGEIVWDKGRDFATVRKVLSMPQVNIVKKTEVQTGGFSKESILPKRNSDKLIARKKDWDPKKYGGFDSPTVAYSVLVVAKVEKGKSKKLKSVKELLGITIMERSSFEKNPIDFLEAKGYKEVKKDLIIKLPKYSLFELENGRKRMLASAGELQKGNELALPSKYVNFLYLASHYEKLKGSPEDNEQKQLFVEQHKHYLDEIIEQISEFSKRVILADANLDKVLSAYNKHRDKPIREQAENIIHLFTLTNLGAPAAFKYFDTTIDRKRYTSTKEVLDATLIHQSITGLYETRIDLSQLGGDGGGGSGSSGGGGGTVSLQDEHRLFDIPVTTSLPDVWLQDFPQAWAETGGLGRAKCQAPIIIDLKPTAVPVSIKQYPMSLEAHMGIRQHIIKFLELGVLRPCRSPWNTPLLPVKKPGTQDYRPVQDLREINKRTVDIHPTVPNPYNLLSTLKPDYSWYTVLDLKDAFFCLPLAPQSQELFAFEWKDPERGISGQLTWTRLPQGFKNSPTLFNEALHRDLTDFRTQHPEVTLLQYVDDLLLAAPTKKACTQGTRHLLQELGEKGYRASAKKAQICQTKVTYLGYILSEGKRWLTPGRIETVARIPPPRNPREVREFLGTAGFCRLWIPGFAELAAPLYALTKPSTPFTWQTEHQLAFEALKKALLSAPALGLPDTSKPFTLFLDERQGIAKGVLTQKLGPWKRPVAYLSKKLDPVAAGWPPCLRIMAATAMLVKDSAKLTLGQPLTVITPHTLEAIVRQPPDRWITNARLTHYQALLLDTDRVQFGPPVTLNPATLLPVPENQPSPHDCRQVLAETHGTREDLKDQELPDADHTWYTDGSSYLDSGTRRAGAAVVDGHNTIWAQSLPPGTSAQKAELIALTKALELSKGKKANIYTDSRYAFATAHTHGSIYERRGWLTSEGKEIKNKAEIIALLKALFLPQEVAIIHCPGHQKGQDPVAVGNRQADRVARQAAMAEVLTLATEPDNTSHITAGKRTADGSEFEKRTADGSEFESPKKKAKVE

SEQ ID NO: 1551 - protein, 2100 aa, synthetic construct
MPAAKRVKLDGGDKKYSIGLDIGTNSVGWAVITDEYKVPSKKFKVLGNTDRHSIKKNLIGALLFDSGETAEATRLKRTARRRYTRRKNRICYLQEIFSNEMAKVDDSFFHRLEESFLVEEDKKHERHPIFGNIVDEVAYHEKYPTIYHLRKKLVDSTDKADLRLIYLALAHMIKFRGHFLIEGDLNPDNSDVDKLFIQLVQTYNQLFEENPINASGVDAKAILSARLSKSRRLENLIAQLPGEKKNGLFGNLIALSLGLTPNFKSNFDLAEDAKLQLSKDTYDDDLDNLLAQIGDQYADLFLAAKNLSDAILLSDILRVNTEITKAPLSASMIKRYDEHHQDLTLLKALVRQQLPEKYKEIFFDQSKNGYAGYIDGGASQEEFYKFIKPILEKMDGTEELLVKLNREDLLRKQRTFDNGSIPHQIHLGELHAILRRQEDFYPFLKDNREKIEKILTFRIPYYVGPLARGNSRFAWMTRKSEETITPWNFEEVVDKGASAQSFIERMTNFDKNLPNEKVLPKHSLLYEYFTVYNELTKVKYVTEGMRKPAFLSGEQKKAIVDLLFKTNRKVTVKQLKEDYFKKIECFDSVEISGVEDRFNASLGTYHDLLKIIKDKDFLDNEENEDILEDIVLTLTLFEDREMIEERLKTYAHLFDDKVMKQLKRRRYTGWGRLSRKLINGIRDKQSGKTILDFLKSDGFANRNFMQLIHDDSLTFKEDIQKAQVSGQGDSLHEHIANLAGSPAIKKGILQTVKVVDELVKVMGRHKPENIVIEMARENQTTQKGQKNSRERMKRIEEGIKELGSQILKEHPVENTQLQNEKLYLYYLQNGRDMYVDQELDINRLSDYDVDHIVPQSFLKDDSIDNKVLTRSDKARGKSDNVPSEEVVKKMKNYWRQLLNAKLITQRKFDNLTKAERGGLSELDKAGFIKRQLVETRQITKHVAQILDSRMNTKYDENDKLIREVKVITLKSKLVSDFRKDFQFYKVREINNYHHAHDAYLNAVVGTALIKKYPKLESEFVYGDYKVYDVRKMIAKSEQEIGKATAKYFFYSNIMNFFKTEITLANGEIRKRPLIETNGETGEIVWDKGRDFATVRKVLSMPQVNIVKKTEVQTGGFSKESILPKRNSDKLIARKKDWDPKKYGGFDSPTVAYSVLVVAKVEKGKSKKLKSVKELLGITIMERSSFEKNPIDFLEAKGYKEVKKDLIIKLPKYSLFELENGRKRMLASAGELQKGNELALPSKYVNFLYLASHYEKLKGSPEDNEQKQLFVEQHKHYLDEIIEQISEFSKRVILADANLDKVLSAYNKHRDKPIREQAENIIHLFTLTNLGAPAAFKYFDTTIDRKRYTSTKEVLDATLIHQSITGLYETRIDLSQLGGDGGGGSGSSPAPGGTVSLQDEHRLFDIPVTTSLPDVWLQDFPQAWAETGGLGRAKCQAPIIIDLKPTAVPVSIKQYPMSLEAHMGIRQHIIKFLELGVLRPCRSPWNTPLLPVKKPGTQDYRPVQDLREINKRTVDIHPTVPNPYNLLSTLKPDYSWYTVLDLKDAFFCLPLAPQSQELFAFEWKDPERGISGQLTWTRLPQGFKNSPTLFNEALHRDLTDFRTQHPEVTLLQYVDDLLLAAPTKKACTQGTRHLLQELGEKGYRASAKKAQICQTKVTYLGYILSEGKRWLTPGRIETVARIPPPRNPREVREFLGTAGFCRLWIPGFAELAAPLYALTKPSTPFTWQTEHQLAFEALKKALLSAPALGLPDTSKPFTLFLDERQGIAKGVLTQKLGPWKRPVAYLSKKLDPVAAGWPPCLRIMAATAMLVKDSAKLTLGQPLTVITPHTLEAIVRQPPDRWITNARLTHYQALLLDTDRVQFGPPVTLNPATLLPVPENQPSPHDCRQVLAETHGTREDLKDQELPDADHTWYTDGSSYLDSGTRRAGAAVVDGHNTIWAQSLPPGTSAQKAELIALTKALELSKGKKANIYTDSRYAFATAHTHGSIYERRGWLTSEGKEIKNKAEIIALLKALFLPQEVAIIHCPGHQKGQDPVAVGNRQADRVARQAAMAEVLTLATEPDNTSHITAGKRTADGSEFEKRTADGSEFESPKKKAKVE

SEQ ID NO: 1552 - protein, 2111 aa, synthetic construct
MPAAKRVKLDGGDKKYSIGLDIGTNSVGWAVITDEYKVPSKKFKVLGNTDRHSIKKNLIGALLFDSGETAEATRLKRTARRRYTRRKNRICYLQEIFSNEMAKVDDSFFHRLEESFLVEEDKKHERHPIFGNIVDEVAYHEKYPTIYHLRKKLVDSTDKADLRLIYLALAHMIKFRGHFLIEGDLNPDNSDVDKLFIQLVQTYNQLFEENPINASGVDAKAILSARLSKSRRLENLIAQLPGEKKNGLFGNLIALSLGLTPNFKSNFDLAEDAKLQLSKDTYDDDLDNLLAQIGDQYADLFLAAKNLSDAILLSDILRVNTEITKAPLSASMIKRYDEHHQDLTLLKALVRQQLPEKYKEIFFDQSKNGYAGYIDGGASQEEFYKFIKPILEKMDGTEELLVKLNREDLLRKQRTFDNGSIPHQIHLGELHAILRRQEDFYPFLKDNREKIEKILTFRIPYYVGPLARGNSRFAWMTRKSEETITPWNFEEVVDKGASAQSFIERMTNFDKNLPNEKVLPKHSLLYEYFTVYNELTKVKYVTEGMRKPAFLSGEQKKAIVDLLFKTNRKVTVKQLKEDYFKKIECFDSVEISGVEDRFNASLGTYHDLLKIIKDKDFLDNEENEDILEDIVLTLTLFEDREMIEERLKTYAHLFDDKVMKQLKRRRYTGWGRLSRKLINGIRDKQSGKTILDFLKSDGFANRNFMQLIHDDSLTFKEDIQKAQVSGQGDSLHEHIANLAGSPAIKKGILQTVKVVDELVKVMGRHKPENIVIEMARENQTTQKGQKNSRERMKRIEEGIKELGSQILKEHPVENTQLQNEKLYLYYLQNGRDMYVDQELDINRLSDYDVDHIVPQSFLKDDSIDNKVLTRSDKARGKSDNVPSEEVVKKMKNYWRQLLNAKLITQRKFDNLTKAERGGLSELDKAGFIKRQLVETRQITKHVAQILDSRMNTKYDENDKLIREVKVITLKSKLVSDFRKDFQFYKVREINNYHHAHDAYLNAVVGTALIKKYPKLESEFVYGDYKVYDVRKMIAKSEQEIGKATAKYFFYSNIMNFFKTEITLANGEIRKRPLIETNGETGEIVWDKGRDFATVRKVLSMPQVNIVKKTEVQTGGFSKESILPKRNSDKLIARKKDWDPKKYGGFDSPTVAYSVLVVAKVEKGKSKKLKSVKELLGITIMERSSFEKNPIDFLEAKGYKEVKKDLIIKLPKYSLFELENGRKRMLASAGELQKGNELALPSKYVNFLYLASHYEKLKGSPEDNEQKQLFVEQHKHYLDEIIEQISEFSKRVILADANLDKVLSAYNKHRDKPIREQAENIIHLFTLTNLGAPAAFKYFDTTIDRKRYTSTKEVLDATLIHQSITGLYETRIDLSQLGGDGGGGGGSGGGGSGGGGSGGGGSGGTVSLQDEHRLFDIPVTTSLPDVWLQDFPQAWAETGGLGRAKCQAPIIIDLKPTAVPVSIKQYPMSLEAHMGIRQHIIKFLELGVLRPCRSPWNTPLLPVKKPGTQDYRPVQDLREINKRTVDIHPTVPNPYNLLSTLKPDYSWYTVLDLKDAFFCLPLAPQSQELFAFEWKDPERGISGQLTWTRLPQGFKNSPTLFNEALHRDLTDFRTQHPEVTLLQYVDDLLLAAPTKKACTQGTRHLLQELGEKGYRASAKKAQICQTKVTYLGYILSEGKRWLTPGRIETVARIPPPRNPREVREFLGTAGFCRLWIPGFAELAAPLYALTKPSTPFTWQTEHQLAFEALKKALLSAPALGLPDTSKPFTLFLDERQGIAKGVLTQKLGPWKRPVAYLSKKLDPVAAGWPPCLRIMAATAMLVKDSAKLTLGQPLTVITPHTLEAIVRQPPDRWITNARLTHYQALLLDTDRVQFGPPVTLNPATLLPVPENQPSPHDCRQVLAETHGTREDLKDQELPDADHTWYTDGSSYLDSGTRRAGAAVVDGHNTIWAQSLPPGTSAQKAELIALTKALELSKGKKANIYTDSRYAFATAHTHGSIYERRGWLTSEGKEIKNKAEIIALLKALFLPQEVAIIHCPGHQKGQDPVAVGNRQADRVARQAAMAEVLTLATEPDNTSHITAGKRTADGSEFEKRTADGSEFESPKKKAKVE

SEQ ID NO: 1553 - protein, 2106 aa, synthetic construct
MPAAKRVKLDGGDKKYSIGLDIGTNSVGWAVITDEYKVPSKKFKVLGNTDRHSIKKNLIGALLFDSGETAEATRLKRTARRRYTRRKNRICYLQEIFSNEMAKVDDSFFHRLEESFLVEEDKKHERHPIFGNIVDEVAYHEKYPTIYHLRKKLVDSTDKADLRLIYLALAHMIKFRGHFLIEGDLNPDNSDVDKLFIQLVQTYNQLFEENPINASGVDAKAILSARLSKSRRLENLIAQLPGEKKNGLFGNLIALSLGLTPNFKSNFDLAEDAKLQLSKDTYDDDLDNLLAQIGDQYADLFLAAKNLSDAILLSDILRVNTEITKAPLSASMIKRYDEHHQDLTLLKALVRQQLPEKYKEIFFDQSKNGYAGYIDGGASQEEFYKFIKPILEKMDGTEELLVKLNREDLLRKQRTFDNGSIPHQIHLGELHAILRRQEDFYPFLKDNREKIEKILTFRIPYYVGPLARGNSRFAWMTRKSEETITPWNFEEVVDKGASAQSFIERMTNFDKNLPNEKVLPKHSLLYEYFTVYNELTKVKYVTEGMRKPAFLSGEQKKAIVDLLFKTNRKVTVKQLKEDYFKKIECFDSVEISGVEDRFNASLGTYHDLLKIIKDKDFLDNEENEDILEDIVLTLTLFEDREMIEERLKTYAHLFDDKVMKQLKRRRYTGWGRLSRKLINGIRDKQSGKTILDFLKSDGFANRNFMQLIHDDSLTFKEDIQKAQVSGQGDSLHEHIANLAGSPAIKKGILQTVKVVDELVKVMGRHKPENIVIEMARENQTTQKGQKNSRERMKRIEEGIKELGSQILKEHPVENTQLQNEKLYLYYLQNGRDMYVDQELDINRLSDYDVDHIVPQSFLKDDSIDNKVLTRSDKARGKSDNVPSEEVVKKMKNYWRQLLNAKLITQRKFDNLTKAERGGLSELDKAGFIKRQLVETRQITKHVAQILDSRMNTKYDENDKLIREVKVITLKSKLVSDFRKDFQFYKVREINNYHHAHDAYLNAVVGTALIKKYPKLESEFVYGDYKVYDVRKMIAKSEQEIGKATAKYFFYSNIMNFFKTEITLANGEIRKRPLIETNGETGEIVWDKGRDFATVRKVLSMPQVNIVKKTEVQTGGFSKESILPKRNSDKLIARKKDWDPKKYGGFDSPTVAYSVLVVAKVEKGKSKKLKSVKELLGITIMERSSFEKNPIDFLEAKGYKEVKKDLIIKLPKYSLFELENGRKRMLASAGELQKGNELALPSKYVNFLYLASHYEKLKGSPEDNEQKQLFVEQHKHYLDEIIEQISEFSKRVILADANLDKVLSAYNKHRDKPIREQAENIIHLFTLTNLGAPAAFKYFDTTIDRKRYTSTKEVLDATLIHQSITGLYETRIDLSQLGGDGGGSSGSSGSSGSSGSSGGTVSLQDEHRLFDIPVTTSLPDVWLQDFPQAWAETGGLGRAKCQAPIIIDLKPTAVPVSIKQYPMSLEAHMGIRQHIIKFLELGVLRPCRSPWNTPLLPVKKPGTQDYRPVQDLREINKRTVDIHPTVPNPYNLLSTLKPDYSWYTVLDLKDAFFCLPLAPQSQELFAFEWKDPERGISGQLTWTRLPQGFKNSPTLFNEALHRDLTDFRTQHPEVTLLQYVDDLLLAAPTKKACTQGTRHLLQELGEKGYRASAKKAQICQTKVTYLGYILSEGKRWLTPGRIETVARIPPPRNPREVREFLGTAGFCRLWIPGFAELAAPLYALTKPSTPFTWQTEHQLAFEALKKALLSAPALGLPDTSKPFTLFLDERQGIAKGVLTQKLGPWKRPVAYLSKKLDPVAAGWPPCLRIMAATAMLVKDSAKLTLGQPLTVITPHTLEAIVRQPPDRWITNARLTHYQALLLDTDRVQFGPPVTLNPATLLPVPENQPSPHDCRQVLAETHGTREDLKDQELPDADHTWYTDGSSYLDSGTRRAGAAVVDGHNTIWAQSLPPGTSAQKAELIALTKALELSKGKKANIYTDSRYAFATAHTHGSIYERRGWLTSEGKEIKNKAEIIALLKALFLPQEVAIIHCPGHQKGQDPVAVGNRQADRVARQAAMAEVLTLATEPDNTSHITAGKRTADGSEFEKRTADGSEFESPKKKAKVE

SEQ ID NO: 1554 - protein, 2097 aa, synthetic construct
MPAAKRVKLDGGDKKYSIGLDIGTNSVGWAVITDEYKVPSKKFKVLGNTDRHSIKKNLIGALLFDSGETAEATRLKRTARRRYTRRKNRICYLQEIFSNEMAKVDDSFFHRLEESFLVEEDKKHERHPIFGNIVDEVAYHEKYPTIYHLRKKLVDSTDKADLRLIYLALAHMIKFRGHFLIEGDLNPDNSDVDKLFIQLVQTYNQLFEENPINASGVDAKAILSARLSKSRRLENLIAQLPGEKKNGLFGNLIALSLGLTPNFKSNFDLAEDAKLQLSKDTYDDDLDNLLAQIGDQYADLFLAAKNLSDAILLSDILRVNTEITKAPLSASMIKRYDEHHQDLTLLKALVRQQLPEKYKEIFFDQSKNGYAGYIDGGASQEEFYKFIKPILEKMDGTEELLVKLNREDLLRKQRTFDNGSIPHQIHLGELHAILRRQEDFYPFLKDNREKIEKILTFRIPYYVGPLARGNSRFAWMTRKSEETITPWNFEEVVDKGASAQSFIERMTNFDKNLPNEKVLPKHSLLYEYFTVYNELTKVKYVTEGMRKPAFLSGEQKKAIVDLLFKTNRKVTVKQLKEDYFKKIECFDSVEISGVEDRFNASLGTYHDLLKIIKDKDFLDNEENEDILEDIVLTLTLFEDREMIEERLKTYAHLFDDKVMKQLKRRRYTGWGRLSRKLINGIRDKQSGKTILDFLKSDGFANRNFMQLIHDDSLTFKEDIQKAQVSGQGDSLHEHIANLAGSPAIKKGILQTVKVVDELVKVMGRHKPENIVIEMARENQTTQKGQKNSRERMKRIEEGIKELGSQILKEHPVENTQLQNEKLYLYYLQNGRDMYVDQELDINRLSDYDVDHIVPQSFLKDDSIDNKVLTRSDKARGKSDNVPSEEVVKKMKNYWRQLLNAKLITQRKFDNLTKAERGGLSELDKAGFIKRQLVETRQITKHVAQILDSRMNTKYDENDKLIREVKVITLKSKLVSDFRKDFQFYKVREINNYHHAHDAYLNAVVGTALIKKYPKLESEFVYGDYKVYDVRKMIAKSEQEIGKATAKYFFYSNIMNFFKTEITLANGEIRKRPLIETNGETGEIVWDKGRDFATVRKVLSMPQVNIVKKTEVQTGGFSKESILPKRNSDKLIARKKDWDPKKYGGFDSPTVAYSVLVVAKVEKGKSKKLKSVKELLGITIMERSSFEKNPIDFLEAKGYKEVKKDLIIKLPKYSLFELENGRKRMLASAGELQKGNELALPSKYVNFLYLASHYEKLKGSPEDNEQKQLFVEQHKHYLDEIIEQISEFSKRVILADANLDKVLSAYNKHRDKPIREQAENIIHLFTLTNLGAPAAFKYFDTTIDRKRYTSTKEVLDATLIHQSITGLYETRIDLSQLGGDGGPAPGGSGGTVSLQDEHRLFDIPVTTSLPDVWLQDFPQAWAETGGLGRAKCQAPIIIDLKPTAVPVSIKQYPMSLEAHMGIRQHIIKFLELGVLRPCRSPWNTPLLPVKKPGTQDYRPVQDLREINKRTVDIHPTVPNPYNLLSTLKPDYSWYTVLDLKDAFFCLPLAPQSQELFAFEWKDPERGISGQLTWTRLPQGFKNSPTLFNEALHRDLTDFRTQHPEVTLLQYVDDLLLAAPTKKACTQGTRHLLQELGEKGYRASAKKAQICQTKVTYLGYILSEGKRWLTPGRIETVARIPPPRNPREVREFLGTAGFCRLWIPGFAELAAPLYALTKPSTPFTWQTEHQLAFEALKKALLSAPALGLPDTSKPFTLFLDERQGIAKGVLTQKLGPWKRPVAYLSKKLDPVAAGWPPCLRIMAATAMLVKDSAKLTLGQPLTVITPHTLEAIVRQPPDRWITNARLTHYQALLLDTDRVQFGPPVTLNPATLLPVPENQPSPHDCRQVLAETHGTREDLKDQELPDADHTWYTDGSSYLDSGTRRAGAAVVDGHNTIWAQSLPPGTSAQKAELIALTKALELSKGKKANIYTDSRYAFATAHTHGSIYERRGWLTSEGKEIKNKAEIIALLKALFLPQEVAIIHCPGHQKGQDPVAVGNRQADRVARQAAMAEVLTLATEPDNTSHITAGKRTADGSEFEKRTADGSEFESPKKKAKVE

SEQ ID NO: 1555 - protein, 2102 aa, synthetic construct
MPAAKRVKLDGGDKKYSIGLDIGTNSVGWAVITDEYKVPSKKFKVLGNTDRHSIKKNLIGALLFDSGETAEATRLKRTARRRYTRRKNRICYLQEIFSNEMAKVDDSFFHRLEESFLVEEDKKHERHPIFGNIVDEVAYHEKYPTIYHLRKKLVDSTDKADLRLIYLALAHMIKFRGHFLIEGDLNPDNSDVDKLFIQLVQTYNQLFEENPINASGVDAKAILSARLSKSRRLENLIAQLPGEKKNGLFGNLIALSLGLTPNFKSNFDLAEDAKLQLSKDTYDDDLDNLLAQIGDQYADLFLAAKNLSDAILLSDILRVNTEITKAPLSASMIKRYDEHHQDLTLLKALVRQQLPEKYKEIFFDQSKNGYAGYIDGGASQEEFYKFIKPILEKMDGTEELLVKLNREDLLRKQRTFDNGSIPHQIHLGELHAILRRQEDFYPFLKDNREKIEKILTFRIPYYVGPLARGNSRFAWMTRKSEETITPWNFEEVVDKGASAQSFIERMTNFDKNLPNEKVLPKHSLLYEYFTVYNELTKVKYVTEGMRKPAFLSGEQKKAIVDLLFKTNRKVTVKQLKEDYFKKIECFDSVEISGVEDRFNASLGTYHDLLKIIKDKDFLDNEENEDILEDIVLTLTLFEDREMIEERLKTYAHLFDDKVMKQLKRRRYTGWGRLSRKLINGIRDKQSGKTILDFLKSDGFANRNFMQLIHDDSLTFKEDIQKAQVSGQGDSLHEHIANLAGSPAIKKGILQTVKVVDELVKVMGRHKPENIVIEMARENQTTQKGQKNSRERMKRIEEGIKELGSQILKEHPVENTQLQNEKLYLYYLQNGRDMYVDQELDINRLSDYDVDHIVPQSFLKDDSIDNKVLTRSDKARGKSDNVPSEEVVKKMKNYWRQLLNAKLITQRKFDNLTKAERGGLSELDKAGFIKRQLVETRQITKHVAQILDSRMNTKYDENDKLIREVKVITLKSKLVSDFRKDFQFYKVREINNYHHAHDAYLNAVVGTALIKKYPKLESEFVYGDYKVYDVRKMIAKSEQEIGKATAKYFFYSNIMNFFKTEITLANGEIRKRPLIETNGETGEIVWDKGRDFATVRKVLSMPQVNIVKKTEVQTGGFSKESILPKRNSDKLIARKKDWDPKKYGGFDSPTVAYSVLVVAKVEKGKSKKLKSVKELLGITIMERSSFEKNPIDFLEAKGYKEVKKDLIIKLPKYSLFELENGRKRMLASAGELQKGNELALPSKYVNFLYLASHYEKLKGSPEDNEQKQLFVEQHKHYLDEIIEQISEFSKRVILADANLDKVLSAYNKHRDKPIREQAENIIHLFTLTNLGAPAAFKYFDTTIDRKRYTSTKEVLDATLIHQSITGLYETRIDLSQLGGDGGPAPGGSEAAAKGGTVSLQDEHRLFDIPVTTSLPDVWLQDFPQAWAETGGLGRAKCQAPIIIDLKPTAVPVSIKQYPMSLEAHMGIRQHIIKFLELGVLRPCRSPWNTPLLPVKKPGTQDYRPVQDLREINKRTVDIHPTVPNPYNLLSTLKPDYSWYTVLDLKDAFFCLPLAPQSQELFAFEWKDPERGISGQLTWTRLPQGFKNSPTLFNEALHRDLTDFRTQHPEVTLLQYVDDLLLAAPTKKACTQGTRHLLQELGEKGYRASAKKAQICQTKVTYLGYILSEGKRWLTPGRIETVARIPPPRNPREVREFLGTAGFCRLWIPGFAELAAPLYALTKPSTPFTWQTEHQLAFEALKKALLSAPALGLPDTSKPFTLFLDERQGIAKGVLTQKLGPWKRPVAYLSKKLDPVAAGWPPCLRIMAATAMLVKDSAKLTLGQPLTVITPHTLEAIVRQPPDRWITNARLTHYQALLLDTDRVQFGPPVTLNPATLLPVPENQPSPHDCRQVLAETHGTREDLKDQELPDADHTWYTDGSSYLDSGTRRAGAAVVDGHNTIWAQSLPPGTSAQKAELIALTKALELSKGKKANIYTDSRYAFATAHTHGSIYERRGWLTSEGKEIKNKAEIIALLKALFLPQEVAIIHCPGHQKGQDPVAVGNRQADRVARQAAMAEVLTLATEPDNTSHITAGKRTADGSEFEKRTADGSEFESPKKKAKVE

SEQ ID NO: 1556 - protein, 2097 aa, synthetic construct
MPAAKRVKLDGGDKKYSIGLDIGTNSVGWAVITDEYKVPSKKFKVLGNTDRHSIKKNLIGALLFDSGETAEATRLKRTARRRYTRRKNRICYLQEIFSNEMAKVDDSFFHRLEESFLVEEDKKHERHPIFGNIVDEVAYHEKYPTIYHLRKKLVDSTDKADLRLIYLALAHMIKFRGHFLIEGDLNPDNSDVDKLFIQLVQTYNQLFEENPINASGVDAKAILSARLSKSRRLENLIAQLPGEKKNGLFGNLIALSLGLTPNFKSNFDLAEDAKLQLSKDTYDDDLDNLLAQIGDQYADLFLAAKNLSDAILLSDILRVNTEITKAPLSASMIKRYDEHHQDLTLLKALVRQQLPEKYKEIFFDQSKNGYAGYIDGGASQEEFYKFIKPILEKMDGTEELLVKLNREDLLRKQRTFDNGSIPHQIHLGELHAILRRQEDFYPFLKDNREKIEKILTFRIPYYVGPLARGNSRFAWMTRKSEETITPWNFEEVVDKGASAQSFIERMTNFDKNLPNEKVLPKHSLLYEYFTVYNELTKVKYVTEGMRKPAFLSGEQKKAIVDLLFKTNRKVTVKQLKEDYFKKIECFDSVEISGVEDRFNASLGTYHDLLKIIKDKDFLDNEENEDILEDIVLTLTLFEDREMIEERLKTYAHLFDDKVMKQLKRRRYTGWGRLSRKLINGIRDKQSGKTILDFLKSDGFANRNFMQLIHDDSLTFKEDIQKAQVSGQGDSLHEHIANLAGSPAIKKGILQTVKVVDELVKVMGRHKPENIVIEMARENQTTQKGQKNSRERMKRIEEGIKELGSQILKEHPVENTQLQNEKLYLYYLQNGRDMYVDQELDINRLSDYDVDHIVPQSFLKDDSIDNKVLTRSDKARGKSDNVPSEEVVKKMKNYWRQLLNAKLITQRKFDNLTKAERGGLSELDKAGFIKRQLVETRQITKHVAQILDSRMNTKYDENDKLIREVKVITLKSKLVSDFRKDFQFYKVREINNYHHAHDAYLNAVVGTALIKKYPKLESEFVYGDYKVYDVRKMIAKSEQEIGKATAKYFFYSNIMNFFKTEITLANGEIRKRPLIETNGETGEIVWDKGRDFATVRKVLSMPQVNIVKKTEVQTGGFSKESILPKRNSDKLIARKKDWDPKKYGGFDSPTVAYSVLVVAKVEKGKSKKLKSVKELLGITIMERSSFEKNPIDFLEAKGYKEVKKDLIIKLPKYSLFELENGRKRMLASAGELQKGNELALPSKYVNFLYLASHYEKLKGSPEDNEQKQLFVEQHKHYLDEIIEQISEFSKRVILADANLDKVLSAYNKHRDKPIREQAENIIHLFTLTNLGAPAAFKYFDTTIDRKRYTSTKEVLDATLIHQSITGLYETRIDLSQLGGDGGGGSGGSGGTVSLQDEHRLFDIPVTTSLPDVWLQDFPQAWAETGGLGRAKCQAPIIIDLKPTAVPVSIKQYPMSLEAHMGIRQHIIKFLELGVLRPCRSPWNTPLLPVKKPGTQDYRPVQDLREINKRTVDIHPTVPNPYNLLSTLKPDYSWYTVLDLKDAFFCLPLAPQSQELFAFEWKDPERGISGQLTWTRLPQGFKNSPTLFNEALHRDLTDFRTQHPEVTLLQYVDDLLLAAPTKKACTQGTRHLLQELGEKGYRASAKKAQICQTKVTYLGYILSEGKRWLTPGRIETVARIPPPRNPREVREFLGTAGFCRLWIPGFAELAAPLYALTKPSTPFTWQTEHQLAFEALKKALLSAPALGLPDTSKPFTLFLDERQGIAKGVLTQKLGPWKRPVAYLSKKLDPVAAGWPPCLRIMAATAMLVKDSAKLTLGQPLTVITPHTLEAIVRQPPDRWITNARLTHYQALLLDTDRVQFGPPVTLNPATLLPVPENQPSPHDCRQVLAETHGTREDLKDQELPDADHTWYTDGSSYLDSGTRRAGAAVVDGHNTIWAQSLPPGTSAQKAELIALTKALELSKGKKANIYTDSRYAFATAHTHGSIYERRGWLTSEGKEIKNKAEIIALLKALFLPQEVAIIHCPGHQKGQDPVAVGNRQADRVARQAAMAEVLTLATEPDNTSHITAGKRTADGSEFEKRTADGSEFESPKKKAKVE

SEQ ID NO: 1557 - protein, 2099 aa, synthetic construct
MPAAKRVKLDGGDKKYSIGLDIGTNSVGWAVITDEYKVPSKKFKVLGNTDRHSIKKNLIGALLFDSGETAEATRLKRTARRRYTRRKNRICYLQEIFSNEMAKVDDSFFHRLEESFLVEEDKKHERHPIFGNIVDEVAYHEKYPTIYHLRKKLVDSTDKADLRLIYLALAHMIKFRGHFLIEGDLNPDNSDVDKLFIQLVQTYNQLFEENPINASGVDAKAILSARLSKSRRLENLIAQLPGEKKNGLFGNLIALSLGLTPNFKSNFDLAEDAKLQLSKDTYDDDLDNLLAQIGDQYADLFLAAKNLSDAILLSDILRVNTEITKAPLSASMIKRYDEHHQDLTLLKALVRQQLPEKYKEIFFDQSKNGYAGYIDGGASQEEFYKFIKPILEKMDGTEELLVKLNREDLLRKQRTFDNGSIPHQIHLGELHAILRRQEDFYPFLKDNREKIEKILTFRIPYYVGPLARGNSRFAWMTRKSEETITPWNFEEVVDKGASAQSFIERMTNFDKNLPNEKVLPKHSLLYEYFTVYNELTKVKYVTEGMRKPAFLSGEQKKAIVDLLFKTNRKVTVKQLKEDYFKKIECFDSVEISGVEDRFNASLGTYHDLLKIIKDKDFLDNEENEDILEDIVLTLTLFEDREMIEERLKTYAHLFDDKVMKQLKRRRYTGWGRLSRKLINGIRDKQSGKTILDFLKSDGFANRNFMQLIHDDSLTFKEDIQKAQVSGQGDSLHEHIANLAGSPAIKKGILQTVKVVDELVKVMGRHKPENIVIEMARENQTTQKGQKNSRERMKRIEEGIKELGSQILKEHPVENTQLQNEKLYLYYLQNGRDMYVDQELDINRLSDYDVDHIVPQSFLKDDSIDNKVLTRSDKARGKSDNVPSEEVVKKMKNYWRQLLNAKLITQRKFDNLTKAERGGLSELDKAGFIKRQLVETRQITKHVAQILDSRMNTKYDENDKLIREVKVITLKSKLVSDFRKDFQFYKVREINNYHHAHDAYLNAVVGTALIKKYPKLESEFVYGDYKVYDVRKMIAKSEQEIGKATAKYFFYSNIMNFFKTEITLANGEIRKRPLIETNGETGEIVWDKGRDFATVRKVLSMPQVNIVKKTEVQTGGFSKESILPKRNSDKLIARKKDWDPKKYGGFDSPTVAYSVLVVAKVEKGKSKKLKSVKELLGITIMERSSFEKNPIDFLEAKGYKEVKKDLIIKLPKYSLFELENGRKRMLASAGELQKGNELALPSKYVNFLYLASHYEKLKGSPEDNEQKQLFVEQHKHYLDEIIEQISEFSKRVILADANLDKVLSAYNKHRDKPIREQAENIIHLFTLTNLGAPAAFKYFDTTIDRKRYTSTKEVLDATLIHQSITGLYETRIDLSQLGGDGGEAAAKGGSGGTVSLQDEHRLFDIPVTTSLPDVWLQDFPQAWAETGGLGRAKCQAPIIIDLKPTAVPVSIKQYPMSLEAHMGIRQHIIKFLELGVLRPCRSPWNTPLLPVKKPGTQDYRPVQDLREINKRTVDIHPTVPNPYNLLSTLKPDYSWYTVLDLKDAFFCLPLAPQSQELFAFEWKDPERGISGQLTWTRLPQGFKNSPTLFNEALHRDLTDFRTQHPEVTLLQYVDDLLLAAPTKKACTQGTRHLLQELGEKGYRASAKKAQICQTKVTYLGYILSEGKRWLTPGRIETVARIPPPRNPREVREFLGTAGFCRLWIPGFAELAAPLYALTKPSTPFTWQTEHQLAFEALKKALLSAPALGLPDTSKPFTLFLDERQGIAKGVLTQKLGPWKRPVAYLSKKLDPVAAGWPPCLRIMAATAMLVKDSAKLTLGQPLTVITPHTLEAIVRQPPDRWITNARLTHYQALLLDTDRVQFGPPVTLNPATLLPVPENQPSPHDCRQVLAETHGTREDLKDQELPDADHTWYTDGSSYLDSGTRRAGAAVVDGHNTIWAQSLPPGTSAQKAELIALTKALELSKGKKANIYTDSRYAFATAHTHGSIYERRGWLTSEGKEIKNKAEIIALLKALFLPQEVAIIHCPGHQKGQDPVAVGNRQADRVARQAAMAEVLTLATEPDNTSHITAGKRTADGSEFEKRTADGSEFESPKKKAKVE

SEQ ID NO: 1558 - protein, 2097 aa, synthetic construct
MPAAKRVKLDGGDKKYSIGLDIGTNSVGWAVITDEYKVPSKKFKVLGNTDRHSIKKNLIGALLFDSGETAEATRLKRTARRRYTRRKNRICYLQEIFSNEMAKVDDSFFHRLEESFLVEEDKKHERHPIFGNIVDEVAYHEKYPTIYHLRKKLVDSTDKADLRLIYLALAHMIKFRGHFLIEGDLNPDNSDVDKLFIQLVQTYNQLFEENPINASGVDAKAILSARLSKSRRLENLIAQLPGEKKNGLFGNLIALSLGLTPNFKSNFDLAEDAKLQLSKDTYDDDLDNLLAQIGDQYADLFLAAKNLSDAILLSDILRVNTEITKAPLSASMIKRYDEHHQDLTLLKALVRQQLPEKYKEIFFDQSKNGYAGYIDGGASQEEFYKFIKPILEKMDGTEELLVKLNREDLLRKQRTFDNGSIPHQIHLGELHAILRRQEDFYPFLKDNREKIEKILTFRIPYYVGPLARGNSRFAWMTRKSEETITPWNFEEVVDKGASAQSFIERMTNFDKNLPNEKVLPKHSLLYEYFTVYNELTKVKYVTEGMRKPAFLSGEQKKAIVDLLFKTNRKVTVKQLKEDYFKKIECFDSVEISGVEDRFNASLGTYHDLLKIIKDKDFLDNEENEDILEDIVLTLTLFEDREMIEERLKTYAHLFDDKVMKQLKRRRYTGWGRLSRKLINGIRDKQSGKTILDFLKSDGFANRNFMQLIHDDSLTFKEDIQKAQVSGQGDSLHEHIANLAGSPAIKKGILQTVKVVDELVKVMGRHKPENIVIEMARENQTTQKGQKNSRERMKRIEEGIKELGSQILKEHPVENTQLQNEKLYLYYLQNGRDMYVDQELDINRLSDYDVDHIVPQSFLKDDSIDNKVLTRSDKARGKSDNVPSEEVVKKMKNYWRQLLNAKLITQRKFDNLTKAERGGLSELDKAGFIKRQLVETRQITKHVAQILDSRMNTKYDENDKLIREVKVITLKSKLVSDFRKDFQFYKVREINNYHHAHDAYLNAVVGTALIKKYPKLESEFVYGDYKVYDVRKMIAKSEQEIGKATAKYFFYSNIMNFFKTEITLANGEIRKRPLIETNGETGEIVWDKGRDFATVRKVLSMPQVNIVKKTEVQTGGFSKESILPKRNSDKLIARKKDWDPKKYGGFDSPTVAYSVLVVAKVEKGKSKKLKSVKELLGITIMERSSFEKNPIDFLEAKGYKEVKKDLIIKLPKYSLFELENGRKRMLASAGELQKGNELALPSKYVNFLYLASHYEKLKGSPEDNEQKQLFVEQHKHYLDEIIEQISEFSKRVILADANLDKVLSAYNKHRDKPIREQAENIIHLFTLTNLGAPAAFKYFDTTIDRKRYTSTKEVLDATLIHQSITGLYETRIDLSQLGGDGGPAPGSSGGTVSLQDEHRLFDIPVTTSLPDVWLQDFPQAWAETGGLGRAKCQAPIIIDLKPTAVPVSIKQYPMSLEAHMGIRQHIIKFLELGVLRPCRSPWNTPLLPVKKPGTQDYRPVQDLREINKRTVDIHPTVPNPYNLLSTLKPDYSWYTVLDLKDAFFCLPLAPQSQELFAFEWKDPERGISGQLTWTRLPQGFKNSPTLFNEALHRDLTDFRTQHPEVTLLQYVDDLLLAAPTKKACTQGTRHLLQELGEKGYRASAKKAQICQTKVTYLGYILSEGKRWLTPGRIETVARIPPPRNPREVREFLGTAGFCRLWIPGFAELAAPLYALTKPSTPFTWQTEHQLAFEALKKALLSAPALGLPDTSKPFTLFLDERQGIAKGVLTQKLGPWKRPVAYLSKKLDPVAAGWPPCLRIMAATAMLVKDSAKLTLGQPLTVITPHTLEAIVRQPPDRWITNARLTHYQALLLDTDRVQFGPPVTLNPATLLPVPENQPSPHDCRQVLAETHGTREDLKDQELPDADHTWYTDGSSYLDSGTRRAGAAVVDGHNTIWAQSLPPGTSAQKAELIALTKALELSKGKKANIYTDSRYAFATAHTHGSIYERRGWLTSEGKEIKNKAEIIALLKALFLPQEVAIIHCPGHQKGQDPVAVGNRQADRVARQAAMAEVLTLATEPDNTSHITAGKRTADGSEFEKRTADGSEFESPKKKAKVE

SEQ ID NO: 1559 - protein, 2096 aa, synthetic construct
MPAAKRVKLDGGDKKYSIGLDIGTNSVGWAVITDEYKVPSKKFKVLGNTDRHSIKKNLIGALLFDSGETAEATRLKRTARRRYTRRKNRICYLQEIFSNEMAKVDDSFFHRLEESFLVEEDKKHERHPIFGNIVDEVAYHEKYPTIYHLRKKLVDSTDKADLRLIYLALAHMIKFRGHFLIEGDLNPDNSDVDKLFIQLVQTYNQLFEENPINASGVDAKAILSARLSKSRRLENLIAQLPGEKKNGLFGNLIALSLGLTPNFKSNFDLAEDAKLQLSKDTYDDDLDNLLAQIGDQYADLFLAAKNLSDAILLSDILRVNTEITKAPLSASMIKRYDEHHQDLTLLKALVRQQLPEKYKEIFFDQSKNGYAGYIDGGASQEEFYKFIKPILEKMDGTEELLVKLNREDLLRKQRTFDNGSIPHQIHLGELHAILRRQEDFYPFLKDNREKIEKILTFRIPYYVGPLARGNSRFAWMTRKSEETITPWNFEEVVDKGASAQSFIERMTNFDKNLPNEKVLPKHSLLYEYFTVYNELTKVKYVTEGMRKPAFLSGEQKKAIVDLLFKTNRKVTVKQLKEDYFKKIECFDSVEISGVEDRFNASLGTYHDLLKIIKDKDFLDNEENEDILEDIVLTLTLFEDREMIEERLKTYAHLFDDKVMKQLKRRRYTGWGRLSRKLINGIRDKQSGKTILDFLKSDGFANRNFMQLIHDDSLTFKEDIQKAQVSGQGDSLHEHIANLAGSPAIKKGILQTVKVVDELVKVMGRHKPENIVIEMARENQTTQKGQKNSRERMKRIEEGIKELGSQILKEHPVENTQLQNEKLYLYYLQNGRDMYVDQELDINRLSDYDVDHIVPQSFLKDDSIDNKVLTRSDKARGKSDNVPSEEVVKKMKNYWRQLLNAKLITQRKFDNLTKAERGGLSELDKAGFIKRQLVETRQITKHVAQILDSRMNTKYDENDKLIREVKVITLKSKLVSDFRKDFQFYKVREINNYHHAHDAYLNAVVGTALIKKYPKLESEFVYGDYKVYDVRKMIAKSEQEIGKATAKYFFYSNIMNFFKTEITLANGEIRKRPLIETNGETGEIVWDKGRDFATVRKVLSMPQVNIVKKTEVQTGGFSKESILPKRNSDKLIARKKDWDPKKYGGFDSPTVAYSVLVVAKVEKGKSKKLKSVKELLGITIMERSSFEKNPIDFLEAKGYKEVKKDLIIKLPKYSLFELENGRKRMLASAGELQKGNELALPSKYVNFLYLASHYEKLKGSPEDNEQKQLFVEQHKHYLDEIIEQISEFSKRVILADANLDKVLSAYNKHRDKPIREQAENIIHLFTLTNLGAPAAFKYFDTTIDRKRYTSTKEVLDATLIHQSITGLYETRIDLSQLGGDGGGGGGSGGTVSLQDEHRLFDIPVTTSLPDVWLQDFPQAWAETGGLGRAKCQAPIIIDLKPTAVPVSIKQYPMSLEAHMGIRQHIIKFLELGVLRPCRSPWNTPLLPVKKPGTQDYRPVQDLREINKRTVDIHPTVPNPYNLLSTLKPDYSWYTVLDLKDAFFCLPLAPQSQELFAFEWKDPERGISGQLTWTRLPQGFKNSPTLFNEALHRDLTDFRTQHPEVTLLQYVDDLLLAAPTKKACTQGTRHLLQELGEKGYRASAKKAQICQTKVTYLGYILSEGKRWLTPGRIETVARIPPPRNPREVREFLGTAGFCRLWIPGFAELAAPLYALTKPSTPFTWQTEHQLAFEALKKALLSAPALGLPDTSKPFTLFLDERQGIAKGVLTQKLGPWKRPVAYLSKKLDPVAAGWPPCLRIMAATAMLVKDSAKLTLGQPLTVITPHTLEAIVRQPPDRWITNARLTHYQALLLDTDRVQFGPPVTLNPATLLPVPENQPSPHDCRQVLAETHGTREDLKDQELPDADHTWYTDGSSYLDSGTRRAGAAVVDGHNTIWAQSLPPGTSAQKAELIALTKALELSKGKKANIYTDSRYAFATAHTHGSIYERRGWLTSEGKEIKNKAEIIALLKALFLPQEVAIIHCPGHQKGQDPVAVGNRQADRVARQAAMAEVLTLATEPDNTSHITAGKRTADGSEFEKRTADGSEFESPKKKAKVE

SEQ ID NO: 1560 - protein, 2098 aa, synthetic construct
MPAAKRVKLDGGDKKYSIGLDIGTNSVGWAVITDEYKVPSKKFKVLGNTDRHSIKKNLIGALLFDSGETAEATRLKRTARRRYTRRKNRICYLQEIFSNEMAKVDDSFFHRLEESFLVEEDKKHERHPIFGNIVDEVAYHEKYPTIYHLRKKLVDSTDKADLRLIYLALAHMIKFRGHFLIEGDLNPDNSDVDKLFIQLVQTYNQLFEENPINASGVDAKAILSARLSKSRRLENLIAQLPGEKKNGLFGNLIALSLGLTPNFKSNFDLAEDAKLQLSKDTYDDDLDNLLAQIGDQYADLFLAAKNLSDAILLSDILRVNTEITKAPLSASMIKRYDEHHQDLTLLKALVRQQLPEKYKEIFFDQSKNGYAGYIDGGASQEEFYKFIKPILEKMDGTEELLVKLNREDLLRKQRTFDNGSIPHQIHLGELHAILRRQEDFYPFLKDNREKIEKILTFRIPYYVGPLARGNSRFAWMTRKSEETITPWNFEEVVDKGASAQSFIERMTNFDKNLPNEKVLPKHSLLYEYFTVYNELTKVKYVTEGMRKPAFLSGEQKKAIVDLLFKTNRKVTVKQLKEDYFKKIECFDSVEISGVEDRFNASLGTYHDLLKIIKDKDFLDNEENEDILEDIVLTLTLFEDREMIEERLKTYAHLFDDKVMKQLKRRRYTGWGRLSRKLINGIRDKQSGKTILDFLKSDGFANRNFMQLIHDDSLTFKEDIQKAQVSGQGDSLHEHIANLAGSPAIKKGILQTVKVVDELVKVMGRHKPENIVIEMARENQTTQKGQKNSRERMKRIEEGIKELGSQILKEHPVENTQLQNEKLYLYYLQNGRDMYVDQELDINRLSDYDVDHIVPQSFLKDDSIDNKVLTRSDKARGKSDNVPSEEVVKKMKNYWRQLLNAKLITQRKFDNLTKAERGGLSELDKAGFIKRQLVETRQITKHVAQILDSRMNTKYDENDKLIREVKVITLKSKLVSDFRKDFQFYKVREINNYHHAHDAYLNAVVGTALIKKYPKLESEFVYGDYKVYDVRKMIAKSEQEIGKATAKYFFYSNIMNFFKTEITLANGEIRKRPLIETNGETGEIVWDKGRDFATVRKVLSMPQVNIVKKTEVQTGGFSKESILPKRNSDKLIARKKDWDPKKYGGFDSPTVAYSVLVVAKVEKGKSKKLKSVKELLGITIMERSSFEKNPIDFLEAKGYKEVKKDLIIKLPKYSLFELENGRKRMLASAGELQKGNELALPSKYVNFLYLASHYEKLKGSPEDNEQKQLFVEQHKHYLDEIIEQISEFSKRVILADANLDKVLSAYNKHRDKPIREQAENIIHLFTLTNLGAPAAFKYFDTTIDRKRYTSTKEVLDATLIHQSITGLYETRIDLSQLGGDGGGGGGGGGGGTVSLQDEHRLFDIPVTTSLPDVWLQDFPQAWAETGGLGRAKCQAPIIIDLKPTAVPVSIKQYPMSLEAHMGIRQHIIKFLELGVLRPCRSPWNTPLLPVKKPGTQDYRPVQDLREINKRTVDIHPTVPNPYNLLSTLKPDYSWYTVLDLKDAFFCLPLAPQSQELFAFEWKDPERGISGQLTWTRLPQGFKNSPTLFNEALHRDLTDFRTQHPEVTLLQYVDDLLLAAPTKKACTQGTRHLLQELGEKGYRASAKKAQICQTKVTYLGYILSEGKRWLTPGRIETVARIPPPRNPREVREFLGTAGFCRLWIPGFAELAAPLYALTKPSTPFTWQTEHQLAFEALKKALLSAPALGLPDTSKPFTLFLDERQGIAKGVLTQKLGPWKRPVAYLSKKLDPVAAGWPPCLRIMAATAMLVKDSAKLTLGQPLTVITPHTLEAIVRQPPDRWITNARLTHYQALLLDTDRVQFGPPVTLNPATLLPVPENQPSPHDCRQVLAETHGTREDLKDQELPDADHTWYTDGSSYLDSGTRRAGAAVVDGHNTIWAQSLPPGTSAQKAELIALTKALELSKGKKANIYTDSRYAFATAHTHGSIYERRGWLTSEGKEIKNKAEIIALLKALFLPQEVAIIHCPGHQKGQDPVAVGNRQADRVARQAAMAEVLTLATEPDNTSHITAGKRTADGSEFEKRTADGSEFESPKKKAKVE

SEQ ID NO: 1561 - protein, 2106 aa, synthetic construct
MPAAKRVKLDGGDKKYSIGLDIGTNSVGWAVITDEYKVPSKKFKVLGNTDRHSIKKNLIGALLFDSGETAEATRLKRTARRRYTRRKNRICYLQEIFSNEMAKVDDSFFHRLEESFLVEEDKKHERHPIFGNIVDEVAYHEKYPTIYHLRKKLVDSTDKADLRLIYLALAHMIKFRGHFLIEGDLNPDNSDVDKLFIQLVQTYNQLFEENPINASGVDAKAILSARLSKSRRLENLIAQLPGEKKNGLFGNLIALSLGLTPNFKSNFDLAEDAKLQLSKDTYDDDLDNLLAQIGDQYADLFLAAKNLSDAILLSDILRVNTEITKAPLSASMIKRYDEHHQDLTLLKALVRQQLPEKYKEIFFDQSKNGYAGYIDGGASQEEFYKFIKPILEKMDGTEELLVKLNREDLLRKQRTFDNGSIPHQIHLGELHAILRRQEDFYPFLKDNREKIEKILTFRIPYYVGPLARGNSRFAWMTRKSEETITPWNFEEVVDKGASAQSFIERMTNFDKNLPNEKVLPKHSLLYEYFTVYNELTKVKYVTEGMRKPAFLSGEQKKAIVDLLFKTNRKVTVKQLKEDYFKKIECFDSVEISGVEDRFNASLGTYHDLLKIIKDKDFLDNEENEDILEDIVLTLTLFEDREMIEERLKTYAHLFDDKVMKQLKRRRYTGWGRLSRKLINGIRDKQSGKTILDFLKSDGFANRNFMQLIHDDSLTFKEDIQKAQVSGQGDSLHEHIANLAGSPAIKKGILQTVKVVDELVKVMGRHKPENIVIEMARENQTTQKGQKNSRERMKRIEEGIKELGSQILKEHPVENTQLQNEKLYLYYLQNGRDMYVDQELDINRLSDYDVDHIVPQSFLKDDSIDNKVLTRSDKARGKSDNVPSEEVVKKMKNYWRQLLNAKLITQRKFDNLTKAERGGLSELDKAGFIKRQLVETRQITKHVAQILDSRMNTKYDENDKLIREVKVITLKSKLVSDFRKDFQFYKVREINNYHHAHDAYLNAVVGTALIKKYPKLESEFVYGDYKVYDVRKMIAKSEQEIGKATAKYFFYSNIMNFFKTEITLANGEIRKRPLIETNGETGEIVWDKGRDFATVRKVLSMPQVNIVKKTEVQTGGFSKESILPKRNSDKLIARKKDWDPKKYGGFDSPTVAYSVLVVAKVEKGKSKKLKSVKELLGITIMERSSFEKNPIDFLEAKGYKEVKKDLIIKLPKYSLFELENGRKRMLASAGELQKGNELALPSKYVNFLYLASHYEKLKGSPEDNEQKQLFVEQHKHYLDEIIEQISEFSKRVILADANLDKVLSAYNKHRDKPIREQAENIIHLFTLTNLGAPAAFKYFDTTIDRKRYTSTKEVLDATLIHQSITGLYETRIDLSQLGGDGGGGGGSEAAAKGGGGSGGTVSLQDEHRLFDIPVTTSLPDVWLQDFPQAWAETGGLGRAKCQAPIIIDLKPTAVPVSIKQYPMSLEAHMGIRQHIIKFLELGVLRPCRSPWNTPLLPVKKPGTQDYRPVQDLREINKRTVDIHPTVPNPYNLLSTLKPDYSWYTVLDLKDAFFCLPLAPQSQELFAFEWKDPERGISGQLTWTRLPQGFKNSPTLFNEALHRDLTDFRTQHPEVTLLQYVDDLLLAAPTKKACTQGTRHLLQELGEKGYRASAKKAQICQTKVTYLGYILSEGKRWLTPGRIETVARIPPPRNPREVREFLGTAGFCRLWIPGFAELAAPLYALTKPSTPFTWQTEHQLAFEALKKALLSAPALGLPDTSKPFTLFLDERQGIAKGVLTQKLGPWKRPVAYLSKKLDPVAAGWPPCLRIMAATAMLVKDSAKLTLGQPLTVITPHTLEAIVRQPPDRWITNARLTHYQALLLDTDRVQFGPPVTLNPATLLPVPENQPSPHDCRQVLAETHGTREDLKDQELPDADHTWYTDGSSYLDSGTRRAGAAVVDGHNTIWAQSLPPGTSAQKAELIALTKALELSKGKKANIYTDSRYAFATAHTHGSIYERRGWLTSEGKEIKNKAEIIALLKALFLPQEVAIIHCPGHQKGQDPVAVGNRQADRVARQAAMAEVLTLATEPDNTSHITAGKRTADGSEFEKRTADGSEFESPKKKAKVE

SEQ ID NO: 1562 - protein, 2111 aa, synthetic construct
MPAAKRVKLDGGDKKYSIGLDIGTNSVGWAVITDEYKVPSKKFKVLGNTDRHSIKKNLIGALLFDSGETAEATRLKRTARRRYTRRKNRICYLQEIFSNEMAKVDDSFFHRLEESFLVEEDKKHERHPIFGNIVDEVAYHEKYPTIYHLRKKLVDSTDKADLRLIYLALAHMIKFRGHFLIEGDLNPDNSDVDKLFIQLVQTYNQLFEENPINASGVDAKAILSARLSKSRRLENLIAQLPGEKKNGLFGNLIALSLGLTPNFKSNFDLAEDAKLQLSKDTYDDDLDNLLAQIGDQYADLFLAAKNLSDAILLSDILRVNTEITKAPLSASMIKRYDEHHQDLTLLKALVRQQLPEKYKEIFFDQSKNGYAGYIDGGASQEEFYKFIKPILEKMDGTEELLVKLNREDLLRKQRTFDNGSIPHQIHLGELHAILRRQEDFYPFLKDNREKIEKILTFRIPYYVGPLARGNSRFAWMTRKSEETITPWNFEEVVDKGASAQSFIERMTNFDKNLPNEKVLPKHSLLYEYFTVYNELTKVKYVTEGMRKPAFLSGEQKKAIVDLLFKTNRKVTVKQLKEDYFKKIECFDSVEISGVEDRFNASLGTYHDLLKIIKDKDFLDNEENEDILEDIVLTLTLFEDREMIEERLKTYAHLFDDKVMKQLKRRRYTGWGRLSRKLINGIRDKQSGKTILDFLKSDGFANRNFMQLIHDDSLTFKEDIQKAQVSGQGDSLHEHIANLAGSPAIKKGILQTVKVVDELVKVMGRHKPENIVIEMARENQTTQKGQKNSRERMKRIEEGIKELGSQILKEHPVENTQLQNEKLYLYYLQNGRDMYVDQELDINRLSDYDVDHIVPQSFLKDDSIDNKVLTRSDKARGKSDNVPSEEVVKKMKNYWRQLLNAKLITQRKFDNLTKAERGGLSELDKAGFIKRQLVETRQITKHVAQILDSRMNTKYDENDKLIREVKVITLKSKLVSDFRKDFQFYKVREINNYHHAHDAYLNAVVGTALIKKYPKLESEFVYGDYKVYDVRKMIAKSEQEIGKATAKYFFYSNIMNFFKTEITLANGEIRKRPLIETNGETGEIVWDKGRDFATVRKVLSMPQVNIVKKTEVQTGGFSKESILPKRNSDKLIARKKDWDPKKYGGFDSPTVAYSVLVVAKVEKGKSKKLKSVKELLGITIMERSSFEKNPIDFLEAKGYKEVKKDLIIKLPKYSLFELENGRKRMLASAGELQKGNELALPSKYVNFLYLASHYEKLKGSPEDNEQKQLFVEQHKHYLDEIIEQISEFSKRVILADANLDKVLSAYNKHRDKPIREQAENIIHLFTLTNLGAPAAFKYFDTTIDRKRYTSTKEVLDATLIHQSITGLYETRIDLSQLGGDGGEAAAKEAAAKEAAAKEAAAKGGTVSLQDEHRLFDIPVTTSLPDVWLQDFPQAWAETGGLGRAKCQAPIIIDLKPTAVPVSIKQYPMSLEAHMGIRQHIIKFLELGVLRPCRSPWNTPLLPVKKPGTQDYRPVQDLREINKRTVDIHPTVPNPYNLLSTLKPDYSWYTVLDLKDAFFCLPLAPQSQELFAFEWKDPERGISGQLTWTRLPQGFKNSPTLFNEALHRDLTDFRTQHPEVTLLQYVDDLLLAAPTKKACTQGTRHLLQELGEKGYRASAKKAQICQTKVTYLGYILSEGKRWLTPGRIETVARIPPPRNPREVREFLGTAGFCRLWIPGFAELAAPLYALTKPSTPFTWQTEHQLAFEALKKALLSAPALGLPDTSKPFTLFLDERQGIAKGVLTQKLGPWKRPVAYLSKKLDPVAAGWPPCLRIMAATAMLVKDSAKLTLGQPLTVITPHTLEAIVRQPPDRWITNARLTHYQALLLDTDRVQFGPPVTLNPATLLPVPENQPSPHDCRQVLAETHGTREDLKDQELPDADHTWYTDGSSYLDSGTRRAGAAVVDGHNTIWAQSLPPGTSAQKAELIALTKALELSKGKKANIYTDSRYAFATAHTHGSIYERRGWLTSEGKEIKNKAEIIALLKALFLPQEVAIIHCPGHQKGQDPVAVGNRQADRVARQAAMAEVLTLATEPDNTSHITAGKRTADGSEFEKRTADGSEFESPKKKAKVE

SEQ ID NO: 1563 - protein, 2102 aa, synthetic construct
MPAAKRVKLDGGDKKYSIGLDIGTNSVGWAVITDEYKVPSKKFKVLGNTDRHSIKKNLIGALLFDSGETAEATRLKRTARRRYTRRKNRICYLQEIFSNEMAKVDDSFFHRLEESFLVEEDKKHERHPIFGNIVDEVAYHEKYPTIYHLRKKLVDSTDKADLRLIYLALAHMIKFRGHFLIEGDLNPDNSDVDKLFIQLVQTYNQLFEENPINASGVDAKAILSARLSKSRRLENLIAQLPGEKKNGLFGNLIALSLGLTPNFKSNFDLAEDAKLQLSKDTYDDDLDNLLAQIGDQYADLFLAAKNLSDAILLSDILRVNTEITKAPLSASMIKRYDEHHQDLTLLKALVRQQLPEKYKEIFFDQSKNGYAGYIDGGASQEEFYKFIKPILEKMDGTEELLVKLNREDLLRKQRTFDNGSIPHQIHLGELHAILRRQEDFYPFLKDNREKIEKILTFRIPYYVGPLARGNSRFAWMTRKSEETITPWNFEEVVDKGASAQSFIERMTNFDKNLPNEKVLPKHSLLYEYFTVYNELTKVKYVTEGMRKPAFLSGEQKKAIVDLLFKTNRKVTVKQLKEDYFKKIECFDSVEISGVEDRFNASLGTYHDLLKIIKDKDFLDNEENEDILEDIVLTLTLFEDREMIEERLKTYAHLFDDKVMKQLKRRRYTGWGRLSRKLINGIRDKQSGKTILDFLKSDGFANRNFMQLIHDDSLTFKEDIQKAQVSGQGDSLHEHIANLAGSPAIKKGILQTVKVVDELVKVMGRHKPENIVIEMARENQTTQKGQKNSRERMKRIEEGIKELGSQILKEHPVENTQLQNEKLYLYYLQNGRDMYVDQELDINRLSDYDVDHIVPQSFLKDDSIDNKVLTRSDKARGKSDNVPSEEVVKKMKNYWRQLLNAKLITQRKFDNLTKAERGGLSELDKAGFIKRQLVETRQITKHVAQILDSRMNTKYDENDKLIREVKVITLKSKLVSDFRKDFQFYKVREINNYHHAHDAYLNAVVGTALIKKYPKLESEFVYGDYKVYDVRKMIAKSEQEIGKATAKYFFYSNIMNFFKTEITLANGEIRKRPLIETNGETGEIVWDKGRDFATVRKVLSMPQVNIVKKTEVQTGGFSKESILPKRNSDKLIARKKDWDPKKYGGFDSPTVAYSVLVVAKVEKGKSKKLKSVKELLGITIMERSSFEKNPIDFLEAKGYKEVKKDLIIKLPKYSLFELENGRKRMLASAGELQKGNELALPSKYVNFLYLASHYEKLKGSPEDNEQKQLFVEQHKHYLDEIIEQISEFSKRVILADANLDKVLSAYNKHRDKPIREQAENIIHLFTLTNLGAPAAFKYFDTTIDRKRYTSTKEVLDATLIHQSITGLYETRIDLSQLGGDGGGGSEAAAKPAPGGTVSLQDEHRLFDIPVTTSLPDVWLQDFPQAWAETGGLGRAKCQAPIIIDLKPTAVPVSIKQYPMSLEAHMGIRQHIIKFLELGVLRPCRSPWNTPLLPVKKPGTQDYRPVQDLREINKRTVDIHPTVPNPYNLLSTLKPDYSWYTVLDLKDAFFCLPLAPQSQELFAFEWKDPERGISGQLTWTRLPQGFKNSPTLFNEALHRDLTDFRTQHPEVTLLQYVDDLLLAAPTKKACTQGTRHLLQELGEKGYRASAKKAQICQTKVTYLGYILSEGKRWLTPGRIETVARIPPPRNPREVREFLGTAGFCRLWIPGFAELAAPLYALTKPSTPFTWQTEHQLAFEALKKALLSAPALGLPDTSKPFTLFLDERQGIAKGVLTQKLGPWKRPVAYLSKKLDPVAAGWPPCLRIMAATAMLVKDSAKLTLGQPLTVITPHTLEAIVRQPPDRWITNARLTHYQALLLDTDRVQFGPPVTLNPATLLPVPENQPSPHDCRQVLAETHGTREDLKDQELPDADHTWYTDGSSYLDSGTRRAGAAVVDGHNTIWAQSLPPGTSAQKAELIALTKALELSKGKKANIYTDSRYAFATAHTHGSIYERRGWLTSEGKEIKNKAEIIALLKALFLPQEVAIIHCPGHQKGQDPVAVGNRQADRVARQAAMAEVLTLATEPDNTSHITAGKRTADGSEFEKRTADGSEFESPKKKAKVE

SEQ ID NO: 1564 - protein, 2096 aa, synthetic construct
MPAAKRVKLDGGDKKYSIGLDIGTNSVGWAVITDEYKVPSKKFKVLGNTDRHSIKKNLIGALLFDSGETAEATRLKRTARRRYTRRKNRICYLQEIFSNEMAKVDDSFFHRLEESFLVEEDKKHERHPIFGNIVDEVAYHEKYPTIYHLRKKLVDSTDKADLRLIYLALAHMIKFRGHFLIEGDLNPDNSDVDKLFIQLVQTYNQLFEENPINASGVDAKAILSARLSKSRRLENLIAQLPGEKKNGLFGNLIALSLGLTPNFKSNFDLAEDAKLQLSKDTYDDDLDNLLAQIGDQYADLFLAAKNLSDAILLSDILRVNTEITKAPLSASMIKRYDEHHQDLTLLKALVRQQLPEKYKEIFFDQSKNGYAGYIDGGASQEEFYKFIKPILEKMDGTEELLVKLNREDLLRKQRTFDNGSIPHQIHLGELHAILRRQEDFYPFLKDNREKIEKILTFRIPYYVGPLARGNSRFAWMTRKSEETITPWNFEEVVDKGASAQSFIERMTNFDKNLPNEKVLPKHSLLYEYFTVYNELTKVKYVTEGMRKPAFLSGEQKKAIVDLLFKTNRKVTVKQLKEDYFKKIECFDSVEISGVEDRFNASLGTYHDLLKIIKDKDFLDNEENEDILEDIVLTLTLFEDREMIEERLKTYAHLFDDKVMKQLKRRRYTGWGRLSRKLINGIRDKQSGKTILDFLKSDGFANRNFMQLIHDDSLTFKEDIQKAQVSGQGDSLHEHIANLAGSPAIKKGILQTVKVVDELVKVMGRHKPENIVIEMARENQTTQKGQKNSRERMKRIEEGIKELGSQILKEHPVENTQLQNEKLYLYYLQNGRDMYVDQELDINRLSDYDVDHIVPQSFLKDDSIDNKVLTRSDKARGKSDNVPSEEVVKKMKNYWRQLLNAKLITQRKFDNLTKAERGGLSELDKAGFIKRQLVETRQITKHVAQILDSRMNTKYDENDKLIREVKVITLKSKLVSDFRKDFQFYKVREINNYHHAHDAYLNAVVGTALIKKYPKLESEFVYGDYKVYDVRKMIAKSEQEIGKATAKYFFYSNIMNFFKTEITLANGEIRKRPLIETNGETGEIVWDKGRDFATVRKVLSMPQVNIVKKTEVQTGGFSKESILPKRNSDKLIARKKDWDPKKYGGFDSPTVAYSVLVVAKVEKGKSKKLKSVKELLGITIMERSSFEKNPIDFLEAKGYKEVKKDLIIKLPKYSLFELENGRKRMLASAGELQKGNELALPSKYVNFLYLASHYEKLKGSPEDNEQKQLFVEQHKHYLDEIIEQISEFSKRVILADANLDKVLSAYNKHRDKPIREQAENIIHLFTLTNLGAPAAFKYFDTTIDRKRYTSTKEVLDATLIHQSITGLYETRIDLSQLGGDGGPAPAPGGTVSLQDEHRLFDIPVTTSLPDVWLQDFPQAWAETGGLGRAKCQAPIIIDLKPTAVPVSIKQYPMSLEAHMGIRQHIIKFLELGVLRPCRSPWNTPLLPVKKPGTQDYRPVQDLREINKRTVDIHPTVPNPYNLLSTLKPDYSWYTVLDLKDAFFCLPLAPQSQELFAFEWKDPERGISGQLTWTRLPQGFKNSPTLFNEALHRDLTDFRTQHPEVTLLQYVDDLLLAAPTKKACTQGTRHLLQELGEKGYRASAKKAQICQTKVTYLGYILSEGKRWLTPGRIETVARIPPPRNPREVREFLGTAGFCRLWIPGFAELAAPLYALTKPSTPFTWQTEHQLAFEALKKALLSAPALGLPDTSKPFTLFLDERQGIAKGVLTQKLGPWKRPVAYLSKKLDPVAAGWPPCLRIMAATAMLVKDSAKLTLGQPLTVITPHTLEAIVRQPPDRWITNARLTHYQALLLDTDRVQFGPPVTLNPATLLPVPENQPSPHDCRQVLAETHGTREDLKDQELPDADHTWYTDGSSYLDSGTRRAGAAVVDGHNTIWAQSLPPGTSAQKAELIALTKALELSKGKKANIYTDSRYAFATAHTHGSIYERRGWLTSEGKEIKNKAEIIALLKALFLPQEVAIIHCPGHQKGQDPVAVGNRQADRVARQAAMAEVLTLATEPDNTSHITAGKRTADGSEFEKRTADGSEFESPKKKAKVE

SEQ ID NO: 1565 - protein, 2097 aa, synthetic construct
MPAAKRVKLDGGDKKYSIGLDIGTNSVGWAVITDEYKVPSKKFKVLGNTDRHSIKKNLIGALLFDSGETAEATRLKRTARRRYTRRKNRICYLQEIFSNEMAKVDDSFFHRLEESFLVEEDKKHERHPIFGNIVDEVAYHEKYPTIYHLRKKLVDSTDKADLRLIYLALAHMIKFRGHFLIEGDLNPDNSDVDKLFIQLVQTYNQLFEENPINASGVDAKAILSARLSKSRRLENLIAQLPGEKKNGLFGNLIALSLGLTPNFKSNFDLAEDAKLQLSKDTYDDDLDNLLAQIGDQYADLFLAAKNLSDAILLSDILRVNTEITKAPLSASMIKRYDEHHQDLTLLKALVRQQLPEKYKEIFFDQSKNGYAGYIDGGASQEEFYKFIKPILEKMDGTEELLVKLNREDLLRKQRTFDNGSIPHQIHLGELHAILRRQEDFYPFLKDNREKIEKILTFRIPYYVGPLARGNSRFAWMTRKSEETITPWNFEEVVDKGASAQSFIERMTNFDKNLPNEKVLPKHSLLYEYFTVYNELTKVKYVTEGMRKPAFLSGEQKKAIVDLLFKTNRKVTVKQLKEDYFKKIECFDSVEISGVEDRFNASLGTYHDLLKIIKDKDFLDNEENEDILEDIVLTLTLFEDREMIEERLKTYAHLFDDKVMKQLKRRRYTGWGRLSRKLINGIRDKQSGKTILDFLKSDGFANRNFMQLIHDDSLTFKEDIQKAQVSGQGDSLHEHIANLAGSPAIKKGILQTVKVVDELVKVMGRHKPENIVIEMARENQTTQKGQKNSRERMKRIEEGIKELGSQILKEHPVENTQLQNEKLYLYYLQNGRDMYVDQELDINRLSDYDVDHIVPQSFLKDDSIDNKVLTRSDKARGKSDNVPSEEVVKKMKNYWRQLLNAKLITQRKFDNLTKAERGGLSELDKAGFIKRQLVETRQITKHVAQILDSRMNTKYDENDKLIREVKVITLKSKLVSDFRKDFQFYKVREINNYHHAHDAYLNAVVGTALIKKYPKLESEFVYGDYKVYDVRKMIAKSEQEIGKATAKYFFYSNIMNFFKTEITLANGEIRKRPLIETNGETGEIVWDKGRDFATVRKVLSMPQVNIVKKTEVQTGGFSKESILPKRNSDKLIARKKDWDPKKYGGFDSPTVAYSVLVVAKVEKGKSKKLKSVKELLGITIMERSSFEKNPIDFLEAKGYKEVKKDLIIKLPKYSLFELENGRKRMLASAGELQKGNELALPSKYVNFLYLASHYEKLKGSPEDNEQKQLFVEQHKHYLDEIIEQISEFSKRVILADANLDKVLSAYNKHRDKPIREQAENIIHLFTLTNLGAPAAFKYFDTTIDRKRYTSTKEVLDATLIHQSITGLYETRIDLSQLGGDGGGGGGSSGGTVSLQDEHRLFDIPVTTSLPDVWLQDFPQAWAETGGLGRAKCQAPIIIDLKPTAVPVSIKQYPMSLEAHMGIRQHIIKFLELGVLRPCRSPWNTPLLPVKKPGTQDYRPVQDLREINKRTVDIHPTVPNPYNLLSTLKPDYSWYTVLDLKDAFFCLPLAPQSQELFAFEWKDPERGISGQLTWTRLPQGFKNSPTLFNEALHRDLTDFRTQHPEVTLLQYVDDLLLAAPTKKACTQGTRHLLQELGEKGYRASAKKAQICQTKVTYLGYILSEGKRWLTPGRIETVARIPPPRNPREVREFLGTAGFCRLWIPGFAELAAPLYALTKPSTPFTWQTEHQLAFEALKKALLSAPALGLPDTSKPFTLFLDERQGIAKGVLTQKLGPWKRPVAYLSKKLDPVAAGWPPCLRIMAATAMLVKDSAKLTLGQPLTVITPHTLEAIVRQPPDRWITNARLTHYQALLLDTDRVQFGPPVTLNPATLLPVPENQPSPHDCRQVLAETHGTREDLKDQELPDADHTWYTDGSSYLDSGTRRAGAAVVDGHNTIWAQSLPPGTSAQKAELIALTKALELSKGKKANIYTDSRYAFATAHTHGSIYERRGWLTSEGKEIKNKAEIIALLKALFLPQEVAIIHCPGHQKGQDPVAVGNRQADRVARQAAMAEVLTLATEPDNTSHITAGKRTADGSEFEKRTADGSEFESPKKKAKVE

SEQ ID NO: 1566 - protein, 2099 aa, synthetic construct
MPAAKRVKLDGGDKKYSIGLDIGTNSVGWAVITDEYKVPSKKFKVLGNTDRHSIKKNLIGALLFDSGETAEATRLKRTARRRYTRRKNRICYLQEIFSNEMAKVDDSFFHRLEESFLVEEDKKHERHPIFGNIVDEVAYHEKYPTIYHLRKKLVDSTDKADLRLIYLALAHMIKFRGHFLIEGDLNPDNSDVDKLFIQLVQTYNQLFEENPINASGVDAKAILSARLSKSRRLENLIAQLPGEKKNGLFGNLIALSLGLTPNFKSNFDLAEDAKLQLSKDTYDDDLDNLLAQIGDQYADLFLAAKNLSDAILLSDILRVNTEITKAPLSASMIKRYDEHHQDLTLLKALVRQQLPEKYKEIFFDQSKNGYAGYIDGGASQEEFYKFIKPILEKMDGTEELLVKLNREDLLRKQRTFDNGSIPHQIHLGELHAILRRQEDFYPFLKDNREKIEKILTFRIPYYVGPLARGNSRFAWMTRKSEETITPWNFEEVVDKGASAQSFIERMTNFDKNLPNEKVLPKHSLLYEYFTVYNELTKVKYVTEGMRKPAFLSGEQKKAIVDLLFKTNRKVTVKQLKEDYFKKIECFDSVEISGVEDRFNASLGTYHDLLKIIKDKDFLDNEENEDILEDIVLTLTLFEDREMIEERLKTYAHLFDDKVMKQLKRRRYTGWGRLSRKLINGIRDKQSGKTILDFLKSDGFANRNFMQLIHDDSLTFKEDIQKAQVSGQGDSLHEHIANLAGSPAIKKGILQTVKVVDELVKVMGRHKPENIVIEMARENQTTQKGQKNSRERMKRIEEGIKELGSQILKEHPVENTQLQNEKLYLYYLQNGRDMYVDQELDINRLSDYDVDHIVPQSFLKDDSIDNKVLTRSDKARGKSDNVPSEEVVKKMKNYWRQLLNAKLITQRKFDNLTKAERGGLSELDKAGFIKRQLVETRQITKHVAQILDSRMNTKYDENDKLIREVKVITLKSKLVSDFRKDFQFYKVREINNYHHAHDAYLNAVVGTALIKKYPKLESEFVYGDYKVYDVRKMIAKSEQEIGKATAKYFFYSNIMNFFKTEITLANGEIRKRPLIETNGETGEIVWDKGRDFATVRKVLSMPQVNIVKKTEVQTGGFSKESILPKRNSDKLIARKKDWDPKKYGGFDSPTVAYSVLVVAKVEKGKSKKLKSVKELLGITIMERSSFEKNPIDFLEAKGYKEVKKDLIIKLPKYSLFELENGRKRMLASAGELQKGNELALPSKYVNFLYLASHYEKLKGSPEDNEQKQLFVEQHKHYLDEIIEQISEFSKRVILADANLDKVLSAYNKHRDKPIREQAENIIHLFTLTNLGAPAAFKYFDTTIDRKRYTSTKEVLDATLIHQSITGLYETRIDLSQLGGDGGGGGEAAAKGGTVSLQDEHRLFDIPVTTSLPDVWLQDFPQAWAETGGLGRAKCQAPIIIDLKPTAVPVSIKQYPMSLEAHMGIRQHIIKFLELGVLRPCRSPWNTPLLPVKKPGTQDYRPVQDLREINKRTVDIHPTVPNPYNLLSTLKPDYSWYTVLDLKDAFFCLPLAPQSQELFAFEWKDPERGISGQLTWTRLPQGFKNSPTLFNEALHRDLTDFRTQHPEVTLLQYVDDLLLAAPTKKACTQGTRHLLQELGEKGYRASAKKAQICQTKVTYLGYILSEGKRWLTPGRIETVARIPPPRNPREVREFLGTAGFCRLWIPGFAELAAPLYALTKPSTPFTWQTEHQLAFEALKKALLSAPALGLPDTSKPFTLFLDERQGIAKGVLTQKLGPWKRPVAYLSKKLDPVAAGWPPCLRIMAATAMLVKDSAKLTLGQPLTVITPHTLEAIVRQPPDRWITNARLTHYQALLLDTDRVQFGPPVTLNPATLLPVPENQPSPHDCRQVLAETHGTREDLKDQELPDADHTWYTDGSSYLDSGTRRAGAAVVDGHNTIWAQSLPPGTSAQKAELIALTKALELSKGKKANIYTDSRYAFATAHTHGSIYERRGWLTSEGKEIKNKAEIIALLKALFLPQEVAIIHCPGHQKGQDPVAVGNRQADRVARQAAMAEVLTLATEPDNTSHITAGKRTADGSEFEKRTADGSEFESPKKKAKVE

SEQ ID NO: 1567 - protein, 2102 aa, synthetic construct
MPAAKRVKLDGGDKKYSIGLDIGTNSVGWAVITDEYKVPSKKFKVLGNTDRHSIKKNLIGALLFDSGETAEATRLKRTARRRYTRRKNRICYLQEIFSNEMAKVDDSFFHRLEESFLVEEDKKHERHPIFGNIVDEVAYHEKYPTIYHLRKKLVDSTDKADLRLIYLALAHMIKFRGHFLIEGDLNPDNSDVDKLFIQLVQTYNQLFEENPINASGVDAKAILSARLSKSRRLENLIAQLPGEKKNGLFGNLIALSLGLTPNFKSNFDLAEDAKLQLSKDTYDDDLDNLLAQIGDQYADLFLAAKNLSDAILLSDILRVNTEITKAPLSASMIKRYDEHHQDLTLLKALVRQQLPEKYKEIFFDQSKNGYAGYIDGGASQEEFYKFIKPILEKMDGTEELLVKLNREDLLRKQRTFDNGSIPHQIHLGELHAILRRQEDFYPFLKDNREKIEKILTFRIPYYVGPLARGNSRFAWMTRKSEETITPWNFEEVVDKGASAQSFIERMTNFDKNLPNEKVLPKHSLLYEYFTVYNELTKVKYVTEGMRKPAFLSGEQKKAIVDLLFKTNRKVTVKQLKEDYFKKIECFDSVEISGVEDRFNASLGTYHDLLKIIKDKDFLDNEENEDILEDIVLTLTLFEDREMIEERLKTYAHLFDDKVMKQLKRRRYTGWGRLSRKLINGIRDKQSGKTILDFLKSDGFANRNFMQLIHDDSLTFKEDIQKAQVSGQGDSLHEHIANLAGSPAIKKGILQTVKVVDELVKVMGRHKPENIVIEMARENQTTQKGQKNSRERMKRIEEGIKELGSQILKEHPVENTQLQNEKLYLYYLQNGRDMYVDQELDINRLSDYDVDHIVPQSFLKDDSIDNKVLTRSDKARGKSDNVPSEEVVKKMKNYWRQLLNAKLITQRKFDNLTKAERGGLSELDKAGFIKRQLVETRQITKHVAQILDSRMNTKYDENDKLIREVKVITLKSKLVSDFRKDFQFYKVREINNYHHAHDAYLNAVVGTALIKKYPKLESEFVYGDYKVYDVRKMIAKSEQEIGKATAKYFFYSNIMNFFKTEITLANGEIRKRPLIETNGETGEIVWDKGRDFATVRKVLSMPQVNIVKKTEVQTGGFSKESILPKRNSDKLIARKKDWDPKKYGGFDSPTVAYSVLVVAKVEKGKSKKLKSVKELLGITIMERSSFEKNPIDFLEAKGYKEVKKDLIIKLPKYSLFELENGRKRMLASAGELQKGNELALPSKYVNFLYLASHYEKLKGSPEDNEQKQLFVEQHKHYLDEIIEQISEFSKRVILADANLDKVLSAYNKHRDKPIREQAENIIHLFTLTNLGAPAAFKYFDTTIDRKRYTSTKEVLDATLIHQSITGLYETRIDLSQLGGDGGGSSGGSEAAAKGGTVSLQDEHRLFDIPVTTSLPDVWLQDFPQAWAETGGLGRAKCQAPIIIDLKPTAVPVSIKQYPMSLEAHMGIRQHIIKFLELGVLRPCRSPWNTPLLPVKKPGTQDYRPVQDLREINKRTVDIHPTVPNPYNLLSTLKPDYSWYTVLDLKDAFFCLPLAPQSQELFAFEWKDPERGISGQLTWTRLPQGFKNSPTLFNEALHRDLTDFRTQHPEVTLLQYVDDLLLAAPTKKACTQGTRHLLQELGEKGYRASAKKAQICQTKVTYLGYILSEGKRWLTPGRIETVARIPPPRNPREVREFLGTAGFCRLWIPGFAELAAPLYALTKPSTPFTWQTEHQLAFEALKKALLSAPALGLPDTSKPFTLFLDERQGIAKGVLTQKLGPWKRPVAYLSKKLDPVAAGWPPCLRIMAATAMLVKDSAKLTLGQPLTVITPHTLEAIVRQPPDRWITNARLTHYQALLLDTDRVQFGPPVTLNPATLLPVPENQPSPHDCRQVLAETHGTREDLKDQELPDADHTWYTDGSSYLDSGTRRAGAAVVDGHNTIWAQSLPPGTSAQKAELIALTKALELSKGKKANIYTDSRYAFATAHTHGSIYERRGWLTSEGKEIKNKAEIIALLKALFLPQEVAIIHCPGHQKGQDPVAVGNRQADRVARQAAMAEVLTLATEPDNTSHITAGKRTADGSEFEKRTADGSEFESPKKKAKVE

SEQ ID NO: 1568 - protein, 2100 aa, synthetic construct
MPAAKRVKLDGGDKKYSIGLDIGTNSVGWAVITDEYKVPSKKFKVLGNTDRHSIKKNLIGALLFDSGETAEATRLKRTARRRYTRRKNRICYLQEIFSNEMAKVDDSFFHRLEESFLVEEDKKHERHPIFGNIVDEVAYHEKYPTIYHLRKKLVDSTDKADLRLIYLALAHMIKFRGHFLIEGDLNPDNSDVDKLFIQLVQTYNQLFEENPINASGVDAKAILSARLSKSRRLENLIAQLPGEKKNGLFGNLIALSLGLTPNFKSNFDLAEDAKLQLSKDTYDDDLDNLLAQIGDQYADLFLAAKNLSDAILLSDILRVNTEITKAPLSASMIKRYDEHHQDLTLLKALVRQQLPEKYKEIFFDQSKNGYAGYIDGGASQEEFYKFIKPILEKMDGTEELLVKLNREDLLRKQRTFDNGSIPHQIHLGELHAILRRQEDFYPFLKDNREKIEKILTFRIPYYVGPLARGNSRFAWMTRKSEETITPWNFEEVVDKGASAQSFIERMTNFDKNLPNEKVLPKHSLLYEYFTVYNELTKVKYVTEGMRKPAFLSGEQKKAIVDLLFKTNRKVTVKQLKEDYFKKIECFDSVEISGVEDRFNASLGTYHDLLKIIKDKDFLDNEENEDILEDIVLTLTLFEDREMIEERLKTYAHLFDDKVMKQLKRRRYTGWGRLSRKLINGIRDKQSGKTILDFLKSDGFANRNFMQLIHDDSLTFKEDIQKAQVSGQGDSLHEHIANLAGSPAIKKGILQTVKVVDELVKVMGRHKPENIVIEMARENQTTQKGQKNSRERMKRIEEGIKELGSQILKEHPVENTQLQNEKLYLYYLQNGRDMYVDQELDINRLSDYDVDHIVPQSFLKDDSIDNKVLTRSDKARGKSDNVPSEEVVKKMKNYWRQLLNAKLITQRKFDNLTKAERGGLSELDKAGFIKRQLVETRQITKHVAQILDSRMNTKYDENDKLIREVKVITLKSKLVSDFRKDFQFYKVREINNYHHAHDAYLNAVVGTALIKKYPKLESEFVYGDYKVYDVRKMIAKSEQEIGKATAKYFFYSNIMNFFKTEITLANGEIRKRPLIETNGETGEIVWDKGRDFATVRKVLSMPQVNIVKKTEVQTGGFSKESILPKRNSDKLIARKKDWDPKKYGGFDSPTVAYSVLVVAKVEKGKSKKLKSVKELLGITIMERSSFEKNPIDFLEAKGYKEVKKDLIIKLPKYSLFELENGRKRMLASAGELQKGNELALPSKYVNFLYLASHYEKLKGSPEDNEQKQLFVEQHKHYLDEIIEQISEFSKRVILADANLDKVLSAYNKHRDKPIREQAENIIHLFTLTNLGAPAAFKYFDTTIDRKRYTSTKEVLDATLIHQSITGLYETRIDLSQLGGDGGPAPGSSGGGGGTVSLQDEHRLFDIPVTTSLPDVWLQDFPQAWAETGGLGRAKCQAPIIIDLKPTAVPVSIKQYPMSLEAHMGIRQHIIKFLELGVLRPCRSPWNTPLLPVKKPGTQDYRPVQDLREINKRTVDIHPTVPNPYNLLSTLKPDYSWYTVLDLKDAFFCLPLAPQSQELFAFEWKDPERGISGQLTWTRLPQGFKNSPTLFNEALHRDLTDFRTQHPEVTLLQYVDDLLLAAPTKKACTQGTRHLLQELGEKGYRASAKKAQICQTKVTYLGYILSEGKRWLTPGRIETVARIPPPRNPREVREFLGTAGFCRLWIPGFAELAAPLYALTKPSTPFTWQTEHQLAFEALKKALLSAPALGLPDTSKPFTLFLDERQGIAKGVLTQKLGPWKRPVAYLSKKLDPVAAGWPPCLRIMAATAMLVKDSAKLTLGQPLTVITPHTLEAIVRQPPDRWITNARLTHYQALLLDTDRVQFGPPVTLNPATLLPVPENQPSPHDCRQVLAETHGTREDLKDQELPDADHTWYTDGSSYLDSGTRRAGAAVVDGHNTIWAQSLPPGTSAQKAELIALTKALELSKGKKANIYTDSRYAFATAHTHGSIYERRGWLTSEGKEIKNKAEIIALLKALFLPQEVAIIHCPGHQKGQDPVAVGNRQADRVARQAAMAEVLTLATEPDNTSHITAGKRTADGSEFEKRTADGSEFESPKKKAKVE

SEQ ID NO: 1569 - protein, 2099 aa, synthetic construct
MPAAKRVKLDGGDKKYSIGLDIGTNSVGWAVITDEYKVPSKKFKVLGNTDRHSIKKNLIGALLFDSGETAEATRLKRTARRRYTRRKNRICYLQEIFSNEMAKVDDSFFHRLEESFLVEEDKKHERHPIFGNIVDEVAYHEKYPTIYHLRKKLVDSTDKADLRLIYLALAHMIKFRGHFLIEGDLNPDNSDVDKLFIQLVQTYNQLFEENPINASGVDAKAILSARLSKSRRLENLIAQLPGEKKNGLFGNLIALSLGLTPNFKSNFDLAEDAKLQLSKDTYDDDLDNLLAQIGDQYADLFLAAKNLSDAILLSDILRVNTEITKAPLSASMIKRYDEHHQDLTLLKALVRQQLPEKYKEIFFDQSKNGYAGYIDGGASQEEFYKFIKPILEKMDGTEELLVKLNREDLLRKQRTFDNGSIPHQIHLGELHAILRRQEDFYPFLKDNREKIEKILTFRIPYYVGPLARGNSRFAWMTRKSEETITPWNFEEVVDKGASAQSFIERMTNFDKNLPNEKVLPKHSLLYEYFTVYNELTKVKYVTEGMRKPAFLSGEQKKAIVDLLFKTNRKVTVKQLKEDYFKKIECFDSVEISGVEDRFNASLGTYHDLLKIIKDKDFLDNEENEDILEDIVLTLTLFEDREMIEERLKTYAHLFDDKVMKQLKRRRYTGWGRLSRKLINGIRDKQSGKTILDFLKSDGFANRNFMQLIHDDSLTFKEDIQKAQVSGQGDSLHEHIANLAGSPAIKKGILQTVKVVDELVKVMGRHKPENIVIEMARENQTTQKGQKNSRERMKRIEEGIKELGSQILKEHPVENTQLQNEKLYLYYLQNGRDMYVDQELDINRLSDYDVDHIVPQSFLKDDSIDNKVLTRSDKARGKSDNVPSEEVVKKMKNYWRQLLNAKLITQRKFDNLTKAERGGLSELDKAGFIKRQLVETRQITKHVAQILDSRMNTKYDENDKLIREVKVITLKSKLVSDFRKDFQFYKVREINNYHHAHDAYLNAVVGTALIKKYPKLESEFVYGDYKVYDVRKMIAKSEQEIGKATAKYFFYSNIMNFFKTEITLANGEIRKRPLIETNGETGEIVWDKGRDFATVRKVLSMPQVNIVKKTEVQTGGFSKESILPKRNSDKLIARKKDWDPKKYGGFDSPTVAYSVLVVAKVEKGKSKKLKSVKELLGITIMERSSFEKNPIDFLEAKGYKEVKKDLIIKLPKYSLFELENGRKRMLASAGELQKGNELALPSKYVNFLYLASHYEKLKGSPEDNEQKQLFVEQHKHYLDEIIEQISEFSKRVILADANLDKVLSAYNKHRDKPIREQAENIIHLFTLTNLGAPAAFKYFDTTIDRKRYTSTKEVLDATLIHQSITGLYETRIDLSQLGGDGGPAPEAAAKGGTVSLQDEHRLFDIPVTTSLPDVWLQDFPQAWAETGGLGRAKCQAPIIIDLKPTAVPVSIKQYPMSLEAHMGIRQHIIKFLELGVLRPCRSPWNTPLLPVKKPGTQDYRPVQDLREINKRTVDIHPTVPNPYNLLSTLKPDYSWYTVLDLKDAFFCLPLAPQSQELFAFEWKDPERGISGQLTWTRLPQGFKNSPTLFNEALHRDLTDFRTQHPEVTLLQYVDDLLLAAPTKKACTQGTRHLLQELGEKGYRASAKKAQICQTKVTYLGYILSEGKRWLTPGRIETVARIPPPRNPREVREFLGTAGFCRLWIPGFAELAAPLYALTKPSTPFTWQTEHQLAFEALKKALLSAPALGLPDTSKPFTLFLDERQGIAKGVLTQKLGPWKRPVAYLSKKLDPVAAGWPPCLRIMAATAMLVKDSAKLTLGQPLTVITPHTLEAIVRQPPDRWITNARLTHYQALLLDTDRVQFGPPVTLNPATLLPVPENQPSPHDCRQVLAETHGTREDLKDQELPDADHTWYTDGSSYLDSGTRRAGAAVVDGHNTIWAQSLPPGTSAQKAELIALTKALELSKGKKANIYTDSRYAFATAHTHGSIYERRGWLTSEGKEIKNKAEIIALLKALFLPQEVAIIHCPGHQKGQDPVAVGNRQADRVARQAAMAEVLTLATEPDNTSHITAGKRTADGSEFEKRTADGSEFESPKKKAKVE

SEQ ID NO: 1570 - protein, 2107 aa, synthetic construct
MPAAKRVKLDGGDKKYSIGLDIGTNSVGWAVITDEYKVPSKKFKVLGNTDRHSIKKNLIGALLFDSGETAEATRLKRTARRRYTRRKNRICYLQEIFSNEMAKVDDSFFHRLEESFLVEEDKKHERHPIFGNIVDEVAYHEKYPTIYHLRKKLVDSTDKADLRLIYLALAHMIKFRGHFLIEGDLNPDNSDVDKLFIQLVQTYNQLFEENPINASGVDAKAILSARLSKSRRLENLIAQLPGEKKNGLFGNLIALSLGLTPNFKSNFDLAEDAKLQLSKDTYDDDLDNLLAQIGDQYADLFLAAKNLSDAILLSDILRVNTEITKAPLSASMIKRYDEHHQDLTLLKALVRQQLPEKYKEIFFDQSKNGYAGYIDGGASQEEFYKFIKPILEKMDGTEELLVKLNREDLLRKQRTFDNGSIPHQIHLGELHAILRRQEDFYPFLKDNREKIEKILTFRIPYYVGPLARGNSRFAWMTRKSEETITPWNFEEVVDKGASAQSFIERMTNFDKNLPNEKVLPKHSLLYEYFTVYNELTKVKYVTEGMRKPAFLSGEQKKAIVDLLFKTNRKVTVKQLKEDYFKKIECFDSVEISGVEDRFNASLGTYHDLLKIIKDKDFLDNEENEDILEDIVLTLTLFEDREMIEERLKTYAHLFDDKVMKQLKRRRYTGWGRLSRKLINGIRDKQSGKTILDFLKSDGFANRNFMQLIHDDSLTFKEDIQKAQVSGQGDSLHEHIANLAGSPAIKKGILQTVKVVDELVKVMGRHKPENIVIEMARENQTTQKGQKNSRERMKRIEEGIKELGSQILKEHPVENTQLQNEKLYLYYLQNGRDMYVDQELDINRLSDYDVDHIVPQSFLKDDSIDNKVLTRSDKARGKSDNVPSEEVVKKMKNYWRQLLNAKLITQRKFDNLTKAERGGLSELDKAGFIKRQLVETRQITKHVAQILDSRMNTKYDENDKLIREVKVITLKSKLVSDFRKDFQFYKVREINNYHHAHDAYLNAVVGTALIKKYPKLESEFVYGDYKVYDVRKMIAKSEQEIGKATAKYFFYSNIMNFFKTEITLANGEIRKRPLIETNGETGEIVWDKGRDFATVRKVLSMPQVNIVKKTEVQTGGFSKESILPKRNSDKLIARKKDWDPKKYGGFDSPTVAYSVLVVAKVEKGKSKKLKSVKELLGITIMERSSFEKNPIDFLEAKGYKEVKKDLIIKLPKYSLFELENGRKRMLASAGELQKGNELALPSKYVNFLYLASHYEKLKGSPEDNEQKQLFVEQHKHYLDEIIEQISEFSKRVILADANLDKVLSAYNKHRDKPIREQAENIIHLFTLTNLGAPAAFKYFDTTIDRKRYTSTKEVLDATLIHQSITGLYETRIDLSQLGGDGGSGSETPGTSESATPESGGTVSLQDEHRLFDIPVTTSLPDVWLQDFPQAWAETGGLGRAKCQAPIIIDLKPTAVPVSIKQYPMSLEAHMGIRQHIIKFLELGVLRPCRSPWNTPLLPVKKPGTQDYRPVQDLREINKRTVDIHPTVPNPYNLLSTLKPDYSWYTVLDLKDAFFCLPLAPQSQELFAFEWKDPERGISGQLTWTRLPQGFKNSPTLFNEALHRDLTDFRTQHPEVTLLQYVDDLLLAAPTKKACTQGTRHLLQELGEKGYRASAKKAQICQTKVTYLGYILSEGKRWLTPGRIETVARIPPPRNPREVREFLGTAGFCRLWIPGFAELAAPLYALTKPSTPFTWQTEHQLAFEALKKALLSAPALGLPDTSKPFTLFLDERQGIAKGVLTQKLGPWKRPVAYLSKKLDPVAAGWPPCLRIMAATAMLVKDSAKLTLGQPLTVITPHTLEAIVRQPPDRWITNARLTHYQALLLDTDRVQFGPPVTLNPATLLPVPENQPSPHDCRQVLAETHGTREDLKDQELPDADHTWYTDGSSYLDSGTRRAGAAVVDGHNTIWAQSLPPGTSAQKAELIALTKALELSKGKKANIYTDSRYAFATAHTHGSIYERRGWLTSEGKEIKNKAEIIALLKALFLPQEVAIIHCPGHQKGQDPVAVGNRQADRVARQAAMAEVLTLATEPDNTSHITAGKRTADGSEFEKRTADGSEFESPKKKAKVE

SEQ ID NO: 1571 - protein, 2102 aa, synthetic construct
MPAAKRVKLDGGDKKYSIGLDIGTNSVGWAVITDEYKVPSKKFKVLGNTDRHSIKKNLIGALLFDSGETAEATRLKRTARRRYTRRKNRICYLQEIFSNEMAKVDDSFFHRLEESFLVEEDKKHERHPIFGNIVDEVAYHEKYPTIYHLRKKLVDSTDKADLRLIYLALAHMIKFRGHFLIEGDLNPDNSDVDKLFIQLVQTYNQLFEENPINASGVDAKAILSARLSKSRRLENLIAQLPGEKKNGLFGNLIALSLGLTPNFKSNFDLAEDAKLQLSKDTYDDDLDNLLAQIGDQYADLFLAAKNLSDAILLSDILRVNTEITKAPLSASMIKRYDEHHQDLTLLKALVRQQLPEKYKEIFFDQSKNGYAGYIDGGASQEEFYKFIKPILEKMDGTEELLVKLNREDLLRKQRTFDNGSIPHQIHLGELHAILRRQEDFYPFLKDNREKIEKILTFRIPYYVGPLARGNSRFAWMTRKSEETITPWNFEEVVDKGASAQSFIERMTNFDKNLPNEKVLPKHSLLYEYFTVYNELTKVKYVTEGMRKPAFLSGEQKKAIVDLLFKTNRKVTVKQLKEDYFKKIECFDSVEISGVEDRFNASLGTYHDLLKIIKDKDFLDNEENEDILEDIVLTLTLFEDREMIEERLKTYAHLFDDKVMKQLKRRRYTGWGRLSRKLINGIRDKQSGKTILDFLKSDGFANRNFMQLIHDDSLTFKEDIQKAQVSGQGDSLHEHIANLAGSPAIKKGILQTVKVVDELVKVMGRHKPENIVIEMARENQTTQKGQKNSRERMKRIEEGIKELGSQILKEHPVENTQLQNEKLYLYYLQNGRDMYVDQELDINRLSDYDVDHIVPQSFLKDDSIDNKVLTRSDKARGKSDNVPSEEVVKKMKNYWRQLLNAKLITQRKFDNLTKAERGGLSELDKAGFIKRQLVETRQITKHVAQILDSRMNTKYDENDKLIREVKVITLKSKLVSDFRKDFQFYKVREINNYHHAHDAYLNAVVGTALIKKYPKLESEFVYGDYKVYDVRKMIAKSEQEIGKATAKYFFYSNIMNFFKTEITLANGEIRKRPLIETNGETGEIVWDKGRDFATVRKVLSMPQVNIVKKTEVQTGGFSKESILPKRNSDKLIARKKDWDPKKYGGFDSPTVAYSVLVVAKVEKGKSKKLKSVKELLGITIMERSSFEKNPIDFLEAKGYKEVKKDLIIKLPKYSLFELENGRKRMLASAGELQKGNELALPSKYVNFLYLASHYEKLKGSPEDNEQKQLFVEQHKHYLDEIIEQISEFSKRVILADANLDKVLSAYNKHRDKPIREQAENIIHLFTLTNLGAPAAFKYFDTTIDRKRYTSTKEVLDATLIHQSITGLYETRIDLSQLGGDGGEAAAKGSSPAPGGTVSLQDEHRLFDIPVTTSLPDVWLQDFPQAWAETGGLGRAKCQAPIIIDLKPTAVPVSIKQYPMSLEAHMGIRQHIIKFLELGVLRPCRSPWNTPLLPVKKPGTQDYRPVQDLREINKRTVDIHPTVPNPYNLLSTLKPDYSWYTVLDLKDAFFCLPLAPQSQELFAFEWKDPERGISGQLTWTRLPQGFKNSPTLFNEALHRDLTDFRTQHPEVTLLQYVDDLLLAAPTKKACTQGTRHLLQELGEKGYRASAKKAQICQTKVTYLGYILSEGKRWLTPGRIETVARIPPPRNPREVREFLGTAGFCRLWIPGFAELAAPLYALTKPSTPFTWQTEHQLAFEALKKALLSAPALGLPDTSKPFTLFLDERQGIAKGVLTQKLGPWKRPVAYLSKKLDPVAAGWPPCLRIMAATAMLVKDSAKLTLGQPLTVITPHTLEAIVRQPPDRWITNARLTHYQALLLDTDRVQFGPPVTLNPATLLPVPENQPSPHDCRQVLAETHGTREDLKDQELPDADHTWYTDGSSYLDSGTRRAGAAVVDGHNTIWAQSLPPGTSAQKAELIALTKALELSKGKKANIYTDSRYAFATAHTHGSIYERRGWLTSEGKEIKNKAEIIALLKALFLPQEVAIIHCPGHQKGQDPVAVGNRQADRVARQAAMAEVLTLATEPDNTSHITAGKRTADGSEFEKRTADGSEFESPKKKAKVE

SEQ ID NO: 1572 - protein, 2097 aa, synthetic construct
MPAAKRVKLDGGDKKYSIGLDIGTNSVGWAVITDEYKVPSKKFKVLGNTDRHSIKKNLIGALLFDSGETAEATRLKRTARRRYTRRKNRICYLQEIFSNEMAKVDDSFFHRLEESFLVEEDKKHERHPIFGNIVDEVAYHEKYPTIYHLRKKLVDSTDKADLRLIYLALAHMIKFRGHFLIEGDLNPDNSDVDKLFIQLVQTYNQLFEENPINASGVDAKAILSARLSKSRRLENLIAQLPGEKKNGLFGNLIALSLGLTPNFKSNFDLAEDAKLQLSKDTYDDDLDNLLAQIGDQYADLFLAAKNLSDAILLSDILRVNTEITKAPLSASMIKRYDEHHQDLTLLKALVRQQLPEKYKEIFFDQSKNGYAGYIDGGASQEEFYKFIKPILEKMDGTEELLVKLNREDLLRKQRTFDNGSIPHQIHLGELHAILRRQEDFYPFLKDNREKIEKILTFRIPYYVGPLARGNSRFAWMTRKSEETITPWNFEEVVDKGASAQSFIERMTNFDKNLPNEKVLPKHSLLYEYFTVYNELTKVKYVTEGMRKPAFLSGEQKKAIVDLLFKTNRKVTVKQLKEDYFKKIECFDSVEISGVEDRFNASLGTYHDLLKIIKDKDFLDNEENEDILEDIVLTLTLFEDREMIEERLKTYAHLFDDKVMKQLKRRRYTGWGRLSRKLINGIRDKQSGKTILDFLKSDGFANRNFMQLIHDDSLTFKEDIQKAQVSGQGDSLHEHIANLAGSPAIKKGILQTVKVVDELVKVMGRHKPENIVIEMARENQTTQKGQKNSRERMKRIEEGIKELGSQILKEHPVENTQLQNEKLYLYYLQNGRDMYVDQELDINRLSDYDVDHIVPQSFLKDDSIDNKVLTRSDKARGKSDNVPSEEVVKKMKNYWRQLLNAKLITQRKFDNLTKAERGGLSELDKAGFIKRQLVETRQITKHVAQILDSRMNTKYDENDKLIREVKVITLKSKLVSDFRKDFQFYKVREINNYHHAHDAYLNAVVGTALIKKYPKLESEFVYGDYKVYDVRKMIAKSEQEIGKATAKYFFYSNIMNFFKTEITLANGEIRKRPLIETNGETGEIVWDKGRDFATVRKVLSMPQVNIVKKTEVQTGGFSKESILPKRNSDKLIARKKDWDPKKYGGFDSPTVAYSVLVVAKVEKGKSKKLKSVKELLGITIMERSSFEKNPIDFLEAKGYKEVKKDLIIKLPKYSLFELENGRKRMLASAGELQKGNELALPSKYVNFLYLASHYEKLKGSPEDNEQKQLFVEQHKHYLDEIIEQISEFSKRVILADANLDKVLSAYNKHRDKPIREQAENIIHLFTLTNLGAPAAFKYFDTTIDRKRYTSTKEVLDATLIHQSITGLYETRIDLSQLGGDGGGGGGGGGGTVSLQDEHRLFDIPVTTSLPDVWLQDFPQAWAETGGLGRAKCQAPIIIDLKPTAVPVSIKQYPMSLEAHMGIRQHIIKFLELGVLRPCRSPWNTPLLPVKKPGTQDYRPVQDLREINKRTVDIHPTVPNPYNLLSTLKPDYSWYTVLDLKDAFFCLPLAPQSQELFAFEWKDPERGISGQLTWTRLPQGFKNSPTLFNEALHRDLTDFRTQHPEVTLLQYVDDLLLAAPTKKACTQGTRHLLQELGEKGYRASAKKAQICQTKVTYLGYILSEGKRWLTPGRIETVARIPPPRNPREVREFLGTAGFCRLWIPGFAELAAPLYALTKPSTPFTWQTEHQLAFEALKKALLSAPALGLPDTSKPFTLFLDERQGIAKGVLTQKLGPWKRPVAYLSKKLDPVAAGWPPCLRIMAATAMLVKDSAKLTLGQPLTVITPHTLEAIVRQPPDRWITNARLTHYQALLLDTDRVQFGPPVTLNPATLLPVPENQPSPHDCRQVLAETHGTREDLKDQELPDADHTWYTDGSSYLDSGTRRAGAAVVDGHNTIWAQSLPPGTSAQKAELIALTKALELSKGKKANIYTDSRYAFATAHTHGSIYERRGWLTSEGKEIKNKAEIIALLKALFLPQEVAIIHCPGHQKGQDPVAVGNRQADRVARQAAMAEVLTLATEPDNTSHITAGKRTADGSEFEKRTADGSEFESPKKKAKVE

SEQ ID NO: 1573 - protein, 2100 aa, synthetic construct
MPAAKRVKLDGGDKKYSIGLDIGTNSVGWAVITDEYKVPSKKFKVLGNTDRHSIKKNLIGALLFDSGETAEATRLKRTARRRYTRRKNRICYLQEIFSNEMAKVDDSFFHRLEESFLVEEDKKHERHPIFGNIVDEVAYHEKYPTIYHLRKKLVDSTDKADLRLIYLALAHMIKFRGHFLIEGDLNPDNSDVDKLFIQLVQTYNQLFEENPINASGVDAKAILSARLSKSRRLENLIAQLPGEKKNGLFGNLIALSLGLTPNFKSNFDLAEDAKLQLSKDTYDDDLDNLLAQIGDQYADLFLAAKNLSDAILLSDILRVNTEITKAPLSASMIKRYDEHHQDLTLLKALVRQQLPEKYKEIFFDQSKNGYAGYIDGGASQEEFYKFIKPILEKMDGTEELLVKLNREDLLRKQRTFDNGSIPHQIHLGELHAILRRQEDFYPFLKDNREKIEKILTFRIPYYVGPLARGNSRFAWMTRKSEETITPWNFEEVVDKGASAQSFIERMTNFDKNLPNEKVLPKHSLLYEYFTVYNELTKVKYVTEGMRKPAFLSGEQKKAIVDLLFKTNRKVTVKQLKEDYFKKIECFDSVEISGVEDRFNASLGTYHDLLKIIKDKDFLDNEENEDILEDIVLTLTLFEDREMIEERLKTYAHLFDDKVMKQLKRRRYTGWGRLSRKLINGIRDKQSGKTILDFLKSDGFANRNFMQLIHDDSLTFKEDIQKAQVSGQGDSLHEHIANLAGSPAIKKGILQTVKVVDELVKVMGRHKPENIVIEMARENQTTQKGQKNSRERMKRIEEGIKELGSQILKEHPVENTQLQNEKLYLYYLQNGRDMYVDQELDINRLSDYDVDHIVPQSFLKDDSIDNKVLTRSDKARGKSDNVPSEEVVKKMKNYWRQLLNAKLITQRKFDNLTKAERGGLSELDKAGFIKRQLVETRQITKHVAQILDSRMNTKYDENDKLIREVKVITLKSKLVSDFRKDFQFYKVREINNYHHAHDAYLNAVVGTALIKKYPKLESEFVYGDYKVYDVRKMIAKSEQEIGKATAKYFFYSNIMNFFKTEITLANGEIRKRPLIETNGETGEIVWDKGRDFATVRKVLSMPQVNIVKKTEVQTGGFSKESILPKRNSDKLIARKKDWDPKKYGGFDSPTVAYSVLVVAKVEKGKSKKLKSVKELLGITIMERSSFEKNPIDFLEAKGYKEVKKDLIIKLPKYSLFELENGRKRMLASAGELQKGNELALPSKYVNFLYLASHYEKLKGSPEDNEQKQLFVEQHKHYLDEIIEQISEFSKRVILADANLDKVLSAYNKHRDKPIREQAENIIHLFTLTNLGAPAAFKYFDTTIDRKRYTSTKEVLDATLIHQSITGLYETRIDLSQLGGDGGGGSGGSGGSGGTVSLQDEHRLFDIPVTTSLPDVWLQDFPQAWAETGGLGRAKCQAPIIIDLKPTAVPVSIKQYPMSLEAHMGIRQHIIKFLELGVLRPCRSPWNTPLLPVKKPGTQDYRPVQDLREINKRTVDIHPTVPNPYNLLSTLKPDYSWYTVLDLKDAFFCLPLAPQSQELFAFEWKDPERGISGQLTWTRLPQGFKNSPTLFNEALHRDLTDFRTQHPEVTLLQYVDDLLLAAPTKKACTQGTRHLLQELGEKGYRASAKKAQICQTKVTYLGYILSEGKRWLTPGRIETVARIPPPRNPREVREFLGTAGFCRLWIPGFAELAAPLYALTKPSTPFTWQTEHQLAFEALKKALLSAPALGLPDTSKPFTLFLDERQGIAKGVLTQKLGPWKRPVAYLSKKLDPVAAGWPPCLRIMAATAMLVKDSAKLTLGQPLTVITPHTLEAIVRQPPDRWITNARLTHYQALLLDTDRVQFGPPVTLNPATLLPVPENQPSPHDCRQVLAETHGTREDLKDQELPDADHTWYTDGSSYLDSGTRRAGAAVVDGHNTIWAQSLPPGTSAQKAELIALTKALELSKGKKANIYTDSRYAFATAHTHGSIYERRGWLTSEGKEIKNKAEIIALLKALFLPQEVAIIHCPGHQKGQDPVAVGNRQADRVARQAAMAEVLTLATEPDNTSHITAGKRTADGSEFEKRTADGSEFESPKKKAKVE

SEQ ID NO: 1574 - protein, 2102 aa, synthetic construct
MPAAKRVKLDGGDKKYSIGLDIGTNSVGWAVITDEYKVPSKKFKVLGNTDRHSIKKNLIGALLFDSGETAEATRLKRTARRRYTRRKNRICYLQEIFSNEMAKVDDSFFHRLEESFLVEEDKKHERHPIFGNIVDEVAYHEKYPTIYHLRKKLVDSTDKADLRLIYLALAHMIKFRGHFLIEGDLNPDNSDVDKLFIQLVQTYNQLFEENPINASGVDAKAILSARLSKSRRLENLIAQLPGEKKNGLFGNLIALSLGLTPNFKSNFDLAEDAKLQLSKDTYDDDLDNLLAQIGDQYADLFLAAKNLSDAILLSDILRVNTEITKAPLSASMIKRYDEHHQDLTLLKALVRQQLPEKYKEIFFDQSKNGYAGYIDGGASQEEFYKFIKPILEKMDGTEELLVKLNREDLLRKQRTFDNGSIPHQIHLGELHAILRRQEDFYPFLKDNREKIEKILTFRIPYYVGPLARGNSRFAWMTRKSEETITPWNFEEVVDKGASAQSFIERMTNFDKNLPNEKVLPKHSLLYEYFTVYNELTKVKYVTEGMRKPAFLSGEQKKAIVDLLFKTNRKVTVKQLKEDYFKKIECFDSVEISGVEDRFNASLGTYHDLLKIIKDKDFLDNEENEDILEDIVLTLTLFEDREMIEERLKTYAHLFDDKVMKQLKRRRYTGWGRLSRKLINGIRDKQSGKTILDFLKSDGFANRNFMQLIHDDSLTFKEDIQKAQVSGQGDSLHEHIANLAGSPAIKKGILQTVKVVDELVKVMGRHKPENIVIEMARENQTTQKGQKNSRERMKRIEEGIKELGSQILKEHPVENTQLQNEKLYLYYLQNGRDMYVDQELDINRLSDYDVDHIVPQSFLKDDSIDNKVLTRSDKARGKSDNVPSEEVVKKMKNYWRQLLNAKLITQRKFDNLTKAERGGLSELDKAGFIKRQLVETRQITKHVAQILDSRMNTKYDENDKLIREVKVITLKSKLVSDFRKDFQFYKVREINNYHHAHDAYLNAVVGTALIKKYPKLESEFVYGDYKVYDVRKMIAKSEQEIGKATAKYFFYSNIMNFFKTEITLANGEIRKRPLIETNGETGEIVWDKGRDFATVRKVLSMPQVNIVKKTEVQTGGFSKESILPKRNSDKLIARKKDWDPKKYGGFDSPTVAYSVLVVAKVEKGKSKKLKSVKELLGITIMERSSFEKNPIDFLEAKGYKEVKKDLIIKLPKYSLFELENGRKRMLASAGELQKGNELALPSKYVNFLYLASHYEKLKGSPEDNEQKQLFVEQHKHYLDEIIEQISEFSKRVILADANLDKVLSAYNKHRDKPIREQAENIIHLFTLTNLGAPAAFKYFDTTIDRKRYTSTKEVLDATLIHQSITGLYETRIDLSQLGGDGGGGGEAAAKGSSGGTVSLQDEHRLFDIPVTTSLPDVWLQDFPQAWAETGGLGRAKCQAPIIIDLKPTAVPVSIKQYPMSLEAHMGIRQHIIKFLELGVLRPCRSPWNTPLLPVKKPGTQDYRPVQDLREINKRTVDIHPTVPNPYNLLSTLKPDYSWYTVLDLKDAFFCLPLAPQSQELFAFEWKDPERGISGQLTWTRLPQGFKNSPTLFNEALHRDLTDFRTQHPEVTLLQYVDDLLLAAPTKKACTQGTRHLLQELGEKGYRASAKKAQICQTKVTYLGYILSEGKRWLTPGRIETVARIPPPRNPREVREFLGTAGFCRLWIPGFAELAAPLYALTKPSTPFTWQTEHQLAFEALKKALLSAPALGLPDTSKPFTLFLDERQGIAKGVLTQKLGPWKRPVAYLSKKLDPVAAGWPPCLRIMAATAMLVKDSAKLTLGQPLTVITPHTLEAIVRQPPDRWITNARLTHYQALLLDTDRVQFGPPVTLNPATLLPVPENQPSPHDCRQVLAETHGTREDLKDQELPDADHTWYTDGSSYLDSGTRRAGAAVVDGHNTIWAQSLPPGTSAQKAELIALTKALELSKGKKANIYTDSRYAFATAHTHGSIYERRGWLTSEGKEIKNKAEIIALLKALFLPQEVAIIHCPGHQKGQDPVAVGNRQADRVARQAAMAEVLTLATEPDNTSHITAGKRTADGSEFEKRTADGSEFESPKKKAKVE

SEQ ID NO: 1575 - protein, 2102 aa, synthetic construct
MPAAKRVKLDGGDKKYSIGLDIGTNSVGWAVITDEYKVPSKKFKVLGNTDRHSIKKNLIGALLFDSGETAEATRLKRTARRRYTRRKNRICYLQEIFSNEMAKVDDSFFHRLEESFLVEEDKKHERHPIFGNIVDEVAYHEKYPTIYHLRKKLVDSTDKADLRLIYLALAHMIKFRGHFLIEGDLNPDNSDVDKLFIQLVQTYNQLFEENPINASGVDAKAILSARLSKSRRLENLIAQLPGEKKNGLFGNLIALSLGLTPNFKSNFDLAEDAKLQLSKDTYDDDLDNLLAQIGDQYADLFLAAKNLSDAILLSDILRVNTEITKAPLSASMIKRYDEHHQDLTLLKALVRQQLPEKYKEIFFDQSKNGYAGYIDGGASQEEFYKFIKPILEKMDGTEELLVKLNREDLLRKQRTFDNGSIPHQIHLGELHAILRRQEDFYPFLKDNREKIEKILTFRIPYYVGPLARGNSRFAWMTRKSEETITPWNFEEVVDKGASAQSFIERMTNFDKNLPNEKVLPKHSLLYEYFTVYNELTKVKYVTEGMRKPAFLSGEQKKAIVDLLFKTNRKVTVKQLKEDYFKKIECFDSVEISGVEDRFNASLGTYHDLLKIIKDKDFLDNEENEDILEDIVLTLTLFEDREMIEERLKTYAHLFDDKVMKQLKRRRYTGWGRLSRKLINGIRDKQSGKTILDFLKSDGFANRNFMQLIHDDSLTFKEDIQKAQVSGQGDSLHEHIANLAGSPAIKKGILQTVKVVDELVKVMGRHKPENIVIEMARENQTTQKGQKNSRERMKRIEEGIKELGSQILKEHPVENTQLQNEKLYLYYLQNGRDMYVDQELDINRLSDYDVDHIVPQSFLKDDSIDNKVLTRSDKARGKSDNVPSEEVVKKMKNYWRQLLNAKLITQRKFDNLTKAERGGLSELDKAGFIKRQLVETRQITKHVAQILDSRMNTKYDENDKLIREVKVITLKSKLVSDFRKDFQFYKVREINNYHHAHDAYLNAVVGTALIKKYPKLESEFVYGDYKVYDVRKMIAKSEQEIGKATAKYFFYSNIMNFFKTEITLANGEIRKRPLIETNGETGEIVWDKGRDFATVRKVLSMPQVNIVKKTEVQTGGFSKESILPKRNSDKLIARKKDWDPKKYGGFDSPTVAYSVLVVAKVEKGKSKKLKSVKELLGITIMERSSFEKNPIDFLEAKGYKEVKKDLIIKLPKYSLFELENGRKRMLASAGELQKGNELALPSKYVNFLYLASHYEKLKGSPEDNEQKQLFVEQHKHYLDEIIEQISEFSKRVILADANLDKVLSAYNKHRDKPIREQAENIIHLFTLTNLGAPAAFKYFDTTIDRKRYTSTKEVLDATLIHQSITGLYETRIDLSQLGGDGGPAPEAAAKGSSGGTVSLQDEHRLFDIPVTTSLPDVWLQDFPQAWAETGGLGRAKCQAPIIIDLKPTAVPVSIKQYPMSLEAHMGIRQHIIKFLELGVLRPCRSPWNTPLLPVKKPGTQDYRPVQDLREINKRTVDIHPTVPNPYNLLSTLKPDYSWYTVLDLKDAFFCLPLAPQSQELFAFEWKDPERGISGQLTWTRLPQGFKNSPTLFNEALHRDLTDFRTQHPEVTLLQYVDDLLLAAPTKKACTQGTRHLLQELGEKGYRASAKKAQICQTKVTYLGYILSEGKRWLTPGRIETVARIPPPRNPREVREFLGTAGFCRLWIPGFAELAAPLYALTKPSTPFTWQTEHQLAFEALKKALLSAPALGLPDTSKPFTLFLDERQGIAKGVLTQKLGPWKRPVAYLSKKLDPVAAGWPPCLRIMAATAMLVKDSAKLTLGQPLTVITPHTLEAIVRQPPDRWITNARLTHYQALLLDTDRVQFGPPVTLNPATLLPVPENQPSPHDCRQVLAETHGTREDLKDQELPDADHTWYTDGSSYLDSGTRRAGAAVVDGHNTIWAQSLPPGTSAQKAELIALTKALELSKGKKANIYTDSRYAFATAHTHGSIYERRGWLTSEGKEIKNKAEIIALLKALFLPQEVAIIHCPGHQKGQDPVAVGNRQADRVARQAAMAEVLTLATEPDNTSHITAGKRTADGSEFEKRTADGSEFESPKKKAKVE

SEQ ID NO: 1576 - protein, 2102 aa, synthetic construct
MPAAKRVKLDGGDKKYSIGLDIGTNSVGWAVITDEYKVPSKKFKVLGNTDRHSIKKNLIGALLFDSGETAEATRLKRTARRRYTRRKNRICYLQEIFSNEMAKVDDSFFHRLEESFLVEEDKKHERHPIFGNIVDEVAYHEKYPTIYHLRKKLVDSTDKADLRLIYLALAHMIKFRGHFLIEGDLNPDNSDVDKLFIQLVQTYNQLFEENPINASGVDAKAILSARLSKSRRLENLIAQLPGEKKNGLFGNLIALSLGLTPNFKSNFDLAEDAKLQLSKDTYDDDLDNLLAQIGDQYADLFLAAKNLSDAILLSDILRVNTEITKAPLSASMIKRYDEHHQDLTLLKALVRQQLPEKYKEIFFDQSKNGYAGYIDGGASQEEFYKFIKPILEKMDGTEELLVKLNREDLLRKQRTFDNGSIPHQIHLGELHAILRRQEDFYPFLKDNREKIEKILTFRIPYYVGPLARGNSRFAWMTRKSEETITPWNFEEVVDKGASAQSFIERMTNFDKNLPNEKVLPKHSLLYEYFTVYNELTKVKYVTEGMRKPAFLSGEQKKAIVDLLFKTNRKVTVKQLKEDYFKKIECFDSVEISGVEDRFNASLGTYHDLLKIIKDKDFLDNEENEDILEDIVLTLTLFEDREMIEERLKTYAHLFDDKVMKQLKRRRYTGWGRLSRKLINGIRDKQSGKTILDFLKSDGFANRNFMQLIHDDSLTFKEDIQKAQVSGQGDSLHEHIANLAGSPAIKKGILQTVKVVDELVKVMGRHKPENIVIEMARENQTTQKGQKNSRERMKRIEEGIKELGSQILKEHPVENTQLQNEKLYLYYLQNGRDMYVDQELDINRLSDYDVDHIVPQSFLKDDSIDNKVLTRSDKARGKSDNVPSEEVVKKMKNYWRQLLNAKLITQRKFDNLTKAERGGLSELDKAGFIKRQLVETRQITKHVAQILDSRMNTKYDENDKLIREVKVITLKSKLVSDFRKDFQFYKVREINNYHHAHDAYLNAVVGTALIKKYPKLESEFVYGDYKVYDVRKMIAKSEQEIGKATAKYFFYSNIMNFFKTEITLANGEIRKRPLIETNGETGEIVWDKGRDFATVRKVLSMPQVNIVKKTEVQTGGFSKESILPKRNSDKLIARKKDWDPKKYGGFDSPTVAYSVLVVAKVEKGKSKKLKSVKELLGITIMERSSFEKNPIDFLEAKGYKEVKKDLIIKLPKYSLFELENGRKRMLASAGELQKGNELALPSKYVNFLYLASHYEKLKGSPEDNEQKQLFVEQHKHYLDEIIEQISEFSKRVILADANLDKVLSAYNKHRDKPIREQAENIIHLFTLTNLGAPAAFKYFDTTIDRKRYTSTKEVLDATLIHQSITGLYETRIDLSQLGGDGGEAAAKGSSGGGGGTVSLQDEHRLFDIPVTTSLPDVWLQDFPQAWAETGGLGRAKCQAPIIIDLKPTAVPVSIKQYPMSLEAHMGIRQHIIKFLELGVLRPCRSPWNTPLLPVKKPGTQDYRPVQDLREINKRTVDIHPTVPNPYNLLSTLKPDYSWYTVLDLKDAFFCLPLAPQSQELFAFEWKDPERGISGQLTWTRLPQGFKNSPTLFNEALHRDLTDFRTQHPEVTLLQYVDDLLLAAPTKKACTQGTRHLLQELGEKGYRASAKKAQICQTKVTYLGYILSEGKRWLTPGRIETVARIPPPRNPREVREFLGTAGFCRLWIPGFAELAAPLYALTKPSTPFTWQTEHQLAFEALKKALLSAPALGLPDTSKPFTLFLDERQGIAKGVLTQKLGPWKRPVAYLSKKLDPVAAGWPPCLRIMAATAMLVKDSAKLTLGQPLTVITPHTLEAIVRQPPDRWITNARLTHYQALLLDTDRVQFGPPVTLNPATLLPVPENQPSPHDCRQVLAETHGTREDLKDQELPDADHTWYTDGSSYLDSGTRRAGAAVVDGHNTIWAQSLPPGTSAQKAELIALTKALELSKGKKANIYTDSRYAFATAHTHGSIYERRGWLTSEGKEIKNKAEIIALLKALFLPQEVAIIHCPGHQKGQDPVAVGNRQADRVARQAAMAEVLTLATEPDNTSHITAGKRTADGSEFEKRTADGSEFESPKKKAKVE

SEQ ID NO: 1577 - protein, 2102 aa, synthetic construct
MPAAKRVKLDGGDKKYSIGLDIGTNSVGWAVITDEYKVPSKKFKVLGNTDRHSIKKNLIGALLFDSGETAEATRLKRTARRRYTRRKNRICYLQEIFSNEMAKVDDSFFHRLEESFLVEEDKKHERHPIFGNIVDEVAYHEKYPTIYHLRKKLVDSTDKADLRLIYLALAHMIKFRGHFLIEGDLNPDNSDVDKLFIQLVQTYNQLFEENPINASGVDAKAILSARLSKSRRLENLIAQLPGEKKNGLFGNLIALSLGLTPNFKSNFDLAEDAKLQLSKDTYDDDLDNLLAQIGDQYADLFLAAKNLSDAILLSDILRVNTEITKAPLSASMIKRYDEHHQDLTLLKALVRQQLPEKYKEIFFDQSKNGYAGYIDGGASQEEFYKFIKPILEKMDGTEELLVKLNREDLLRKQRTFDNGSIPHQIHLGELHAILRRQEDFYPFLKDNREKIEKILTFRIPYYVGPLARGNSRFAWMTRKSEETITPWNFEEVVDKGASAQSFIERMTNFDKNLPNEKVLPKHSLLYEYFTVYNELTKVKYVTEGMRKPAFLSGEQKKAIVDLLFKTNRKVTVKQLKEDYFKKIECFDSVEISGVEDRFNASLGTYHDLLKIIKDKDFLDNEENEDILEDIVLTLTLFEDREMIEERLKTYAHLFDDKVMKQLKRRRYTGWGRLSRKLINGIRDKQSGKTILDFLKSDGFANRNFMQLIHDDSLTFKEDIQKAQVSGQGDSLHEHIANLAGSPAIKKGILQTVKVVDELVKVMGRHKPENIVIEMARENQTTQKGQKNSRERMKRIEEGIKELGSQILKEHPVENTQLQNEKLYLYYLQNGRDMYVDQELDINRLSDYDVDHIVPQSFLKDDSIDNKVLTRSDKARGKSDNVPSEEVVKKMKNYWRQLLNAKLITQRKFDNLTKAERGGLSELDKAGFIKRQLVETRQITKHVAQILDSRMNTKYDENDKLIREVKVITLKSKLVSDFRKDFQFYKVREINNYHHAHDAYLNAVVGTALIKKYPKLESEFVYGDYKVYDVRKMIAKSEQEIGKATAKYFFYSNIMNFFKTEITLANGEIRKRPLIETNGETGEIVWDKGRDFATVRKVLSMPQVNIVKKTEVQTGGFSKESILPKRNSDKLIARKKDWDPKKYGGFDSPTVAYSVLVVAKVEKGKSKKLKSVKELLGITIMERSSFEKNPIDFLEAKGYKEVKKDLIIKLPKYSLFELENGRKRMLASAGELQKGNELALPSKYVNFLYLASHYEKLKGSPEDNEQKQLFVEQHKHYLDEIIEQISEFSKRVILADANLDKVLSAYNKHRDKPIREQAENIIHLFTLTNLGAPAAFKYFDTTIDRKRYTSTKEVLDATLIHQSITGLYETRIDLSQLGGDGGEAAAKGGGGGSGGTVSLQDEHRLFDIPVTTSLPDVWLQDFPQAWAETGGLGRAKCQAPIIIDLKPTAVPVSIKQYPMSLEAHMGIRQHIIKFLELGVLRPCRSPWNTPLLPVKKPGTQDYRPVQDLREINKRTVDIHPTVPNPYNLLSTLKPDYSWYTVLDLKDAFFCLPLAPQSQELFAFEWKDPERGISGQLTWTRLPQGFKNSPTLFNEALHRDLTDFRTQHPEVTLLQYVDDLLLAAPTKKACTQGTRHLLQELGEKGYRASAKKAQICQTKVTYLGYILSEGKRWLTPGRIETVARIPPPRNPREVREFLGTAGFCRLWIPGFAELAAPLYALTKPSTPFTWQTEHQLAFEALKKALLSAPALGLPDTSKPFTLFLDERQGIAKGVLTQKLGPWKRPVAYLSKKLDPVAAGWPPCLRIMAATAMLVKDSAKLTLGQPLTVITPHTLEAIVRQPPDRWITNARLTHYQALLLDTDRVQFGPPVTLNPATLLPVPENQPSPHDCRQVLAETHGTREDLKDQELPDADHTWYTDGSSYLDSGTRRAGAAVVDGHNTIWAQSLPPGTSAQKAELIALTKALELSKGKKANIYTDSRYAFATAHTHGSIYERRGWLTSEGKEIKNKAEIIALLKALFLPQEVAIIHCPGHQKGQDPVAVGNRQADRVARQAAMAEVLTLATEPDNTSHITAGKRTADGSEFEKRTADGSEFESPKKKAKVE

SEQ ID NO: 1578 - protein, 2100 aa, synthetic construct
MPAAKRVKLDGGDKKYSIGLDIGTNSVGWAVITDEYKVPSKKFKVLGNTDRHSIKKNLIGALLFDSGETAEATRLKRTARRRYTRRKNRICYLQEIFSNEMAKVDDSFFHRLEESFLVEEDKKHERHPIFGNIVDEVAYHEKYPTIYHLRKKLVDSTDKADLRLIYLALAHMIKFRGHFLIEGDLNPDNSDVDKLFIQLVQTYNQLFEENPINASGVDAKAILSARLSKSRRLENLIAQLPGEKKNGLFGNLIALSLGLTPNFKSNFDLAEDAKLQLSKDTYDDDLDNLLAQIGDQYADLFLAAKNLSDAILLSDILRVNTEITKAPLSASMIKRYDEHHQDLTLLKALVRQQLPEKYKEIFFDQSKNGYAGYIDGGASQEEFYKFIKPILEKMDGTEELLVKLNREDLLRKQRTFDNGSIPHQIHLGELHAILRRQEDFYPFLKDNREKIEKILTFRIPYYVGPLARGNSRFAWMTRKSEETITPWNFEEVVDKGASAQSFIERMTNFDKNLPNEKVLPKHSLLYEYFTVYNELTKVKYVTEGMRKPAFLSGEQKKAIVDLLFKTNRKVTVKQLKEDYFKKIECFDSVEISGVEDRFNASLGTYHDLLKIIKDKDFLDNEENEDILEDIVLTLTLFEDREMIEERLKTYAHLFDDKVMKQLKRRRYTGWGRLSRKLINGIRDKQSGKTILDFLKSDGFANRNFMQLIHDDSLTFKEDIQKAQVSGQGDSLHEHIANLAGSPAIKKGILQTVKVVDELVKVMGRHKPENIVIEMARENQTTQKGQKNSRERMKRIEEGIKELGSQILKEHPVENTQLQNEKLYLYYLQNGRDMYVDQELDINRLSDYDVDHIVPQSFLKDDSIDNKVLTRSDKARGKSDNVPSEEVVKKMKNYWRQLLNAKLITQRKFDNLTKAERGGLSELDKAGFIKRQLVETRQITKHVAQILDSRMNTKYDENDKLIREVKVITLKSKLVSDFRKDFQFYKVREINNYHHAHDAYLNAVVGTALIKKYPKLESEFVYGDYKVYDVRKMIAKSEQEIGKATAKYFFYSNIMNFFKTEITLANGEIRKRPLIETNGETGEIVWDKGRDFATVRKVLSMPQVNIVKKTEVQTGGFSKESILPKRNSDKLIARKKDWDPKKYGGFDSPTVAYSVLVVAKVEKGKSKKLKSVKELLGITIMERSSFEKNPIDFLEAKGYKEVKKDLIIKLPKYSLFELENGRKRMLASAGELQKGNELALPSKYVNFLYLASHYEKLKGSPEDNEQKQLFVEQHKHYLDEIIEQISEFSKRVILADANLDKVLSAYNKHRDKPIREQAENIIHLFTLTNLGAPAAFKYFDTTIDRKRYTSTKEVLDATLIHQSITGLYETRIDLSQLGGDGGGGGGSSPAPGGTVSLQDEHRLFDIPVTTSLPDVWLQDFPQAWAETGGLGRAKCQAPIIIDLKPTAVPVSIKQYPMSLEAHMGIRQHIIKFLELGVLRPCRSPWNTPLLPVKKPGTQDYRPVQDLREINKRTVDIHPTVPNPYNLLSTLKPDYSWYTVLDLKDAFFCLPLAPQSQELFAFEWKDPERGISGQLTWTRLPQGFKNSPTLFNEALHRDLTDFRTQHPEVTLLQYVDDLLLAAPTKKACTQGTRHLLQELGEKGYRASAKKAQICQTKVTYLGYILSEGKRWLTPGRIETVARIPPPRNPREVREFLGTAGFCRLWIPGFAELAAPLYALTKPSTPFTWQTEHQLAFEALKKALLSAPALGLPDTSKPFTLFLDERQGIAKGVLTQKLGPWKRPVAYLSKKLDPVAAGWPPCLRIMAATAMLVKDSAKLTLGQPLTVITPHTLEAIVRQPPDRWITNARLTHYQALLLDTDRVQFGPPVTLNPATLLPVPENQPSPHDCRQVLAETHGTREDLKDQELPDADHTWYTDGSSYLDSGTRRAGAAVVDGHNTIWAQSLPPGTSAQKAELIALTKALELSKGKKANIYTDSRYAFATAHTHGSIYERRGWLTSEGKEIKNKAEIIALLKALFLPQEVAIIHCPGHQKGQDPVAVGNRQADRVARQAAMAEVLTLATEPDNTSHITAGKRTADGSEFEKRTADGSEFESPKKKAKVE

SEQ ID NO: 1579 - protein, 2102 aa, synthetic construct
MPAAKRVKLDGGDKKYSIGLDIGTNSVGWAVITDEYKVPSKKFKVLGNTDRHSIKKNLIGALLFDSGETAEATRLKRTARRRYTRRKNRICYLQEIFSNEMAKVDDSFFHRLEESFLVEEDKKHERHPIFGNIVDEVAYHEKYPTIYHLRKKLVDSTDKADLRLIYLALAHMIKFRGHFLIEGDLNPDNSDVDKLFIQLVQTYNQLFEENPINASGVDAKAILSARLSKSRRLENLIAQLPGEKKNGLFGNLIALSLGLTPNFKSNFDLAEDAKLQLSKDTYDDDLDNLLAQIGDQYADLFLAAKNLSDAILLSDILRVNTEITKAPLSASMIKRYDEHHQDLTLLKALVRQQLPEKYKEIFFDQSKNGYAGYIDGGASQEEFYKFIKPILEKMDGTEELLVKLNREDLLRKQRTFDNGSIPHQIHLGELHAILRRQEDFYPFLKDNREKIEKILTFRIPYYVGPLARGNSRFAWMTRKSEETITPWNFEEVVDKGASAQSFIERMTNFDKNLPNEKVLPKHSLLYEYFTVYNELTKVKYVTEGMRKPAFLSGEQKKAIVDLLFKTNRKVTVKQLKEDYFKKIECFDSVEISGVEDRFNASLGTYHDLLKIIKDKDFLDNEENEDILEDIVLTLTLFEDREMIEERLKTYAHLFDDKVMKQLKRRRYTGWGRLSRKLINGIRDKQSGKTILDFLKSDGFANRNFMQLIHDDSLTFKEDIQKAQVSGQGDSLHEHIANLAGSPAIKKGILQTVKVVDELVKVMGRHKPENIVIEMARENQTTQKGQKNSRERMKRIEEGIKELGSQILKEHPVENTQLQNEKLYLYYLQNGRDMYVDQELDINRLSDYDVDHIVPQSFLKDDSIDNKVLTRSDKARGKSDNVPSEEVVKKMKNYWRQLLNAKLITQRKFDNLTKAERGGLSELDKAGFIKRQLVETRQITKHVAQILDSRMNTKYDENDKLIREVKVITLKSKLVSDFRKDFQFYKVREINNYHHAHDAYLNAVVGTALIKKYPKLESEFVYGDYKVYDVRKMIAKSEQEIGKATAKYFFYSNIMNFFKTEITLANGEIRKRPLIETNGETGEIVWDKGRDFATVRKVLSMPQVNIVKKTEVQTGGFSKESILPKRNSDKLIARKKDWDPKKYGGFDSPTVAYSVLVVAKVEKGKSKKLKSVKELLGITIMERSSFEKNPIDFLEAKGYKEVKKDLIIKLPKYSLFELENGRKRMLASAGELQKGNELALPSKYVNFLYLASHYEKLKGSPEDNEQKQLFVEQHKHYLDEIIEQISEFSKRVILADANLDKVLSAYNKHRDKPIREQAENIIHLFTLTNLGAPAAFKYFDTTIDRKRYTSTKEVLDATLIHQSITGLYETRIDLSQLGGDGGEAAAKPAPGGSGGTVSLQDEHRLFDIPVTTSLPDVWLQDFPQAWAETGGLGRAKCQAPIIIDLKPTAVPVSIKQYPMSLEAHMGIRQHIIKFLELGVLRPCRSPWNTPLLPVKKPGTQDYRPVQDLREINKRTVDIHPTVPNPYNLLSTLKPDYSWYTVLDLKDAFFCLPLAPQSQELFAFEWKDPERGISGQLTWTRLPQGFKNSPTLFNEALHRDLTDFRTQHPEVTLLQYVDDLLLAAPTKKACTQGTRHLLQELGEKGYRASAKKAQICQTKVTYLGYILSEGKRWLTPGRIETVARIPPPRNPREVREFLGTAGFCRLWIPGFAELAAPLYALTKPSTPFTWQTEHQLAFEALKKALLSAPALGLPDTSKPFTLFLDERQGIAKGVLTQKLGPWKRPVAYLSKKLDPVAAGWPPCLRIMAATAMLVKDSAKLTLGQPLTVITPHTLEAIVRQPPDRWITNARLTHYQALLLDTDRVQFGPPVTLNPATLLPVPENQPSPHDCRQVLAETHGTREDLKDQELPDADHTWYTDGSSYLDSGTRRAGAAVVDGHNTIWAQSLPPGTSAQKAELIALTKALELSKGKKANIYTDSRYAFATAHTHGSIYERRGWLTSEGKEIKNKAEIIALLKALFLPQEVAIIHCPGHQKGQDPVAVGNRQADRVARQAAMAEVLTLATEPDNTSHITAGKRTADGSEFEKRTADGSEFESPKKKAKVE

SEQ ID NO: 1580 - protein, 2102 aa, synthetic construct
MPAAKRVKLDGGDKKYSIGLDIGTNSVGWAVITDEYKVPSKKFKVLGNTDRHSIKKNLIGALLFDSGETAEATRLKRTARRRYTRRKNRICYLQEIFSNEMAKVDDSFFHRLEESFLVEEDKKHERHPIFGNIVDEVAYHEKYPTIYHLRKKLVDSTDKADLRLIYLALAHMIKFRGHFLIEGDLNPDNSDVDKLFIQLVQTYNQLFEENPINASGVDAKAILSARLSKSRRLENLIAQLPGEKKNGLFGNLIALSLGLTPNFKSNFDLAEDAKLQLSKDTYDDDLDNLLAQIGDQYADLFLAAKNLSDAILLSDILRVNTEITKAPLSASMIKRYDEHHQDLTLLKALVRQQLPEKYKEIFFDQSKNGYAGYIDGGASQEEFYKFIKPILEKMDGTEELLVKLNREDLLRKQRTFDNGSIPHQIHLGELHAILRRQEDFYPFLKDNREKIEKILTFRIPYYVGPLARGNSRFAWMTRKSEETITPWNFEEVVDKGASAQSFIERMTNFDKNLPNEKVLPKHSLLYEYFTVYNELTKVKYVTEGMRKPAFLSGEQKKAIVDLLFKTNRKVTVKQLKEDYFKKIECFDSVEISGVEDRFNASLGTYHDLLKIIKDKDFLDNEENEDILEDIVLTLTLFEDREMIEERLKTYAHLFDDKVMKQLKRRRYTGWGRLSRKLINGIRDKQSGKTILDFLKSDGFANRNFMQLIHDDSLTFKEDIQKAQVSGQGDSLHEHIANLAGSPAIKKGILQTVKVVDELVKVMGRHKPENIVIEMARENQTTQKGQKNSRERMKRIEEGIKELGSQILKEHPVENTQLQNEKLYLYYLQNGRDMYVDQELDINRLSDYDVDHIVPQSFLKDDSIDNKVLTRSDKARGKSDNVPSEEVVKKMKNYWRQLLNAKLITQRKFDNLTKAERGGLSELDKAGFIKRQLVETRQITKHVAQILDSRMNTKYDENDKLIREVKVITLKSKLVSDFRKDFQFYKVREINNYHHAHDAYLNAVVGTALIKKYPKLESEFVYGDYKVYDVRKMIAKSEQEIGKATAKYFFYSNIMNFFKTEITLANGEIRKRPLIETNGETGEIVWDKGRDFATVRKVLSMPQVNIVKKTEVQTGGFSKESILPKRNSDKLIARKKDWDPKKYGGFDSPTVAYSVLVVAKVEKGKSKKLKSVKELLGITIMERSSFEKNPIDFLEAKGYKEVKKDLIIKLPKYSLFELENGRKRMLASAGELQKGNELALPSKYVNFLYLASHYEKLKGSPEDNEQKQLFVEQHKHYLDEIIEQISEFSKRVILADANLDKVLSAYNKHRDKPIREQAENIIHLFTLTNLGAPAAFKYFDTTIDRKRYTSTKEVLDATLIHQSITGLYETRIDLSQLGGDGGPAPGGGEAAAKGGTVSLQDEHRLFDIPVTTSLPDVWLQDFPQAWAETGGLGRAKCQAPIIIDLKPTAVPVSIKQYPMSLEAHMGIRQHIIKFLELGVLRPCRSPWNTPLLPVKKPGTQDYRPVQDLREINKRTVDIHPTVPNPYNLLSTLKPDYSWYTVLDLKDAFFCLPLAPQSQELFAFEWKDPERGISGQLTWTRLPQGFKNSPTLFNEALHRDLTDFRTQHPEVTLLQYVDDLLLAAPTKKACTQGTRHLLQELGEKGYRASAKKAQICQTKVTYLGYILSEGKRWLTPGRIETVARIPPPRNPREVREFLGTAGFCRLWIPGFAELAAPLYALTKPSTPFTWQTEHQLAFEALKKALLSAPALGLPDTSKPFTLFLDERQGIAKGVLTQKLGPWKRPVAYLSKKLDPVAAGWPPCLRIMAATAMLVKDSAKLTLGQPLTVITPHTLEAIVRQPPDRWITNARLTHYQALLLDTDRVQFGPPVTLNPATLLPVPENQPSPHDCRQVLAETHGTREDLKDQELPDADHTWYTDGSSYLDSGTRRAGAAVVDGHNTIWAQSLPPGTSAQKAELIALTKALELSKGKKANIYTDSRYAFATAHTHGSIYERRGWLTSEGKEIKNKAEIIALLKALFLPQEVAIIHCPGHQKGQDPVAVGNRQADRVARQAAMAEVLTLATEPDNTSHITAGKRTADGSEFEKRTADGSEFESPKKKAKVE

SEQ ID NO: 1581 - protein, 2102 aa, synthetic construct
MPAAKRVKLDGGDKKYSIGLDIGTNSVGWAVITDEYKVPSKKFKVLGNTDRHSIKKNLIGALLFDSGETAEATRLKRTARRRYTRRKNRICYLQEIFSNEMAKVDDSFFHRLEESFLVEEDKKHERHPIFGNIVDEVAYHEKYPTIYHLRKKLVDSTDKADLRLIYLALAHMIKFRGHFLIEGDLNPDNSDVDKLFIQLVQTYNQLFEENPINASGVDAKAILSARLSKSRRLENLIAQLPGEKKNGLFGNLIALSLGLTPNFKSNFDLAEDAKLQLSKDTYDDDLDNLLAQIGDQYADLFLAAKNLSDAILLSDILRVNTEITKAPLSASMIKRYDEHHQDLTLLKALVRQQLPEKYKEIFFDQSKNGYAGYIDGGASQEEFYKFIKPILEKMDGTEELLVKLNREDLLRKQRTFDNGSIPHQIHLGELHAILRRQEDFYPFLKDNREKIEKILTFRIPYYVGPLARGNSRFAWMTRKSEETITPWNFEEVVDKGASAQSFIERMTNFDKNLPNEKVLPKHSLLYEYFTVYNELTKVKYVTEGMRKPAFLSGEQKKAIVDLLFKTNRKVTVKQLKEDYFKKIECFDSVEISGVEDRFNASLGTYHDLLKIIKDKDFLDNEENEDILEDIVLTLTLFEDREMIEERLKTYAHLFDDKVMKQLKRRRYTGWGRLSRKLINGIRDKQSGKTILDFLKSDGFANRNFMQLIHDDSLTFKEDIQKAQVSGQGDSLHEHIANLAGSPAIKKGILQTVKVVDELVKVMGRHKPENIVIEMARENQTTQKGQKNSRERMKRIEEGIKELGSQILKEHPVENTQLQNEKLYLYYLQNGRDMYVDQELDINRLSDYDVDHIVPQSFLKDDSIDNKVLTRSDKARGKSDNVPSEEVVKKMKNYWRQLLNAKLITQRKFDNLTKAERGGLSELDKAGFIKRQLVETRQITKHVAQILDSRMNTKYDENDKLIREVKVITLKSKLVSDFRKDFQFYKVREINNYHHAHDAYLNAVVGTALIKKYPKLESEFVYGDYKVYDVRKMIAKSEQEIGKATAKYFFYSNIMNFFKTEITLANGEIRKRPLIETNGETGEIVWDKGRDFATVRKVLSMPQVNIVKKTEVQTGGFSKESILPKRNSDKLIARKKDWDPKKYGGFDSPTVAYSVLVVAKVEKGKSKKLKSVKELLGITIMERSSFEKNPIDFLEAKGYKEVKKDLIIKLPKYSLFELENGRKRMLASAGELQKGNELALPSKYVNFLYLASHYEKLKGSPEDNEQKQLFVEQHKHYLDEIIEQISEFSKRVILADANLDKVLSAYNKHRDKPIREQAENIIHLFTLTNLGAPAAFKYFDTTIDRKRYTSTKEVLDATLIHQSITGLYETRIDLSQLGGDGGPAPEAAAKGGGGGTVSLQDEHRLFDIPVTTSLPDVWLQDFPQAWAETGGLGRAKCQAPIIIDLKPTAVPVSIKQYPMSLEAHMGIRQHIIKFLELGVLRPCRSPWNTPLLPVKKPGTQDYRPVQDLREINKRTVDIHPTVPNPYNLLSTLKPDYSWYTVLDLKDAFFCLPLAPQSQELFAFEWKDPERGISGQLTWTRLPQGFKNSPTLFNEALHRDLTDFRTQHPEVTLLQYVDDLLLAAPTKKACTQGTRHLLQELGEKGYRASAKKAQICQTKVTYLGYILSEGKRWLTPGRIETVARIPPPRNPREVREFLGTAGFCRLWIPGFAELAAPLYALTKPSTPFTWQTEHQLAFEALKKALLSAPALGLPDTSKPFTLFLDERQGIAKGVLTQKLGPWKRPVAYLSKKLDPVAAGWPPCLRIMAATAMLVKDSAKLTLGQPLTVITPHTLEAIVRQPPDRWITNARLTHYQALLLDTDRVQFGPPVTLNPATLLPVPENQPSPHDCRQVLAETHGTREDLKDQELPDADHTWYTDGSSYLDSGTRRAGAAVVDGHNTIWAQSLPPGTSAQKAELIALTKALELSKGKKANIYTDSRYAFATAHTHGSIYERRGWLTSEGKEIKNKAEIIALLKALFLPQEVAIIHCPGHQKGQDPVAVGNRQADRVARQAAMAEVLTLATEPDNTSHITAGKRTADGSEFEKRTADGSEFESPKKKAKVE

SEQ ID NO: 1582 - protein, 2100 aa, synthetic construct
MPAAKRVKLDGGDKKYSIGLDIGTNSVGWAVITDEYKVPSKKFKVLGNTDRHSIKKNLIGALLFDSGETAEATRLKRTARRRYTRRKNRICYLQEIFSNEMAKVDDSFFHRLEESFLVEEDKKHERHPIFGNIVDEVAYHEKYPTIYHLRKKLVDSTDKADLRLIYLALAHMIKFRGHFLIEGDLNPDNSDVDKLFIQLVQTYNQLFEENPINASGVDAKAILSARLSKSRRLENLIAQLPGEKKNGLFGNLIALSLGLTPNFKSNFDLAEDAKLQLSKDTYDDDLDNLLAQIGDQYADLFLAAKNLSDAILLSDILRVNTEITKAPLSASMIKRYDEHHQDLTLLKALVRQQLPEKYKEIFFDQSKNGYAGYIDGGASQEEFYKFIKPILEKMDGTEELLVKLNREDLLRKQRTFDNGSIPHQIHLGELHAILRRQEDFYPFLKDNREKIEKILTFRIPYYVGPLARGNSRFAWMTRKSEETITPWNFEEVVDKGASAQSFIERMTNFDKNLPNEKVLPKHSLLYEYFTVYNELTKVKYVTEGMRKPAFLSGEQKKAIVDLLFKTNRKVTVKQLKEDYFKKIECFDSVEISGVEDRFNASLGTYHDLLKIIKDKDFLDNEENEDILEDIVLTLTLFEDREMIEERLKTYAHLFDDKVMKQLKRRRYTGWGRLSRKLINGIRDKQSGKTILDFLKSDGFANRNFMQLIHDDSLTFKEDIQKAQVSGQGDSLHEHIANLAGSPAIKKGILQTVKVVDELVKVMGRHKPENIVIEMARENQTTQKGQKNSRERMKRIEEGIKELGSQILKEHPVENTQLQNEKLYLYYLQNGRDMYVDQELDINRLSDYDVDHIVPQSFLKDDSIDNKVLTRSDKARGKSDNVPSEEVVKKMKNYWRQLLNAKLITQRKFDNLTKAERGGLSELDKAGFIKRQLVETRQITKHVAQILDSRMNTKYDENDKLIREVKVITLKSKLVSDFRKDFQFYKVREINNYHHAHDAYLNAVVGTALIKKYPKLESEFVYGDYKVYDVRKMIAKSEQEIGKATAKYFFYSNIMNFFKTEITLANGEIRKRPLIETNGETGEIVWDKGRDFATVRKVLSMPQVNIVKKTEVQTGGFSKESILPKRNSDKLIARKKDWDPKKYGGFDSPTVAYSVLVVAKVEKGKSKKLKSVKELLGITIMERSSFEKNPIDFLEAKGYKEVKKDLIIKLPKYSLFELENGRKRMLASAGELQKGNELALPSKYVNFLYLASHYEKLKGSPEDNEQKQLFVEQHKHYLDEIIEQISEFSKRVILADANLDKVLSAYNKHRDKPIREQAENIIHLFTLTNLGAPAAFKYFDTTIDRKRYTSTKEVLDATLIHQSITGLYETRIDLSQLGGDGGGSSGSSGSSGGTVSLQDEHRLFDIPVTTSLPDVWLQDFPQAWAETGGLGRAKCQAPIIIDLKPTAVPVSIKQYPMSLEAHMGIRQHIIKFLELGVLRPCRSPWNTPLLPVKKPGTQDYRPVQDLREINKRTVDIHPTVPNPYNLLSTLKPDYSWYTVLDLKDAFFCLPLAPQSQELFAFEWKDPERGISGQLTWTRLPQGFKNSPTLFNEALHRDLTDFRTQHPEVTLLQYVDDLLLAAPTKKACTQGTRHLLQELGEKGYRASAKKAQICQTKVTYLGYILSEGKRWLTPGRIETVARIPPPRNPREVREFLGTAGFCRLWIPGFAELAAPLYALTKPSTPFTWQTEHQLAFEALKKALLSAPALGLPDTSKPFTLFLDERQGIAKGVLTQKLGPWKRPVAYLSKKLDPVAAGWPPCLRIMAATAMLVKDSAKLTLGQPLTVITPHTLEAIVRQPPDRWITNARLTHYQALLLDTDRVQFGPPVTLNPATLLPVPENQPSPHDCRQVLAETHGTREDLKDQELPDADHTWYTDGSSYLDSGTRRAGAAVVDGHNTIWAQSLPPGTSAQKAELIALTKALELSKGKKANIYTDSRYAFATAHTHGSIYERRGWLTSEGKEIKNKAEIIALLKALFLPQEVAIIHCPGHQKGQDPVAVGNRQADRVARQAAMAEVLTLATEPDNTSHITAGKRTADGSEFEKRTADGSEFESPKKKAKVE

SEQ ID NO: 1583 - protein, 2099 aa, synthetic construct
MPAAKRVKLDGGDKKYSIGLDIGTNSVGWAVITDEYKVPSKKFKVLGNTDRHSIKKNLIGALLFDSGETAEATRLKRTARRRYTRRKNRICYLQEIFSNEMAKVDDSFFHRLEESFLVEEDKKHERHPIFGNIVDEVAYHEKYPTIYHLRKKLVDSTDKADLRLIYLALAHMIKFRGHFLIEGDLNPDNSDVDKLFIQLVQTYNQLFEENPINASGVDAKAILSARLSKSRRLENLIAQLPGEKKNGLFGNLIALSLGLTPNFKSNFDLAEDAKLQLSKDTYDDDLDNLLAQIGDQYADLFLAAKNLSDAILLSDILRVNTEITKAPLSASMIKRYDEHHQDLTLLKALVRQQLPEKYKEIFFDQSKNGYAGYIDGGASQEEFYKFIKPILEKMDGTEELLVKLNREDLLRKQRTFDNGSIPHQIHLGELHAILRRQEDFYPFLKDNREKIEKILTFRIPYYVGPLARGNSRFAWMTRKSEETITPWNFEEVVDKGASAQSFIERMTNFDKNLPNEKVLPKHSLLYEYFTVYNELTKVKYVTEGMRKPAFLSGEQKKAIVDLLFKTNRKVTVKQLKEDYFKKIECFDSVEISGVEDRFNASLGTYHDLLKIIKDKDFLDNEENEDILEDIVLTLTLFEDREMIEERLKTYAHLFDDKVMKQLKRRRYTGWGRLSRKLINGIRDKQSGKTILDFLKSDGFANRNFMQLIHDDSLTFKEDIQKAQVSGQGDSLHEHIANLAGSPAIKKGILQTVKVVDELVKVMGRHKPENIVIEMARENQTTQKGQKNSRERMKRIEEGIKELGSQILKEHPVENTQLQNEKLYLYYLQNGRDMYVDQELDINRLSDYDVDHIVPQSFLKDDSIDNKVLTRSDKARGKSDNVPSEEVVKKMKNYWRQLLNAKLITQRKFDNLTKAERGGLSELDKAGFIKRQLVETRQITKHVAQILDSRMNTKYDENDKLIREVKVITLKSKLVSDFRKDFQFYKVREINNYHHAHDAYLNAVVGTALIKKYPKLESEFVYGDYKVYDVRKMIAKSEQEIGKATAKYFFYSNIMNFFKTEITLANGEIRKRPLIETNGETGEIVWDKGRDFATVRKVLSMPQVNIVKKTEVQTGGFSKESILPKRNSDKLIARKKDWDPKKYGGFDSPTVAYSVLVVAKVEKGKSKKLKSVKELLGITIMERSSFEKNPIDFLEAKGYKEVKKDLIIKLPKYSLFELENGRKRMLASAGELQKGNELALPSKYVNFLYLASHYEKLKGSPEDNEQKQLFVEQHKHYLDEIIEQISEFSKRVILADANLDKVLSAYNKHRDKPIREQAENIIHLFTLTNLGAPAAFKYFDTTIDRKRYTSTKEVLDATLIHQSITGLYETRIDLSQLGGDGGEAAAKGSSGGTVSLQDEHRLFDIPVTTSLPDVWLQDFPQAWAETGGLGRAKCQAPIIIDLKPTAVPVSIKQYPMSLEAHMGIRQHIIKFLELGVLRPCRSPWNTPLLPVKKPGTQDYRPVQDLREINKRTVDIHPTVPNPYNLLSTLKPDYSWYTVLDLKDAFFCLPLAPQSQELFAFEWKDPERGISGQLTWTRLPQGFKNSPTLFNEALHRDLTDFRTQHPEVTLLQYVDDLLLAAPTKKACTQGTRHLLQELGEKGYRASAKKAQICQTKVTYLGYILSEGKRWLTPGRIETVARIPPPRNPREVREFLGTAGFCRLWIPGFAELAAPLYALTKPSTPFTWQTEHQLAFEALKKALLSAPALGLPDTSKPFTLFLDERQGIAKGVLTQKLGPWKRPVAYLSKKLDPVAAGWPPCLRIMAATAMLVKDSAKLTLGQPLTVITPHTLEAIVRQPPDRWITNARLTHYQALLLDTDRVQFGPPVTLNPATLLPVPENQPSPHDCRQVLAETHGTREDLKDQELPDADHTWYTDGSSYLDSGTRRAGAAVVDGHNTIWAQSLPPGTSAQKAELIALTKALELSKGKKANIYTDSRYAFATAHTHGSIYERRGWLTSEGKEIKNKAEIIALLKALFLPQEVAIIHCPGHQKGQDPVAVGNRQADRVARQAAMAEVLTLATEPDNTSHITAGKRTADGSEFEKRTADGSEFESPKKKAKVE

SEQ ID NO: 1584 - protein, 2100 aa, synthetic construct
MPAAKRVKLDGGDKKYSIGLDIGTNSVGWAVITDEYKVPSKKFKVLGNTDRHSIKKNLIGALLFDSGETAEATRLKRTARRRYTRRKNRICYLQEIFSNEMAKVDDSFFHRLEESFLVEEDKKHERHPIFGNIVDEVAYHEKYPTIYHLRKKLVDSTDKADLRLIYLALAHMIKFRGHFLIEGDLNPDNSDVDKLFIQLVQTYNQLFEENPINASGVDAKAILSARLSKSRRLENLIAQLPGEKKNGLFGNLIALSLGLTPNFKSNFDLAEDAKLQLSKDTYDDDLDNLLAQIGDQYADLFLAAKNLSDAILLSDILRVNTEITKAPLSASMIKRYDEHHQDLTLLKALVRQQLPEKYKEIFFDQSKNGYAGYIDGGASQEEFYKFIKPILEKMDGTEELLVKLNREDLLRKQRTFDNGSIPHQIHLGELHAILRRQEDFYPFLKDNREKIEKILTFRIPYYVGPLARGNSRFAWMTRKSEETITPWNFEEVVDKGASAQSFIERMTNFDKNLPNEKVLPKHSLLYEYFTVYNELTKVKYVTEGMRKPAFLSGEQKKAIVDLLFKTNRKVTVKQLKEDYFKKIECFDSVEISGVEDRFNASLGTYHDLLKIIKDKDFLDNEENEDILEDIVLTLTLFEDREMIEERLKTYAHLFDDKVMKQLKRRRYTGWGRLSRKLINGIRDKQSGKTILDFLKSDGFANRNFMQLIHDDSLTFKEDIQKAQVSGQGDSLHEHIANLAGSPAIKKGILQTVKVVDELVKVMGRHKPENIVIEMARENQTTQKGQKNSRERMKRIEEGIKELGSQILKEHPVENTQLQNEKLYLYYLQNGRDMYVDQELDINRLSDYDVDHIVPQSFLKDDSIDNKVLTRSDKARGKSDNVPSEEVVKKMKNYWRQLLNAKLITQRKFDNLTKAERGGLSELDKAGFIKRQLVETRQITKHVAQILDSRMNTKYDENDKLIREVKVITLKSKLVSDFRKDFQFYKVREINNYHHAHDAYLNAVVGTALIKKYPKLESEFVYGDYKVYDVRKMIAKSEQEIGKATAKYFFYSNIMNFFKTEITLANGEIRKRPLIETNGETGEIVWDKGRDFATVRKVLSMPQVNIVKKTEVQTGGFSKESILPKRNSDKLIARKKDWDPKKYGGFDSPTVAYSVLVVAKVEKGKSKKLKSVKELLGITIMERSSFEKNPIDFLEAKGYKEVKKDLIIKLPKYSLFELENGRKRMLASAGELQKGNELALPSKYVNFLYLASHYEKLKGSPEDNEQKQLFVEQHKHYLDEIIEQISEFSKRVILADANLDKVLSAYNKHRDKPIREQAENIIHLFTLTNLGAPAAFKYFDTTIDRKRYTSTKEVLDATLIHQSITGLYETRIDLSQLGGDGGGSSGGSPAPGGTVSLQDEHRLFDIPVTTSLPDVWLQDFPQAWAETGGLGRAKCQAPIIIDLKPTAVPVSIKQYPMSLEAHMGIRQHIIKFLELGVLRPCRSPWNTPLLPVKKPGTQDYRPVQDLREINKRTVDIHPTVPNPYNLLSTLKPDYSWYTVLDLKDAFFCLPLAPQSQELFAFEWKDPERGISGQLTWTRLPQGFKNSPTLFNEALHRDLTDFRTQHPEVTLLQYVDDLLLAAPTKKACTQGTRHLLQELGEKGYRASAKKAQICQTKVTYLGYILSEGKRWLTPGRIETVARIPPPRNPREVREFLGTAGFCRLWIPGFAELAAPLYALTKPSTPFTWQTEHQLAFEALKKALLSAPALGLPDTSKPFTLFLDERQGIAKGVLTQKLGPWKRPVAYLSKKLDPVAAGWPPCLRIMAATAMLVKDSAKLTLGQPLTVITPHTLEAIVRQPPDRWITNARLTHYQALLLDTDRVQFGPPVTLNPATLLPVPENQPSPHDCRQVLAETHGTREDLKDQELPDADHTWYTDGSSYLDSGTRRAGAAVVDGHNTIWAQSLPPGTSAQKAELIALTKALELSKGKKANIYTDSRYAFATAHTHGSIYERRGWLTSEGKEIKNKAEIIALLKALFLPQEVAIIHCPGHQKGQDPVAVGNRQADRVARQAAMAEVLTLATEPDNTSHITAGKRTADGSEFEKRTADGSEFESPKKKAKVE

SEQ ID NO: 1585 - protein, 2102 aa, synthetic construct
MPAAKRVKLDGGDKKYSIGLDIGTNSVGWAVITDEYKVPSKKFKVLGNTDRHSIKKNLIGALLFDSGETAEATRLKRTARRRYTRRKNRICYLQEIFSNEMAKVDDSFFHRLEESFLVEEDKKHERHPIFGNIVDEVAYHEKYPTIYHLRKKLVDSTDKADLRLIYLALAHMIKFRGHFLIEGDLNPDNSDVDKLFIQLVQTYNQLFEENPINASGVDAKAILSARLSKSRRLENLIAQLPGEKKNGLFGNLIALSLGLTPNFKSNFDLAEDAKLQLSKDTYDDDLDNLLAQIGDQYADLFLAAKNLSDAILLSDILRVNTEITKAPLSASMIKRYDEHHQDLTLLKALVRQQLPEKYKEIFFDQSKNGYAGYIDGGASQEEFYKFIKPILEKMDGTEELLVKLNREDLLRKQRTFDNGSIPHQIHLGELHAILRRQEDFYPFLKDNREKIEKILTFRIPYYVGPLARGNSRFAWMTRKSEETITPWNFEEVVDKGASAQSFIERMTNFDKNLPNEKVLPKHSLLYEYFTVYNELTKVKYVTEGMRKPAFLSGEQKKAIVDLLFKTNRKVTVKQLKEDYFKKIECFDSVEISGVEDRFNASLGTYHDLLKIIKDKDFLDNEENEDILEDIVLTLTLFEDREMIEERLKTYAHLFDDKVMKQLKRRRYTGWGRLSRKLINGIRDKQSGKTILDFLKSDGFANRNFMQLIHDDSLTFKEDIQKAQVSGQGDSLHEHIANLAGSPAIKKGILQTVKVVDELVKVMGRHKPENIVIEMARENQTTQKGQKNSRERMKRIEEGIKELGSQILKEHPVENTQLQNEKLYLYYLQNGRDMYVDQELDINRLSDYDVDHIVPQSFLKDDSIDNKVLTRSDKARGKSDNVPSEEVVKKMKNYWRQLLNAKLITQRKFDNLTKAERGGLSELDKAGFIKRQLVETRQITKHVAQILDSRMNTKYDENDKLIREVKVITLKSKLVSDFRKDFQFYKVREINNYHHAHDAYLNAVVGTALIKKYPKLESEFVYGDYKVYDVRKMIAKSEQEIGKATAKYFFYSNIMNFFKTEITLANGEIRKRPLIETNGETGEIVWDKGRDFATVRKVLSMPQVNIVKKTEVQTGGFSKESILPKRNSDKLIARKKDWDPKKYGGFDSPTVAYSVLVVAKVEKGKSKKLKSVKELLGITIMERSSFEKNPIDFLEAKGYKEVKKDLIIKLPKYSLFELENGRKRMLASAGELQKGNELALPSKYVNFLYLASHYEKLKGSPEDNEQKQLFVEQHKHYLDEIIEQISEFSKRVILADANLDKVLSAYNKHRDKPIREQAENIIHLFTLTNLGAPAAFKYFDTTIDRKRYTSTKEVLDATLIHQSITGLYETRIDLSQLGGDGGGGGEAAAKGGSGGTVSLQDEHRLFDIPVTTSLPDVWLQDFPQAWAETGGLGRAKCQAPIIIDLKPTAVPVSIKQYPMSLEAHMGIRQHIIKFLELGVLRPCRSPWNTPLLPVKKPGTQDYRPVQDLREINKRTVDIHPTVPNPYNLLSTLKPDYSWYTVLDLKDAFFCLPLAPQSQELFAFEWKDPERGISGQLTWTRLPQGFKNSPTLFNEALHRDLTDFRTQHPEVTLLQYVDDLLLAAPTKKACTQGTRHLLQELGEKGYRASAKKAQICQTKVTYLGYILSEGKRWLTPGRIETVARIPPPRNPREVREFLGTAGFCRLWIPGFAELAAPLYALTKPSTPFTWQTEHQLAFEALKKALLSAPALGLPDTSKPFTLFLDERQGIAKGVLTQKLGPWKRPVAYLSKKLDPVAAGWPPCLRIMAATAMLVKDSAKLTLGQPLTVITPHTLEAIVRQPPDRWITNARLTHYQALLLDTDRVQFGPPVTLNPATLLPVPENQPSPHDCRQVLAETHGTREDLKDQELPDADHTWYTDGSSYLDSGTRRAGAAVVDGHNTIWAQSLPPGTSAQKAELIALTKALELSKGKKANIYTDSRYAFATAHTHGSIYERRGWLTSEGKEIKNKAEIIALLKALFLPQEVAIIHCPGHQKGQDPVAVGNRQADRVARQAAMAEVLTLATEPDNTSHITAGKRTADGSEFEKRTADGSEFESPKKKAKVE

SEQ ID NO: 1586 - protein, 2100 aa, synthetic construct
MPAAKRVKLDGGDKKYSIGLDIGTNSVGWAVITDEYKVPSKKFKVLGNTDRHSIKKNLIGALLFDSGETAEATRLKRTARRRYTRRKNRICYLQEIFSNEMAKVDDSFFHRLEESFLVEEDKKHERHPIFGNIVDEVAYHEKYPTIYHLRKKLVDSTDKADLRLIYLALAHMIKFRGHFLIEGDLNPDNSDVDKLFIQLVQTYNQLFEENPINASGVDAKAILSARLSKSRRLENLIAQLPGEKKNGLFGNLIALSLGLTPNFKSNFDLAEDAKLQLSKDTYDDDLDNLLAQIGDQYADLFLAAKNLSDAILLSDILRVNTEITKAPLSASMIKRYDEHHQDLTLLKALVRQQLPEKYKEIFFDQSKNGYAGYIDGGASQEEFYKFIKPILEKMDGTEELLVKLNREDLLRKQRTFDNGSIPHQIHLGELHAILRRQEDFYPFLKDNREKIEKILTFRIPYYVGPLARGNSRFAWMTRKSEETITPWNFEEVVDKGASAQSFIERMTNFDKNLPNEKVLPKHSLLYEYFTVYNELTKVKYVTEGMRKPAFLSGEQKKAIVDLLFKTNRKVTVKQLKEDYFKKIECFDSVEISGVEDRFNASLGTYHDLLKIIKDKDFLDNEENEDILEDIVLTLTLFEDREMIEERLKTYAHLFDDKVMKQLKRRRYTGWGRLSRKLINGIRDKQSGKTILDFLKSDGFANRNFMQLIHDDSLTFKEDIQKAQVSGQGDSLHEHIANLAGSPAIKKGILQTVKVVDELVKVMGRHKPENIVIEMARENQTTQKGQKNSRERMKRIEEGIKELGSQILKEHPVENTQLQNEKLYLYYLQNGRDMYVDQELDINRLSDYDVDHIVPQSFLKDDSIDNKVLTRSDKARGKSDNVPSEEVVKKMKNYWRQLLNAKLITQRKFDNLTKAERGGLSELDKAGFIKRQLVETRQITKHVAQILDSRMNTKYDENDKLIREVKVITLKSKLVSDFRKDFQFYKVREINNYHHAHDAYLNAVVGTALIKKYPKLESEFVYGDYKVYDVRKMIAKSEQEIGKATAKYFFYSNIMNFFKTEITLANGEIRKRPLIETNGETGEIVWDKGRDFATVRKVLSMPQVNIVKKTEVQTGGFSKESILPKRNSDKLIARKKDWDPKKYGGFDSPTVAYSVLVVAKVEKGKSKKLKSVKELLGITIMERSSFEKNPIDFLEAKGYKEVKKDLIIKLPKYSLFELENGRKRMLASAGELQKGNELALPSKYVNFLYLASHYEKLKGSPEDNEQKQLFVEQHKHYLDEIIEQISEFSKRVILADANLDKVLSAYNKHRDKPIREQAENIIHLFTLTNLGAPAAFKYFDTTIDRKRYTSTKEVLDATLIHQSITGLYETRIDLSQLGGDGGPAPGSSGGSGGTVSLQDEHRLFDIPVTTSLPDVWLQDFPQAWAETGGLGRAKCQAPIIIDLKPTAVPVSIKQYPMSLEAHMGIRQHIIKFLELGVLRPCRSPWNTPLLPVKKPGTQDYRPVQDLREINKRTVDIHPTVPNPYNLLSTLKPDYSWYTVLDLKDAFFCLPLAPQSQELFAFEWKDPERGISGQLTWTRLPQGFKNSPTLFNEALHRDLTDFRTQHPEVTLLQYVDDLLLAAPTKKACTQGTRHLLQELGEKGYRASAKKAQICQTKVTYLGYILSEGKRWLTPGRIETVARIPPPRNPREVREFLGTAGFCRLWIPGFAELAAPLYALTKPSTPFTWQTEHQLAFEALKKALLSAPALGLPDTSKPFTLFLDERQGIAKGVLTQKLGPWKRPVAYLSKKLDPVAAGWPPCLRIMAATAMLVKDSAKLTLGQPLTVITPHTLEAIVRQPPDRWITNARLTHYQALLLDTDRVQFGPPVTLNPATLLPVPENQPSPHDCRQVLAETHGTREDLKDQELPDADHTWYTDGSSYLDSGTRRAGAAVVDGHNTIWAQSLPPGTSAQKAELIALTKALELSKGKKANIYTDSRYAFATAHTHGSIYERRGWLTSEGKEIKNKAEIIALLKALFLPQEVAIIHCPGHQKGQDPVAVGNRQADRVARQAAMAEVLTLATEPDNTSHITAGKRTADGSEFEKRTADGSEFESPKKKAKVE

SEQ ID NO: 1587 - protein, 2101 aa, synthetic construct
MPAAKRVKLDGGDKKYSIGLDIGTNSVGWAVITDEYKVPSKKFKVLGNTDRHSIKKNLIGALLFDSGETAEATRLKRTARRRYTRRKNRICYLQEIFSNEMAKVDDSFFHRLEESFLVEEDKKHERHPIFGNIVDEVAYHEKYPTIYHLRKKLVDSTDKADLRLIYLALAHMIKFRGHFLIEGDLNPDNSDVDKLFIQLVQTYNQLFEENPINASGVDAKAILSARLSKSRRLENLIAQLPGEKKNGLFGNLIALSLGLTPNFKSNFDLAEDAKLQLSKDTYDDDLDNLLAQIGDQYADLFLAAKNLSDAILLSDILRVNTEITKAPLSASMIKRYDEHHQDLTLLKALVRQQLPEKYKEIFFDQSKNGYAGYIDGGASQEEFYKFIKPILEKMDGTEELLVKLNREDLLRKQRTFDNGSIPHQIHLGELHAILRRQEDFYPFLKDNREKIEKILTFRIPYYVGPLARGNSRFAWMTRKSEETITPWNFEEVVDKGASAQSFIERMTNFDKNLPNEKVLPKHSLLYEYFTVYNELTKVKYVTEGMRKPAFLSGEQKKAIVDLLFKTNRKVTVKQLKEDYFKKIECFDSVEISGVEDRFNASLGTYHDLLKIIKDKDFLDNEENEDILEDIVLTLTLFEDREMIEERLKTYAHLFDDKVMKQLKRRRYTGWGRLSRKLINGIRDKQSGKTILDFLKSDGFANRNFMQLIHDDSLTFKEDIQKAQVSGQGDSLHEHIANLAGSPAIKKGILQTVKVVDELVKVMGRHKPENIVIEMARENQTTQKGQKNSRERMKRIEEGIKELGSQILKEHPVENTQLQNEKLYLYYLQNGRDMYVDQELDINRLSDYDVDHIVPQSFLKDDSIDNKVLTRSDKARGKSDNVPSEEVVKKMKNYWRQLLNAKLITQRKFDNLTKAERGGLSELDKAGFIKRQLVETRQITKHVAQILDSRMNTKYDENDKLIREVKVITLKSKLVSDFRKDFQFYKVREINNYHHAHDAYLNAVVGTALIKKYPKLESEFVYGDYKVYDVRKMIAKSEQEIGKATAKYFFYSNIMNFFKTEITLANGEIRKRPLIETNGETGEIVWDKGRDFATVRKVLSMPQVNIVKKTEVQTGGFSKESILPKRNSDKLIARKKDWDPKKYGGFDSPTVAYSVLVVAKVEKGKSKKLKSVKELLGITIMERSSFEKNPIDFLEAKGYKEVKKDLIIKLPKYSLFELENGRKRMLASAGELQKGNELALPSKYVNFLYLASHYEKLKGSPEDNEQKQLFVEQHKHYLDEIIEQISEFSKRVILADANLDKVLSAYNKHRDKPIREQAENIIHLFTLTNLGAPAAFKYFDTTIDRKRYTSTKEVLDATLIHQSITGLYETRIDLSQLGGDGGEAAAKEAAAKGGTVSLQDEHRLFDIPVTTSLPDVWLQDFPQAWAETGGLGRAKCQAPIIIDLKPTAVPVSIKQYPMSLEAHMGIRQHIIKFLELGVLRPCRSPWNTPLLPVKKPGTQDYRPVQDLREINKRTVDIHPTVPNPYNLLSTLKPDYSWYTVLDLKDAFFCLPLAPQSQELFAFEWKDPERGISGQLTWTRLPQGFKNSPTLFNEALHRDLTDFRTQHPEVTLLQYVDDLLLAAPTKKACTQGTRHLLQELGEKGYRASAKKAQICQTKVTYLGYILSEGKRWLTPGRIETVARIPPPRNPREVREFLGTAGFCRLWIPGFAELAAPLYALTKPSTPFTWQTEHQLAFEALKKALLSAPALGLPDTSKPFTLFLDERQGIAKGVLTQKLGPWKRPVAYLSKKLDPVAAGWPPCLRIMAATAMLVKDSAKLTLGQPLTVITPHTLEAIVRQPPDRWITNARLTHYQALLLDTDRVQFGPPVTLNPATLLPVPENQPSPHDCRQVLAETHGTREDLKDQELPDADHTWYTDGSSYLDSGTRRAGAAVVDGHNTIWAQSLPPGTSAQKAELIALTKALELSKGKKANIYTDSRYAFATAHTHGSIYERRGWLTSEGKEIKNKAEIIALLKALFLPQEVAIIHCPGHQKGQDPVAVGNRQADRVARQAAMAEVLTLATEPDNTSHITAGKRTADGSEFEKRTADGSEFESPKKKAKVE

SEQ ID NO: 1588 - protein, 2109 aa, synthetic construct
MPAAKRVKLDGGDKKYSIGLDIGTNSVGWAVITDEYKVPSKKFKVLGNTDRHSIKKNLIGALLFDSGETAEATRLKRTARRRYTRRKNRICYLQEIFSNEMAKVDDSFFHRLEESFLVEEDKKHERHPIFGNIVDEVAYHEKYPTIYHLRKKLVDSTDKADLRLIYLALAHMIKFRGHFLIEGDLNPDNSDVDKLFIQLVQTYNQLFEENPINASGVDAKAILSARLSKSRRLENLIAQLPGEKKNGLFGNLIALSLGLTPNFKSNFDLAEDAKLQLSKDTYDDDLDNLLAQIGDQYADLFLAAKNLSDAILLSDILRVNTEITKAPLSASMIKRYDEHHQDLTLLKALVRQQLPEKYKEIFFDQSKNGYAGYIDGGASQEEFYKFIKPILEKMDGTEELLVKLNREDLLRKQRTFDNGSIPHQIHLGELHAILRRQEDFYPFLKDNREKIEKILTFRIPYYVGPLARGNSRFAWMTRKSEETITPWNFEEVVDKGASAQSFIERMTNFDKNLPNEKVLPKHSLLYEYFTVYNELTKVKYVTEGMRKPAFLSGEQKKAIVDLLFKTNRKVTVKQLKEDYFKKIECFDSVEISGVEDRFNASLGTYHDLLKIIKDKDFLDNEENEDILEDIVLTLTLFEDREMIEERLKTYAHLFDDKVMKQLKRRRYTGWGRLSRKLINGIRDKQSGKTILDFLKSDGFANRNFMQLIHDDSLTFKEDIQKAQVSGQGDSLHEHIANLAGSPAIKKGILQTVKVVDELVKVMGRHKPENIVIEMARENQTTQKGQKNSRERMKRIEEGIKELGSQILKEHPVENTQLQNEKLYLYYLQNGRDMYVDQELDINRLSDYDVDHIVPQSFLKDDSIDNKVLTRSDKARGKSDNVPSEEVVKKMKNYWRQLLNAKLITQRKFDNLTKAERGGLSELDKAGFIKRQLVETRQITKHVAQILDSRMNTKYDENDKLIREVKVITLKSKLVSDFRKDFQFYKVREINNYHHAHDAYLNAVVGTALIKKYPKLESEFVYGDYKVYDVRKMIAKSEQEIGKATAKYFFYSNIMNFFKTEITLANGEIRKRPLIETNGETGEIVWDKGRDFATVRKVLSMPQVNIVKKTEVQTGGFSKESILPKRNSDKLIARKKDWDPKKYGGFDSPTVAYSVLVVAKVEKGKSKKLKSVKELLGITIMERSSFEKNPIDFLEAKGYKEVKKDLIIKLPKYSLFELENGRKRMLASAGELQKGNELALPSKYVNFLYLASHYEKLKGSPEDNEQKQLFVEQHKHYLDEIIEQISEFSKRVILADANLDKVLSAYNKHRDKPIREQAENIIHLFTLTNLGAPAAFKYFDTTIDRKRYTSTKEVLDATLIHQSITGLYETRIDLSQLGGDGGGSSGSSGSSGSSGSSGSSGGTVSLQDEHRLFDIPVTTSLPDVWLQDFPQAWAETGGLGRAKCQAPIIIDLKPTAVPVSIKQYPMSLEAHMGIRQHIIKFLELGVLRPCRSPWNTPLLPVKKPGTQDYRPVQDLREINKRTVDIHPTVPNPYNLLSTLKPDYSWYTVLDLKDAFFCLPLAPQSQELFAFEWKDPERGISGQLTWTRLPQGFKNSPTLFNEALHRDLTDFRTQHPEVTLLQYVDDLLLAAPTKKACTQGTRHLLQELGEKGYRASAKKAQICQTKVTYLGYILSEGKRWLTPGRIETVARIPPPRNPREVREFLGTAGFCRLWIPGFAELAAPLYALTKPSTPFTWQTEHQLAFEALKKALLSAPALGLPDTSKPFTLFLDERQGIAKGVLTQKLGPWKRPVAYLSKKLDPVAAGWPPCLRIMAATAMLVKDSAKLTLGQPLTVITPHTLEAIVRQPPDRWITNARLTHYQALLLDTDRVQFGPPVTLNPATLLPVPENQPSPHDCRQVLAETHGTREDLKDQELPDADHTWYTDGSSYLDSGTRRAGAAVVDGHNTIWAQSLPPGTSAQKAELIALTKALELSKGKKANIYTDSRYAFATAHTHGSIYERRGWLTSEGKEIKNKAEIIALLKALFLPQEVAIIHCPGHQKGQDPVAVGNRQADRVARQAAMAEVLTLATEPDNTSHITAGKRTADGSEFEKRTADGSEFESPKKKAKVE

SEQ ID NO: 1589 - protein, 2102 aa, synthetic construct
MPAAKRVKLDGGDKKYSIGLDIGTNSVGWAVITDEYKVPSKKFKVLGNTDRHSIKKNLIGALLFDSGETAEATRLKRTARRRYTRRKNRICYLQEIFSNEMAKVDDSFFHRLEESFLVEEDKKHERHPIFGNIVDEVAYHEKYPTIYHLRKKLVDSTDKADLRLIYLALAHMIKFRGHFLIEGDLNPDNSDVDKLFIQLVQTYNQLFEENPINASGVDAKAILSARLSKSRRLENLIAQLPGEKKNGLFGNLIALSLGLTPNFKSNFDLAEDAKLQLSKDTYDDDLDNLLAQIGDQYADLFLAAKNLSDAILLSDILRVNTEITKAPLSASMIKRYDEHHQDLTLLKALVRQQLPEKYKEIFFDQSKNGYAGYIDGGASQEEFYKFIKPILEKMDGTEELLVKLNREDLLRKQRTFDNGSIPHQIHLGELHAILRRQEDFYPFLKDNREKIEKILTFRIPYYVGPLARGNSRFAWMTRKSEETITPWNFEEVVDKGASAQSFIERMTNFDKNLPNEKVLPKHSLLYEYFTVYNELTKVKYVTEGMRKPAFLSGEQKKAIVDLLFKTNRKVTVKQLKEDYFKKIECFDSVEISGVEDRFNASLGTYHDLLKIIKDKDFLDNEENEDILEDIVLTLTLFEDREMIEERLKTYAHLFDDKVMKQLKRRRYTGWGRLSRKLINGIRDKQSGKTILDFLKSDGFANRNFMQLIHDDSLTFKEDIQKAQVSGQGDSLHEHIANLAGSPAIKKGILQTVKVVDELVKVMGRHKPENIVIEMARENQTTQKGQKNSRERMKRIEEGIKELGSQILKEHPVENTQLQNEKLYLYYLQNGRDMYVDQELDINRLSDYDVDHIVPQSFLKDDSIDNKVLTRSDKARGKSDNVPSEEVVKKMKNYWRQLLNAKLITQRKFDNLTKAERGGLSELDKAGFIKRQLVETRQITKHVAQILDSRMNTKYDENDKLIREVKVITLKSKLVSDFRKDFQFYKVREINNYHHAHDAYLNAVVGTALIKKYPKLESEFVYGDYKVYDVRKMIAKSEQEIGKATAKYFFYSNIMNFFKTEITLANGEIRKRPLIETNGETGEIVWDKGRDFATVRKVLSMPQVNIVKKTEVQTGGFSKESILPKRNSDKLIARKKDWDPKKYGGFDSPTVAYSVLVVAKVEKGKSKKLKSVKELLGITIMERSSFEKNPIDFLEAKGYKEVKKDLIIKLPKYSLFELENGRKRMLASAGELQKGNELALPSKYVNFLYLASHYEKLKGSPEDNEQKQLFVEQHKHYLDEIIEQISEFSKRVILADANLDKVLSAYNKHRDKPIREQAENIIHLFTLTNLGAPAAFKYFDTTIDRKRYTSTKEVLDATLIHQSITGLYETRIDLSQLGGDGGGGGEAAAKPAPGGTVSLQDEHRLFDIPVTTSLPDVWLQDFPQAWAETGGLGRAKCQAPIIIDLKPTAVPVSIKQYPMSLEAHMGIRQHIIKFLELGVLRPCRSPWNTPLLPVKKPGTQDYRPVQDLREINKRTVDIHPTVPNPYNLLSTLKPDYSWYTVLDLKDAFFCLPLAPQSQELFAFEWKDPERGISGQLTWTRLPQGFKNSPTLFNEALHRDLTDFRTQHPEVTLLQYVDDLLLAAPTKKACTQGTRHLLQELGEKGYRASAKKAQICQTKVTYLGYILSEGKRWLTPGRIETVARIPPPRNPREVREFLGTAGFCRLWIPGFAELAAPLYALTKPSTPFTWQTEHQLAFEALKKALLSAPALGLPDTSKPFTLFLDERQGIAKGVLTQKLGPWKRPVAYLSKKLDPVAAGWPPCLRIMAATAMLVKDSAKLTLGQPLTVITPHTLEAIVRQPPDRWITNARLTHYQALLLDTDRVQFGPPVTLNPATLLPVPENQPSPHDCRQVLAETHGTREDLKDQELPDADHTWYTDGSSYLDSGTRRAGAAVVDGHNTIWAQSLPPGTSAQKAELIALTKALELSKGKKANIYTDSRYAFATAHTHGSIYERRGWLTSEGKEIKNKAEIIALLKALFLPQEVAIIHCPGHQKGQDPVAVGNRQADRVARQAAMAEVLTLATEPDNTSHITAGKRTADGSEFEKRTADGSEFESPKKKAKVE

SEQ ID NO: 1590 - protein, 2097 aa, synthetic construct
MPAAKRVKLDGGDKKYSIGLDIGTNSVGWAVITDEYKVPSKKFKVLGNTDRHSIKKNLIGALLFDSGETAEATRLKRTARRRYTRRKNRICYLQEIFSNEMAKVDDSFFHRLEESFLVEEDKKHERHPIFGNIVDEVAYHEKYPTIYHLRKKLVDSTDKADLRLIYLALAHMIKFRGHFLIEGDLNPDNSDVDKLFIQLVQTYNQLFEENPINASGVDAKAILSARLSKSRRLENLIAQLPGEKKNGLFGNLIALSLGLTPNFKSNFDLAEDAKLQLSKDTYDDDLDNLLAQIGDQYADLFLAAKNLSDAILLSDILRVNTEITKAPLSASMIKRYDEHHQDLTLLKALVRQQLPEKYKEIFFDQSKNGYAGYIDGGASQEEFYKFIKPILEKMDGTEELLVKLNREDLLRKQRTFDNGSIPHQIHLGELHAILRRQEDFYPFLKDNREKIEKILTFRIPYYVGPLARGNSRFAWMTRKSEETITPWNFEEVVDKGASAQSFIERMTNFDKNLPNEKVLPKHSLLYEYFTVYNELTKVKYVTEGMRKPAFLSGEQKKAIVDLLFKTNRKVTVKQLKEDYFKKIECFDSVEISGVEDRFNASLGTYHDLLKIIKDKDFLDNEENEDILEDIVLTLTLFEDREMIEERLKTYAHLFDDKVMKQLKRRRYTGWGRLSRKLINGIRDKQSGKTILDFLKSDGFANRNFMQLIHDDSLTFKEDIQKAQVSGQGDSLHEHIANLAGSPAIKKGILQTVKVVDELVKVMGRHKPENIVIEMARENQTTQKGQKNSRERMKRIEEGIKELGSQILKEHPVENTQLQNEKLYLYYLQNGRDMYVDQELDINRLSDYDVDHIVPQSFLKDDSIDNKVLTRSDKARGKSDNVPSEEVVKKMKNYWRQLLNAKLITQRKFDNLTKAERGGLSELDKAGFIKRQLVETRQITKHVAQILDSRMNTKYDENDKLIREVKVITLKSKLVSDFRKDFQFYKVREINNYHHAHDAYLNAVVGTALIKKYPKLESEFVYGDYKVYDVRKMIAKSEQEIGKATAKYFFYSNIMNFFKTEITLANGEIRKRPLIETNGETGEIVWDKGRDFATVRKVLSMPQVNIVKKTEVQTGGFSKESILPKRNSDKLIARKKDWDPKKYGGFDSPTVAYSVLVVAKVEKGKSKKLKSVKELLGITIMERSSFEKNPIDFLEAKGYKEVKKDLIIKLPKYSLFELENGRKRMLASAGELQKGNELALPSKYVNFLYLASHYEKLKGSPEDNEQKQLFVEQHKHYLDEIIEQISEFSKRVILADANLDKVLSAYNKHRDKPIREQAENIIHLFTLTNLGAPAAFKYFDTTIDRKRYTSTKEVLDATLIHQSITGLYETRIDLSQLGGDGGPAPGGGGGTVSLQDEHRLFDIPVTTSLPDVWLQDFPQAWAETGGLGRAKCQAPIIIDLKPTAVPVSIKQYPMSLEAHMGIRQHIIKFLELGVLRPCRSPWNTPLLPVKKPGTQDYRPVQDLREINKRTVDIHPTVPNPYNLLSTLKPDYSWYTVLDLKDAFFCLPLAPQSQELFAFEWKDPERGISGQLTWTRLPQGFKNSPTLFNEALHRDLTDFRTQHPEVTLLQYVDDLLLAAPTKKACTQGTRHLLQELGEKGYRASAKKAQICQTKVTYLGYILSEGKRWLTPGRIETVARIPPPRNPREVREFLGTAGFCRLWIPGFAELAAPLYALTKPSTPFTWQTEHQLAFEALKKALLSAPALGLPDTSKPFTLFLDERQGIAKGVLTQKLGPWKRPVAYLSKKLDPVAAGWPPCLRIMAATAMLVKDSAKLTLGQPLTVITPHTLEAIVRQPPDRWITNARLTHYQALLLDTDRVQFGPPVTLNPATLLPVPENQPSPHDCRQVLAETHGTREDLKDQELPDADHTWYTDGSSYLDSGTRRAGAAVVDGHNTIWAQSLPPGTSAQKAELIALTKALELSKGKKANIYTDSRYAFATAHTHGSIYERRGWLTSEGKEIKNKAEIIALLKALFLPQEVAIIHCPGHQKGQDPVAVGNRQADRVARQAAMAEVLTLATEPDNTSHITAGKRTADGSEFEKRTADGSEFESPKKKAKVE

SEQ ID NO: 1591 - protein, 2100 aa, synthetic construct
MPAAKRVKLDGGDKKYSIGLDIGTNSVGWAVITDEYKVPSKKFKVLGNTDRHSIKKNLIGALLFDSGETAEATRLKRTARRRYTRRKNRICYLQEIFSNEMAKVDDSFFHRLEESFLVEEDKKHERHPIFGNIVDEVAYHEKYPTIYHLRKKLVDSTDKADLRLIYLALAHMIKFRGHFLIEGDLNPDNSDVDKLFIQLVQTYNQLFEENPINASGVDAKAILSARLSKSRRLENLIAQLPGEKKNGLFGNLIALSLGLTPNFKSNFDLAEDAKLQLSKDTYDDDLDNLLAQIGDQYADLFLAAKNLSDAILLSDILRVNTEITKAPLSASMIKRYDEHHQDLTLLKALVRQQLPEKYKEIFFDQSKNGYAGYIDGGASQEEFYKFIKPILEKMDGTEELLVKLNREDLLRKQRTFDNGSIPHQIHLGELHAILRRQEDFYPFLKDNREKIEKILTFRIPYYVGPLARGNSRFAWMTRKSEETITPWNFEEVVDKGASAQSFIERMTNFDKNLPNEKVLPKHSLLYEYFTVYNELTKVKYVTEGMRKPAFLSGEQKKAIVDLLFKTNRKVTVKQLKEDYFKKIECFDSVEISGVEDRFNASLGTYHDLLKIIKDKDFLDNEENEDILEDIVLTLTLFEDREMIEERLKTYAHLFDDKVMKQLKRRRYTGWGRLSRKLINGIRDKQSGKTILDFLKSDGFANRNFMQLIHDDSLTFKEDIQKAQVSGQGDSLHEHIANLAGSPAIKKGILQTVKVVDELVKVMGRHKPENIVIEMARENQTTQKGQKNSRERMKRIEEGIKELGSQILKEHPVENTQLQNEKLYLYYLQNGRDMYVDQELDINRLSDYDVDHIVPQSFLKDDSIDNKVLTRSDKARGKSDNVPSEEVVKKMKNYWRQLLNAKLITQRKFDNLTKAERGGLSELDKAGFIKRQLVETRQITKHVAQILDSRMNTKYDENDKLIREVKVITLKSKLVSDFRKDFQFYKVREINNYHHAHDAYLNAVVGTALIKKYPKLESEFVYGDYKVYDVRKMIAKSEQEIGKATAKYFFYSNIMNFFKTEITLANGEIRKRPLIETNGETGEIVWDKGRDFATVRKVLSMPQVNIVKKTEVQTGGFSKESILPKRNSDKLIARKKDWDPKKYGGFDSPTVAYSVLVVAKVEKGKSKKLKSVKELLGITIMERSSFEKNPIDFLEAKGYKEVKKDLIIKLPKYSLFELENGRKRMLASAGELQKGNELALPSKYVNFLYLASHYEKLKGSPEDNEQKQLFVEQHKHYLDEIIEQISEFSKRVILADANLDKVLSAYNKHRDKPIREQAENIIHLFTLTNLGAPAAFKYFDTTIDRKRYTSTKEVLDATLIHQSITGLYETRIDLSQLGGDGGGGSPAPGSSGGTVSLQDEHRLFDIPVTTSLPDVWLQDFPQAWAETGGLGRAKCQAPIIIDLKPTAVPVSIKQYPMSLEAHMGIRQHIIKFLELGVLRPCRSPWNTPLLPVKKPGTQDYRPVQDLREINKRTVDIHPTVPNPYNLLSTLKPDYSWYTVLDLKDAFFCLPLAPQSQELFAFEWKDPERGISGQLTWTRLPQGFKNSPTLFNEALHRDLTDFRTQHPEVTLLQYVDDLLLAAPTKKACTQGTRHLLQELGEKGYRASAKKAQICQTKVTYLGYILSEGKRWLTPGRIETVARIPPPRNPREVREFLGTAGFCRLWIPGFAELAAPLYALTKPSTPFTWQTEHQLAFEALKKALLSAPALGLPDTSKPFTLFLDERQGIAKGVLTQKLGPWKRPVAYLSKKLDPVAAGWPPCLRIMAATAMLVKDSAKLTLGQPLTVITPHTLEAIVRQPPDRWITNARLTHYQALLLDTDRVQFGPPVTLNPATLLPVPENQPSPHDCRQVLAETHGTREDLKDQELPDADHTWYTDGSSYLDSGTRRAGAAVVDGHNTIWAQSLPPGTSAQKAELIALTKALELSKGKKANIYTDSRYAFATAHTHGSIYERRGWLTSEGKEIKNKAEIIALLKALFLPQEVAIIHCPGHQKGQDPVAVGNRQADRVARQAAMAEVLTLATEPDNTSHITAGKRTADGSEFEKRTADGSEFESPKKKAKVE

SEQ ID NO: 1592 - protein, 2097 aa, synthetic construct
MPAAKRVKLDGGDKKYSIGLDIGTNSVGWAVITDEYKVPSKKFKVLGNTDRHSIKKNLIGALLFDSGETAEATRLKRTARRRYTRRKNRICYLQEIFSNEMAKVDDSFFHRLEESFLVEEDKKHERHPIFGNIVDEVAYHEKYPTIYHLRKKLVDSTDKADLRLIYLALAHMIKFRGHFLIEGDLNPDNSDVDKLFIQLVQTYNQLFEENPINASGVDAKAILSARLSKSRRLENLIAQLPGEKKNGLFGNLIALSLGLTPNFKSNFDLAEDAKLQLSKDTYDDDLDNLLAQIGDQYADLFLAAKNLSDAILLSDILRVNTEITKAPLSASMIKRYDEHHQDLTLLKALVRQQLPEKYKEIFFDQSKNGYAGYIDGGASQEEFYKFIKPILEKMDGTEELLVKLNREDLLRKQRTFDNGSIPHQIHLGELHAILRRQEDFYPFLKDNREKIEKILTFRIPYYVGPLARGNSRFAWMTRKSEETITPWNFEEVVDKGASAQSFIERMTNFDKNLPNEKVLPKHSLLYEYFTVYNELTKVKYVTEGMRKPAFLSGEQKKAIVDLLFKTNRKVTVKQLKEDYFKKIECFDSVEISGVEDRFNASLGTYHDLLKIIKDKDFLDNEENEDILEDIVLTLTLFEDREMIEERLKTYAHLFDDKVMKQLKRRRYTGWGRLSRKLINGIRDKQSGKTILDFLKSDGFANRNFMQLIHDDSLTFKEDIQKAQVSGQGDSLHEHIANLAGSPAIKKGILQTVKVVDELVKVMGRHKPENIVIEMARENQTTQKGQKNSRERMKRIEEGIKELGSQILKEHPVENTQLQNEKLYLYYLQNGRDMYVDQELDINRLSDYDVDHIVPQSFLKDDSIDNKVLTRSDKARGKSDNVPSEEVVKKMKNYWRQLLNAKLITQRKFDNLTKAERGGLSELDKAGFIKRQLVETRQITKHVAQILDSRMNTKYDENDKLIREVKVITLKSKLVSDFRKDFQFYKVREINNYHHAHDAYLNAVVGTALIKKYPKLESEFVYGDYKVYDVRKMIAKSEQEIGKATAKYFFYSNIMNFFKTEITLANGEIRKRPLIETNGETGEIVWDKGRDFATVRKVLSMPQVNIVKKTEVQTGGFSKESILPKRNSDKLIARKKDWDPKKYGGFDSPTVAYSVLVVAKVEKGKSKKLKSVKELLGITIMERSSFEKNPIDFLEAKGYKEVKKDLIIKLPKYSLFELENGRKRMLASAGELQKGNELALPSKYVNFLYLASHYEKLKGSPEDNEQKQLFVEQHKHYLDEIIEQISEFSKRVILADANLDKVLSAYNKHRDKPIREQAENIIHLFTLTNLGAPAAFKYFDTTIDRKRYTSTKEVLDATLIHQSITGLYETRIDLSQLGGDGGGSSPAPGGTVSLQDEHRLFDIPVTTSLPDVWLQDFPQAWAETGGLGRAKCQAPIIIDLKPTAVPVSIKQYPMSLEAHMGIRQHIIKFLELGVLRPCRSPWNTPLLPVKKPGTQDYRPVQDLREINKRTVDIHPTVPNPYNLLSTLKPDYSWYTVLDLKDAFFCLPLAPQSQELFAFEWKDPERGISGQLTWTRLPQGFKNSPTLFNEALHRDLTDFRTQHPEVTLLQYVDDLLLAAPTKKACTQGTRHLLQELGEKGYRASAKKAQICQTKVTYLGYILSEGKRWLTPGRIETVARIPPPRNPREVREFLGTAGFCRLWIPGFAELAAPLYALTKPSTPFTWQTEHQLAFEALKKALLSAPALGLPDTSKPFTLFLDERQGIAKGVLTQKLGPWKRPVAYLSKKLDPVAAGWPPCLRIMAATAMLVKDSAKLTLGQPLTVITPHTLEAIVRQPPDRWITNARLTHYQALLLDTDRVQFGPPVTLNPATLLPVPENQPSPHDCRQVLAETHGTREDLKDQELPDADHTWYTDGSSYLDSGTRRAGAAVVDGHNTIWAQSLPPGTSAQKAELIALTKALELSKGKKANIYTDSRYAFATAHTHGSIYERRGWLTSEGKEIKNKAEIIALLKALFLPQEVAIIHCPGHQKGQDPVAVGNRQADRVARQAAMAEVLTLATEPDNTSHITAGKRTADGSEFEKRTADGSEFESPKKKAKVE

SEQ ID NO: 1593 - protein, 2102 aa, synthetic construct
MPAAKRVKLDGGDKKYSIGLDIGTNSVGWAVITDEYKVPSKKFKVLGNTDRHSIKKNLIGALLFDSGETAEATRLKRTARRRYTRRKNRICYLQEIFSNEMAKVDDSFFHRLEESFLVEEDKKHERHPIFGNIVDEVAYHEKYPTIYHLRKKLVDSTDKADLRLIYLALAHMIKFRGHFLIEGDLNPDNSDVDKLFIQLVQTYNQLFEENPINASGVDAKAILSARLSKSRRLENLIAQLPGEKKNGLFGNLIALSLGLTPNFKSNFDLAEDAKLQLSKDTYDDDLDNLLAQIGDQYADLFLAAKNLSDAILLSDILRVNTEITKAPLSASMIKRYDEHHQDLTLLKALVRQQLPEKYKEIFFDQSKNGYAGYIDGGASQEEFYKFIKPILEKMDGTEELLVKLNREDLLRKQRTFDNGSIPHQIHLGELHAILRRQEDFYPFLKDNREKIEKILTFRIPYYVGPLARGNSRFAWMTRKSEETITPWNFEEVVDKGASAQSFIERMTNFDKNLPNEKVLPKHSLLYEYFTVYNELTKVKYVTEGMRKPAFLSGEQKKAIVDLLFKTNRKVTVKQLKEDYFKKIECFDSVEISGVEDRFNASLGTYHDLLKIIKDKDFLDNEENEDILEDIVLTLTLFEDREMIEERLKTYAHLFDDKVMKQLKRRRYTGWGRLSRKLINGIRDKQSGKTILDFLKSDGFANRNFMQLIHDDSLTFKEDIQKAQVSGQGDSLHEHIANLAGSPAIKKGILQTVKVVDELVKVMGRHKPENIVIEMARENQTTQKGQKNSRERMKRIEEGIKELGSQILKEHPVENTQLQNEKLYLYYLQNGRDMYVDQELDINRLSDYDVDHIVPQSFLKDDSIDNKVLTRSDKARGKSDNVPSEEVVKKMKNYWRQLLNAKLITQRKFDNLTKAERGGLSELDKAGFIKRQLVETRQITKHVAQILDSRMNTKYDENDKLIREVKVITLKSKLVSDFRKDFQFYKVREINNYHHAHDAYLNAVVGTALIKKYPKLESEFVYGDYKVYDVRKMIAKSEQEIGKATAKYFFYSNIMNFFKTEITLANGEIRKRPLIETNGETGEIVWDKGRDFATVRKVLSMPQVNIVKKTEVQTGGFSKESILPKRNSDKLIARKKDWDPKKYGGFDSPTVAYSVLVVAKVEKGKSKKLKSVKELLGITIMERSSFEKNPIDFLEAKGYKEVKKDLIIKLPKYSLFELENGRKRMLASAGELQKGNELALPSKYVNFLYLASHYEKLKGSPEDNEQKQLFVEQHKHYLDEIIEQISEFSKRVILADANLDKVLSAYNKHRDKPIREQAENIIHLFTLTNLGAPAAFKYFDTTIDRKRYTSTKEVLDATLIHQSITGLYETRIDLSQLGGDGGEAAAKGGGGSSGGTVSLQDEHRLFDIPVTTSLPDVWLQDFPQAWAETGGLGRAKCQAPIIIDLKPTAVPVSIKQYPMSLEAHMGIRQHIIKFLELGVLRPCRSPWNTPLLPVKKPGTQDYRPVQDLREINKRTVDIHPTVPNPYNLLSTLKPDYSWYTVLDLKDAFFCLPLAPQSQELFAFEWKDPERGISGQLTWTRLPQGFKNSPTLFNEALHRDLTDFRTQHPEVTLLQYVDDLLLAAPTKKACTQGTRHLLQELGEKGYRASAKKAQICQTKVTYLGYILSEGKRWLTPGRIETVARIPPPRNPREVREFLGTAGFCRLWIPGFAELAAPLYALTKPSTPFTWQTEHQLAFEALKKALLSAPALGLPDTSKPFTLFLDERQGIAKGVLTQKLGPWKRPVAYLSKKLDPVAAGWPPCLRIMAATAMLVKDSAKLTLGQPLTVITPHTLEAIVRQPPDRWITNARLTHYQALLLDTDRVQFGPPVTLNPATLLPVPENQPSPHDCRQVLAETHGTREDLKDQELPDADHTWYTDGSSYLDSGTRRAGAAVVDGHNTIWAQSLPPGTSAQKAELIALTKALELSKGKKANIYTDSRYAFATAHTHGSIYERRGWLTSEGKEIKNKAEIIALLKALFLPQEVAIIHCPGHQKGQDPVAVGNRQADRVARQAAMAEVLTLATEPDNTSHITAGKRTADGSEFEKRTADGSEFESPKKKAKVE

SEQ ID NO: 1594 - protein, 2103 aa, synthetic construct
MPAAKRVKLDGGDKKYSIGLDIGTNSVGWAVITDEYKVPSKKFKVLGNTDRHSIKKNLIGALLFDSGETAEATRLKRTARRRYTRRKNRICYLQEIFSNEMAKVDDSFFHRLEESFLVEEDKKHERHPIFGNIVDEVAYHEKYPTIYHLRKKLVDSTDKADLRLIYLALAHMIKFRGHFLIEGDLNPDNSDVDKLFIQLVQTYNQLFEENPINASGVDAKAILSARLSKSRRLENLIAQLPGEKKNGLFGNLIALSLGLTPNFKSNFDLAEDAKLQLSKDTYDDDLDNLLAQIGDQYADLFLAAKNLSDAILLSDILRVNTEITKAPLSASMIKRYDEHHQDLTLLKALVRQQLPEKYKEIFFDQSKNGYAGYIDGGASQEEFYKFIKPILEKMDGTEELLVKLNREDLLRKQRTFDNGSIPHQIHLGELHAILRRQEDFYPFLKDNREKIEKILTFRIPYYVGPLARGNSRFAWMTRKSEETITPWNFEEVVDKGASAQSFIERMTNFDKNLPNEKVLPKHSLLYEYFTVYNELTKVKYVTEGMRKPAFLSGEQKKAIVDLLFKTNRKVTVKQLKEDYFKKIECFDSVEISGVEDRFNASLGTYHDLLKIIKDKDFLDNEENEDILEDIVLTLTLFEDREMIEERLKTYAHLFDDKVMKQLKRRRYTGWGRLSRKLINGIRDKQSGKTILDFLKSDGFANRNFMQLIHDDSLTFKEDIQKAQVSGQGDSLHEHIANLAGSPAIKKGILQTVKVVDELVKVMGRHKPENIVIEMARENQTTQKGQKNSRERMKRIEEGIKELGSQILKEHPVENTQLQNEKLYLYYLQNGRDMYVDQELDINRLSDYDVDHIVPQSFLKDDSIDNKVLTRSDKARGKSDNVPSEEVVKKMKNYWRQLLNAKLITQRKFDNLTKAERGGLSELDKAGFIKRQLVETRQITKHVAQILDSRMNTKYDENDKLIREVKVITLKSKLVSDFRKDFQFYKVREINNYHHAHDAYLNAVVGTALIKKYPKLESEFVYGDYKVYDVRKMIAKSEQEIGKATAKYFFYSNIMNFFKTEITLANGEIRKRPLIETNGETGEIVWDKGRDFATVRKVLSMPQVNIVKKTEVQTGGFSKESILPKRNSDKLIARKKDWDPKKYGGFDSPTVAYSVLVVAKVEKGKSKKLKSVKELLGITIMERSSFEKNPIDFLEAKGYKEVKKDLIIKLPKYSLFELENGRKRMLASAGELQKGNELALPSKYVNFLYLASHYEKLKGSPEDNEQKQLFVEQHKHYLDEIIEQISEFSKRVILADANLDKVLSAYNKHRDKPIREQAENIIHLFTLTNLGAPAAFKYFDTTIDRKRYTSTKEVLDATLIHQSITGLYETRIDLSQLGGDGGGSAGSAAGSGEFGGTVSLQDEHRLFDIPVTTSLPDVWLQDFPQAWAETGGLGRAKCQAPIIIDLKPTAVPVSIKQYPMSLEAHMGIRQHIIKFLELGVLRPCRSPWNTPLLPVKKPGTQDYRPVQDLREINKRTVDIHPTVPNPYNLLSTLKPDYSWYTVLDLKDAFFCLPLAPQSQELFAFEWKDPERGISGQLTWTRLPQGFKNSPTLFNEALHRDLTDFRTQHPEVTLLQYVDDLLLAAPTKKACTQGTRHLLQELGEKGYRASAKKAQICQTKVTYLGYILSEGKRWLTPGRIETVARIPPPRNPREVREFLGTAGFCRLWIPGFAELAAPLYALTKPSTPFTWQTEHQLAFEALKKALLSAPALGLPDTSKPFTLFLDERQGIAKGVLTQKLGPWKRPVAYLSKKLDPVAAGWPPCLRIMAATAMLVKDSAKLTLGQPLTVITPHTLEAIVRQPPDRWITNARLTHYQALLLDTDRVQFGPPVTLNPATLLPVPENQPSPHDCRQVLAETHGTREDLKDQELPDADHTWYTDGSSYLDSGTRRAGAAVVDGHNTIWAQSLPPGTSAQKAELIALTKALELSKGKKANIYTDSRYAFATAHTHGSIYERRGWLTSEGKEIKNKAEIIALLKALFLPQEVAIIHCPGHQKGQDPVAVGNRQADRVARQAAMAEVLTLATEPDNTSHITAGKRTADGSEFEKRTADGSEFESPKKKAKVE

SEQ ID NO: 1595 - protein, 2100 aa, synthetic construct
MPAAKRVKLDGGDKKYSIGLDIGTNSVGWAVITDEYKVPSKKFKVLGNTDRHSIKKNLIGALLFDSGETAEATRLKRTARRRYTRRKNRICYLQEIFSNEMAKVDDSFFHRLEESFLVEEDKKHERHPIFGNIVDEVAYHEKYPTIYHLRKKLVDSTDKADLRLIYLALAHMIKFRGHFLIEGDLNPDNSDVDKLFIQLVQTYNQLFEENPINASGVDAKAILSARLSKSRRLENLIAQLPGEKKNGLFGNLIALSLGLTPNFKSNFDLAEDAKLQLSKDTYDDDLDNLLAQIGDQYADLFLAAKNLSDAILLSDILRVNTEITKAPLSASMIKRYDEHHQDLTLLKALVRQQLPEKYKEIFFDQSKNGYAGYIDGGASQEEFYKFIKPILEKMDGTEELLVKLNREDLLRKQRTFDNGSIPHQIHLGELHAILRRQEDFYPFLKDNREKIEKILTFRIPYYVGPLARGNSRFAWMTRKSEETITPWNFEEVVDKGASAQSFIERMTNFDKNLPNEKVLPKHSLLYEYFTVYNELTKVKYVTEGMRKPAFLSGEQKKAIVDLLFKTNRKVTVKQLKEDYFKKIECFDSVEISGVEDRFNASLGTYHDLLKIIKDKDFLDNEENEDILEDIVLTLTLFEDREMIEERLKTYAHLFDDKVMKQLKRRRYTGWGRLSRKLINGIRDKQSGKTILDFLKSDGFANRNFMQLIHDDSLTFKEDIQKAQVSGQGDSLHEHIANLAGSPAIKKGILQTVKVVDELVKVMGRHKPENIVIEMARENQTTQKGQKNSRERMKRIEEGIKELGSQILKEHPVENTQLQNEKLYLYYLQNGRDMYVDQELDINRLSDYDVDHIVPQSFLKDDSIDNKVLTRSDKARGKSDNVPSEEVVKKMKNYWRQLLNAKLITQRKFDNLTKAERGGLSELDKAGFIKRQLVETRQITKHVAQILDSRMNTKYDENDKLIREVKVITLKSKLVSDFRKDFQFYKVREINNYHHAHDAYLNAVVGTALIKKYPKLESEFVYGDYKVYDVRKMIAKSEQEIGKATAKYFFYSNIMNFFKTEITLANGEIRKRPLIETNGETGEIVWDKGRDFATVRKVLSMPQVNIVKKTEVQTGGFSKESILPKRNSDKLIARKKDWDPKKYGGFDSPTVAYSVLVVAKVEKGKSKKLKSVKELLGITIMERSSFEKNPIDFLEAKGYKEVKKDLIIKLPKYSLFELENGRKRMLASAGELQKGNELALPSKYVNFLYLASHYEKLKGSPEDNEQKQLFVEQHKHYLDEIIEQISEFSKRVILADANLDKVLSAYNKHRDKPIREQAENIIHLFTLTNLGAPAAFKYFDTTIDRKRYTSTKEVLDATLIHQSITGLYETRIDLSQLGGDGGGGGPAPGGSGGTVSLQDEHRLFDIPVTTSLPDVWLQDFPQAWAETGGLGRAKCQAPIIIDLKPTAVPVSIKQYPMSLEAHMGIRQHIIKFLELGVLRPCRSPWNTPLLPVKKPGTQDYRPVQDLREINKRTVDIHPTVPNPYNLLSTLKPDYSWYTVLDLKDAFFCLPLAPQSQELFAFEWKDPERGISGQLTWTRLPQGFKNSPTLFNEALHRDLTDFRTQHPEVTLLQYVDDLLLAAPTKKACTQGTRHLLQELGEKGYRASAKKAQICQTKVTYLGYILSEGKRWLTPGRIETVARIPPPRNPREVREFLGTAGFCRLWIPGFAELAAPLYALTKPSTPFTWQTEHQLAFEALKKALLSAPALGLPDTSKPFTLFLDERQGIAKGVLTQKLGPWKRPVAYLSKKLDPVAAGWPPCLRIMAATAMLVKDSAKLTLGQPLTVITPHTLEAIVRQPPDRWITNARLTHYQALLLDTDRVQFGPPVTLNPATLLPVPENQPSPHDCRQVLAETHGTREDLKDQELPDADHTWYTDGSSYLDSGTRRAGAAVVDGHNTIWAQSLPPGTSAQKAELIALTKALELSKGKKANIYTDSRYAFATAHTHGSIYERRGWLTSEGKEIKNKAEIIALLKALFLPQEVAIIHCPGHQKGQDPVAVGNRQADRVARQAAMAEVLTLATEPDNTSHITAGKRTADGSEFEKRTADGSEFESPKKKAKVE

SEQ ID NO: 1596 - protein, 2102 aa, synthetic construct
MPAAKRVKLDGGDKKYSIGLDIGTNSVGWAVITDEYKVPSKKFKVLGNTDRHSIKKNLIGALLFDSGETAEATRLKRTARRRYTRRKNRICYLQEIFSNEMAKVDDSFFHRLEESFLVEEDKKHERHPIFGNIVDEVAYHEKYPTIYHLRKKLVDSTDKADLRLIYLALAHMIKFRGHFLIEGDLNPDNSDVDKLFIQLVQTYNQLFEENPINASGVDAKAILSARLSKSRRLENLIAQLPGEKKNGLFGNLIALSLGLTPNFKSNFDLAEDAKLQLSKDTYDDDLDNLLAQIGDQYADLFLAAKNLSDAILLSDILRVNTEITKAPLSASMIKRYDEHHQDLTLLKALVRQQLPEKYKEIFFDQSKNGYAGYIDGGASQEEFYKFIKPILEKMDGTEELLVKLNREDLLRKQRTFDNGSIPHQIHLGELHAILRRQEDFYPFLKDNREKIEKILTFRIPYYVGPLARGNSRFAWMTRKSEETITPWNFEEVVDKGASAQSFIERMTNFDKNLPNEKVLPKHSLLYEYFTVYNELTKVKYVTEGMRKPAFLSGEQKKAIVDLLFKTNRKVTVKQLKEDYFKKIECFDSVEISGVEDRFNASLGTYHDLLKIIKDKDFLDNEENEDILEDIVLTLTLFEDREMIEERLKTYAHLFDDKVMKQLKRRRYTGWGRLSRKLINGIRDKQSGKTILDFLKSDGFANRNFMQLIHDDSLTFKEDIQKAQVSGQGDSLHEHIANLAGSPAIKKGILQTVKVVDELVKVMGRHKPENIVIEMARENQTTQKGQKNSRERMKRIEEGIKELGSQILKEHPVENTQLQNEKLYLYYLQNGRDMYVDQELDINRLSDYDVDHIVPQSFLKDDSIDNKVLTRSDKARGKSDNVPSEEVVKKMKNYWRQLLNAKLITQRKFDNLTKAERGGLSELDKAGFIKRQLVETRQITKHVAQILDSRMNTKYDENDKLIREVKVITLKSKLVSDFRKDFQFYKVREINNYHHAHDAYLNAVVGTALIKKYPKLESEFVYGDYKVYDVRKMIAKSEQEIGKATAKYFFYSNIMNFFKTEITLANGEIRKRPLIETNGETGEIVWDKGRDFATVRKVLSMPQVNIVKKTEVQTGGFSKESILPKRNSDKLIARKKDWDPKKYGGFDSPTVAYSVLVVAKVEKGKSKKLKSVKELLGITIMERSSFEKNPIDFLEAKGYKEVKKDLIIKLPKYSLFELENGRKRMLASAGELQKGNELALPSKYVNFLYLASHYEKLKGSPEDNEQKQLFVEQHKHYLDEIIEQISEFSKRVILADANLDKVLSAYNKHRDKPIREQAENIIHLFTLTNLGAPAAFKYFDTTIDRKRYTSTKEVLDATLIHQSITGLYETRIDLSQLGGDGGGSSPAPEAAAKGGTVSLQDEHRLFDIPVTTSLPDVWLQDFPQAWAETGGLGRAKCQAPIIIDLKPTAVPVSIKQYPMSLEAHMGIRQHIIKFLELGVLRPCRSPWNTPLLPVKKPGTQDYRPVQDLREINKRTVDIHPTVPNPYNLLSTLKPDYSWYTVLDLKDAFFCLPLAPQSQELFAFEWKDPERGISGQLTWTRLPQGFKNSPTLFNEALHRDLTDFRTQHPEVTLLQYVDDLLLAAPTKKACTQGTRHLLQELGEKGYRASAKKAQICQTKVTYLGYILSEGKRWLTPGRIETVARIPPPRNPREVREFLGTAGFCRLWIPGFAELAAPLYALTKPSTPFTWQTEHQLAFEALKKALLSAPALGLPDTSKPFTLFLDERQGIAKGVLTQKLGPWKRPVAYLSKKLDPVAAGWPPCLRIMAATAMLVKDSAKLTLGQPLTVITPHTLEAIVRQPPDRWITNARLTHYQALLLDTDRVQFGPPVTLNPATLLPVPENQPSPHDCRQVLAETHGTREDLKDQELPDADHTWYTDGSSYLDSGTRRAGAAVVDGHNTIWAQSLPPGTSAQKAELIALTKALELSKGKKANIYTDSRYAFATAHTHGSIYERRGWLTSEGKEIKNKAEIIALLKALFLPQEVAIIHCPGHQKGQDPVAVGNRQADRVARQAAMAEVLTLATEPDNTSHITAGKRTADGSEFEKRTADGSEFESPKKKAKVE

SEQ ID NO: 1597 - protein, 2101 aa, synthetic construct
MPAAKRVKLDGGDKKYSIGLDIGTNSVGWAVITDEYKVPSKKFKVLGNTDRHSIKKNLIGALLFDSGETAEATRLKRTARRRYTRRKNRICYLQEIFSNEMAKVDDSFFHRLEESFLVEEDKKHERHPIFGNIVDEVAYHEKYPTIYHLRKKLVDSTDKADLRLIYLALAHMIKFRGHFLIEGDLNPDNSDVDKLFIQLVQTYNQLFEENPINASGVDAKAILSARLSKSRRLENLIAQLPGEKKNGLFGNLIALSLGLTPNFKSNFDLAEDAKLQLSKDTYDDDLDNLLAQIGDQYADLFLAAKNLSDAILLSDILRVNTEITKAPLSASMIKRYDEHHQDLTLLKALVRQQLPEKYKEIFFDQSKNGYAGYIDGGASQEEFYKFIKPILEKMDGTEELLVKLNREDLLRKQRTFDNGSIPHQIHLGELHAILRRQEDFYPFLKDNREKIEKILTFRIPYYVGPLARGNSRFAWMTRKSEETITPWNFEEVVDKGASAQSFIERMTNFDKNLPNEKVLPKHSLLYEYFTVYNELTKVKYVTEGMRKPAFLSGEQKKAIVDLLFKTNRKVTVKQLKEDYFKKIECFDSVEISGVEDRFNASLGTYHDLLKIIKDKDFLDNEENEDILEDIVLTLTLFEDREMIEERLKTYAHLFDDKVMKQLKRRRYTGWGRLSRKLINGIRDKQSGKTILDFLKSDGFANRNFMQLIHDDSLTFKEDIQKAQVSGQGDSLHEHIANLAGSPAIKKGILQTVKVVDELVKVMGRHKPENIVIEMARENQTTQKGQKNSRERMKRIEEGIKELGSQILKEHPVENTQLQNEKLYLYYLQNGRDMYVDQELDINRLSDYDVDHIVPQSFLKDDSIDNKVLTRSDKARGKSDNVPSEEVVKKMKNYWRQLLNAKLITQRKFDNLTKAERGGLSELDKAGFIKRQLVETRQITKHVAQILDSRMNTKYDENDKLIREVKVITLKSKLVSDFRKDFQFYKVREINNYHHAHDAYLNAVVGTALIKKYPKLESEFVYGDYKVYDVRKMIAKSEQEIGKATAKYFFYSNIMNFFKTEITLANGEIRKRPLIETNGETGEIVWDKGRDFATVRKVLSMPQVNIVKKTEVQTGGFSKESILPKRNSDKLIARKKDWDPKKYGGFDSPTVAYSVLVVAKVEKGKSKKLKSVKELLGITIMERSSFEKNPIDFLEAKGYKEVKKDLIIKLPKYSLFELENGRKRMLASAGELQKGNELALPSKYVNFLYLASHYEKLKGSPEDNEQKQLFVEQHKHYLDEIIEQISEFSKRVILADANLDKVLSAYNKHRDKPIREQAENIIHLFTLTNLGAPAAFKYFDTTIDRKRYTSTKEVLDATLIHQSITGLYETRIDLSQLGGDGGGGGGSGGGGSGGTVSLQDEHRLFDIPVTTSLPDVWLQDFPQAWAETGGLGRAKCQAPIIIDLKPTAVPVSIKQYPMSLEAHMGIRQHIIKFLELGVLRPCRSPWNTPLLPVKKPGTQDYRPVQDLREINKRTVDIHPTVPNPYNLLSTLKPDYSWYTVLDLKDAFFCLPLAPQSQELFAFEWKDPERGISGQLTWTRLPQGFKNSPTLFNEALHRDLTDFRTQHPEVTLLQYVDDLLLAAPTKKACTQGTRHLLQELGEKGYRASAKKAQICQTKVTYLGYILSEGKRWLTPGRIETVARIPPPRNPREVREFLGTAGFCRLWIPGFAELAAPLYALTKPSTPFTWQTEHQLAFEALKKALLSAPALGLPDTSKPFTLFLDERQGIAKGVLTQKLGPWKRPVAYLSKKLDPVAAGWPPCLRIMAATAMLVKDSAKLTLGQPLTVITPHTLEAIVRQPPDRWITNARLTHYQALLLDTDRVQFGPPVTLNPATLLPVPENQPSPHDCRQVLAETHGTREDLKDQELPDADHTWYTDGSSYLDSGTRRAGAAVVDGHNTIWAQSLPPGTSAQKAELIALTKALELSKGKKANIYTDSRYAFATAHTHGSIYERRGWLTSEGKEIKNKAEIIALLKALFLPQEVAIIHCPGHQKGQDPVAVGNRQADRVARQAAMAEVLTLATEPDNTSHITAGKRTADGSEFEKRTADGSEFESPKKKAKVE

SEQ ID NO: 1598 - protein, 2102 aa, synthetic construct
MPAAKRVKLDGGDKKYSIGLDIGTNSVGWAVITDEYKVPSKKFKVLGNTDRHSIKKNLIGALLFDSGETAEATRLKRTARRRYTRRKNRICYLQEIFSNEMAKVDDSFFHRLEESFLVEEDKKHERHPIFGNIVDEVAYHEKYPTIYHLRKKLVDSTDKADLRLIYLALAHMIKFRGHFLIEGDLNPDNSDVDKLFIQLVQTYNQLFEENPINASGVDAKAILSARLSKSRRLENLIAQLPGEKKNGLFGNLIALSLGLTPNFKSNFDLAEDAKLQLSKDTYDDDLDNLLAQIGDQYADLFLAAKNLSDAILLSDILRVNTEITKAPLSASMIKRYDEHHQDLTLLKALVRQQLPEKYKEIFFDQSKNGYAGYIDGGASQEEFYKFIKPILEKMDGTEELLVKLNREDLLRKQRTFDNGSIPHQIHLGELHAILRRQEDFYPFLKDNREKIEKILTFRIPYYVGPLARGNSRFAWMTRKSEETITPWNFEEVVDKGASAQSFIERMTNFDKNLPNEKVLPKHSLLYEYFTVYNELTKVKYVTEGMRKPAFLSGEQKKAIVDLLFKTNRKVTVKQLKEDYFKKIECFDSVEISGVEDRFNASLGTYHDLLKIIKDKDFLDNEENEDILEDIVLTLTLFEDREMIEERLKTYAHLFDDKVMKQLKRRRYTGWGRLSRKLINGIRDKQSGKTILDFLKSDGFANRNFMQLIHDDSLTFKEDIQKAQVSGQGDSLHEHIANLAGSPAIKKGILQTVKVVDELVKVMGRHKPENIVIEMARENQTTQKGQKNSRERMKRIEEGIKELGSQILKEHPVENTQLQNEKLYLYYLQNGRDMYVDQELDINRLSDYDVDHIVPQSFLKDDSIDNKVLTRSDKARGKSDNVPSEEVVKKMKNYWRQLLNAKLITQRKFDNLTKAERGGLSELDKAGFIKRQLVETRQITKHVAQILDSRMNTKYDENDKLIREVKVITLKSKLVSDFRKDFQFYKVREINNYHHAHDAYLNAVVGTALIKKYPKLESEFVYGDYKVYDVRKMIAKSEQEIGKATAKYFFYSNIMNFFKTEITLANGEIRKRPLIETNGETGEIVWDKGRDFATVRKVLSMPQVNIVKKTEVQTGGFSKESILPKRNSDKLIARKKDWDPKKYGGFDSPTVAYSVLVVAKVEKGKSKKLKSVKELLGITIMERSSFEKNPIDFLEAKGYKEVKKDLIIKLPKYSLFELENGRKRMLASAGELQKGNELALPSKYVNFLYLASHYEKLKGSPEDNEQKQLFVEQHKHYLDEIIEQISEFSKRVILADANLDKVLSAYNKHRDKPIREQAENIIHLFTLTNLGAPAAFKYFDTTIDRKRYTSTKEVLDATLIHQSITGLYETRIDLSQLGGDGGGGSPAPEAAAKGGTVSLQDEHRLFDIPVTTSLPDVWLQDFPQAWAETGGLGRAKCQAPIIIDLKPTAVPVSIKQYPMSLEAHMGIRQHIIKFLELGVLRPCRSPWNTPLLPVKKPGTQDYRPVQDLREINKRTVDIHPTVPNPYNLLSTLKPDYSWYTVLDLKDAFFCLPLAPQSQELFAFEWKDPERGISGQLTWTRLPQGFKNSPTLFNEALHRDLTDFRTQHPEVTLLQYVDDLLLAAPTKKACTQGTRHLLQELGEKGYRASAKKAQICQTKVTYLGYILSEGKRWLTPGRIETVARIPPPRNPREVREFLGTAGFCRLWIPGFAELAAPLYALTKPSTPFTWQTEHQLAFEALKKALLSAPALGLPDTSKPFTLFLDERQGIAKGVLTQKLGPWKRPVAYLSKKLDPVAAGWPPCLRIMAATAMLVKDSAKLTLGQPLTVITPHTLEAIVRQPPDRWITNARLTHYQALLLDTDRVQFGPPVTLNPATLLPVPENQPSPHDCRQVLAETHGTREDLKDQELPDADHTWYTDGSSYLDSGTRRAGAAVVDGHNTIWAQSLPPGTSAQKAELIALTKALELSKGKKANIYTDSRYAFATAHTHGSIYERRGWLTSEGKEIKNKAEIIALLKALFLPQEVAIIHCPGHQKGQDPVAVGNRQADRVARQAAMAEVLTLATEPDNTSHITAGKRTADGSEFEKRTADGSEFESPKKKAKVE

SEQ ID NO: 1599 - protein, 2100 aa, synthetic construct
MPAAKRVKLDGGDKKYSIGLDIGTNSVGWAVITDEYKVPSKKFKVLGNTDRHSIKKNLIGALLFDSGETAEATRLKRTARRRYTRRKNRICYLQEIFSNEMAKVDDSFFHRLEESFLVEEDKKHERHPIFGNIVDEVAYHEKYPTIYHLRKKLVDSTDKADLRLIYLALAHMIKFRGHFLIEGDLNPDNSDVDKLFIQLVQTYNQLFEENPINASGVDAKAILSARLSKSRRLENLIAQLPGEKKNGLFGNLIALSLGLTPNFKSNFDLAEDAKLQLSKDTYDDDLDNLLAQIGDQYADLFLAAKNLSDAILLSDILRVNTEITKAPLSASMIKRYDEHHQDLTLLKALVRQQLPEKYKEIFFDQSKNGYAGYIDGGASQEEFYKFIKPILEKMDGTEELLVKLNREDLLRKQRTFDNGSIPHQIHLGELHAILRRQEDFYPFLKDNREKIEKILTFRIPYYVGPLARGNSRFAWMTRKSEETITPWNFEEVVDKGASAQSFIERMTNFDKNLPNEKVLPKHSLLYEYFTVYNELTKVKYVTEGMRKPAFLSGEQKKAIVDLLFKTNRKVTVKQLKEDYFKKIECFDSVEISGVEDRFNASLGTYHDLLKIIKDKDFLDNEENEDILEDIVLTLTLFEDREMIEERLKTYAHLFDDKVMKQLKRRRYTGWGRLSRKLINGIRDKQSGKTILDFLKSDGFANRNFMQLIHDDSLTFKEDIQKAQVSGQGDSLHEHIANLAGSPAIKKGILQTVKVVDELVKVMGRHKPENIVIEMARENQTTQKGQKNSRERMKRIEEGIKELGSQILKEHPVENTQLQNEKLYLYYLQNGRDMYVDQELDINRLSDYDVDHIVPQSFLKDDSIDNKVLTRSDKARGKSDNVPSEEVVKKMKNYWRQLLNAKLITQRKFDNLTKAERGGLSELDKAGFIKRQLVETRQITKHVAQILDSRMNTKYDENDKLIREVKVITLKSKLVSDFRKDFQFYKVREINNYHHAHDAYLNAVVGTALIKKYPKLESEFVYGDYKVYDVRKMIAKSEQEIGKATAKYFFYSNIMNFFKTEITLANGEIRKRPLIETNGETGEIVWDKGRDFATVRKVLSMPQVNIVKKTEVQTGGFSKESILPKRNSDKLIARKKDWDPKKYGGFDSPTVAYSVLVVAKVEKGKSKKLKSVKELLGITIMERSSFEKNPIDFLEAKGYKEVKKDLIIKLPKYSLFELENGRKRMLASAGELQKGNELALPSKYVNFLYLASHYEKLKGSPEDNEQKQLFVEQHKHYLDEIIEQISEFSKRVILADANLDKVLSAYNKHRDKPIREQAENIIHLFTLTNLGAPAAFKYFDTTIDRKRYTSTKEVLDATLIHQSITGLYETRIDLSQLGGDGGPAPGGSGSSGGTVSLQDEHRLFDIPVTTSLPDVWLQDFPQAWAETGGLGRAKCQAPIIIDLKPTAVPVSIKQYPMSLEAHMGIRQHIIKFLELGVLRPCRSPWNTPLLPVKKPGTQDYRPVQDLREINKRTVDIHPTVPNPYNLLSTLKPDYSWYTVLDLKDAFFCLPLAPQSQELFAFEWKDPERGISGQLTWTRLPQGFKNSPTLFNEALHRDLTDFRTQHPEVTLLQYVDDLLLAAPTKKACTQGTRHLLQELGEKGYRASAKKAQICQTKVTYLGYILSEGKRWLTPGRIETVARIPPPRNPREVREFLGTAGFCRLWIPGFAELAAPLYALTKPSTPFTWQTEHQLAFEALKKALLSAPALGLPDTSKPFTLFLDERQGIAKGVLTQKLGPWKRPVAYLSKKLDPVAAGWPPCLRIMAATAMLVKDSAKLTLGQPLTVITPHTLEAIVRQPPDRWITNARLTHYQALLLDTDRVQFGPPVTLNPATLLPVPENQPSPHDCRQVLAETHGTREDLKDQELPDADHTWYTDGSSYLDSGTRRAGAAVVDGHNTIWAQSLPPGTSAQKAELIALTKALELSKGKKANIYTDSRYAFATAHTHGSIYERRGWLTSEGKEIKNKAEIIALLKALFLPQEVAIIHCPGHQKGQDPVAVGNRQADRVARQAAMAEVLTLATEPDNTSHITAGKRTADGSEFEKRTADGSEFESPKKKAKVE

SEQ ID NO: 1600 - protein, 2006 aa, synthetic construct
MPAAKRVKLDGGDKKYSIGLDIGTNSVGWAVITDEYKVPSKKFKVLGNTDRHSIKKNLIGALLFDSGETAEATRLKRTARRRYTRRKNRICYLQEIFSNEMAKVDDSFFHRLEESFLVEEDKKHERHPIFGNIVDEVAYHEKYPTIYHLRKKLVDSTDKADLRLIYLALAHMIKFRGHFLIEGDLNPDNSDVDKLFIQLVQTYNQLFEENPINASGVDAKAILSARLSKSRRLENLIAQLPGEKKNGLFGNLIALSLGLTPNFKSNFDLAEDAKLQLSKDTYDDDLDNLLAQIGDQYADLFLAAKNLSDAILLSDILRVNTEITKAPLSASMIKRYDEHHQDLTLLKALVRQQLPEKYKEIFFDQSKNGYAGYIDGGASQEEFYKFIKPILEKMDGTEELLVKLNREDLLRKQRTFDNGSIPHQIHLGELHAILRRQEDFYPFLKDNREKIEKILTFRIPYYVGPLARGNSRFAWMTRKSEETITPWNFEEVVDKGASAQSFIERMTNFDKNLPNEKVLPKHSLLYEYFTVYNELTKVKYVTEGMRKPAFLSGEQKKAIVDLLFKTNRKVTVKQLKEDYFKKIECFDSVEISGVEDRFNASLGTYHDLLKIIKDKDFLDNEENEDILEDIVLTLTLFEDREMIEERLKTYAHLFDDKVMKQLKRRRYTGWGRLSRKLINGIRDKQSGKTILDFLKSDGFANRNFMQLIHDDSLTFKEDIQKAQVSGQGDSLHEHIANLAGSPAIKKGILQTVKVVDELVKVMGRHKPENIVIEMARENQTTQKGQKNSRERMKRIEEGIKELGSQILKEHPVENTQLQNEKLYLYYLQNGRDMYVDQELDINRLSDYDVDHIVPQSFLKDDSIDNKVLTRSDKARGKSDNVPSEEVVKKMKNYWRQLLNAKLITQRKFDNLTKAERGGLSELDKAGFIKRQLVETRQITKHVAQILDSRMNTKYDENDKLIREVKVITLKSKLVSDFRKDFQFYKVREINNYHHAHDAYLNAVVGTALIKKYPKLESEFVYGDYKVYDVRKMIAKSEQEIGKATAKYFFYSNIMNFFKTEITLANGEIRKRPLIETNGETGEIVWDKGRDFATVRKVLSMPQVNIVKKTEVQTGGFSKESILPKRNSDKLIARKKDWDPKKYGGFDSPTVAYSVLVVAKVEKGKSKKLKSVKELLGITIMERSSFEKNPIDFLEAKGYKEVKKDLIIKLPKYSLFELENGRKRMLASAGELQKGNELALPSKYVNFLYLASHYEKLKGSPEDNEQKQLFVEQHKHYLDEIIEQISEFSKRVILADANLDKVLSAYNKHRDKPIREQAENIIHLFTLTNLGAPAAFKYFDTTIDRKRYTSTKEVLDATLIHQSITGLYETRIDLSQLGGDGGEAAAKGGGPAPGGPLGTSDSPVTHADPIDWKSEEPVWVDQWPLTQEKLSAAQQLVQEQLRLGHIEPSTSAWNSPIFVIKKKSGKWRLLQDLRKVNETMMHMGALQPGLPTPSPIPDKSYIIVIDLKDCFYTIPLAPQDCKRFAFSLPSVNFKEPMQRYQWRVLPQGMTNSPTLCQKFVATAIAPVRQRFPQLYLVHYMDDILLAHTDEHLLYQAFSILKQHLSLNGLVIADEKIQTHFPYNYLGFSLYPRVYNTQLVKLQTDHLKTLNDFQKLLGDINWIRPYLKLPTYTLQPLFDILKGDSDPASPRTLSLEGRTALQSIEEAIRQQQITYCDYQRSWGLYILPTPRAPTGVLYQDKPLRWIYLSATPTKHLLPYYELVAKIIAKGRHEAIQYFGMEPPFICVPYALEQQDWLFQFSDNWSIAFANYPGQITHHYPSDKLLQFASSHAFIFPKIVRRQPIPEATLIFTDGSSNGTAALIINHQTYYAQTSFSSAQVVELFAVHQALLTVPTSFNLFTDSSYVVGALQMIETVPIIGTTSPEVLNLFTLIQQVLHCRQHPCFFGHIRAHSTLPGALVQGNHTADVLTKQVFFQSAGKRTADGSEFEKRTADGSEFESPKKKAKVE

SEQ ID NO: 1601 - protein, 2006 aa, synthetic construct
MPAAKRVKLDGGDKKYSIGLDIGTNSVGWAVITDEYKVPSKKFKVLGNTDRHSIKKNLIGALLFDSGETAEATRLKRTARRRYTRRKNRICYLQEIFSNEMAKVDDSFFHRLEESFLVEEDKKHERHPIFGNIVDEVAYHEKYPTIYHLRKKLVDSTDKADLRLIYLALAHMIKFRGHFLIEGDLNPDNSDVDKLFIQLVQTYNQLFEENPINASGVDAKAILSARLSKSRRLENLIAQLPGEKKNGLFGNLIALSLGLTPNFKSNFDLAEDAKLQLSKDTYDDDLDNLLAQIGDQYADLFLAAKNLSDAILLSDILRVNTEITKAPLSASMIKRYDEHHQDLTLLKALVRQQLPEKYKEIFFDQSKNGYAGYIDGGASQEEFYKFIKPILEKMDGTEELLVKLNREDLLRKQRTFDNGSIPHQIHLGELHAILRRQEDFYPFLKDNREKIEKILTFRIPYYVGPLARGNSRFAWMTRKSEETITPWNFEEVVDKGASAQSFIERMTNFDKNLPNEKVLPKHSLLYEYFTVYNELTKVKYVTEGMRKPAFLSGEQKKAIVDLLFKTNRKVTVKQLKEDYFKKIECFDSVEISGVEDRFNASLGTYHDLLKIIKDKDFLDNEENEDILEDIVLTLTLFEDREMIEERLKTYAHLFDDKVMKQLKRRRYTGWGRLSRKLINGIRDKQSGKTILDFLKSDGFANRNFMQLIHDDSLTFKEDIQKAQVSGQGDSLHEHIANLAGSPAIKKGILQTVKVVDELVKVMGRHKPENIVIEMARENQTTQKGQKNSRERMKRIEEGIKELGSQILKEHPVENTQLQNEKLYLYYLQNGRDMYVDQELDINRLSDYDVDHIVPQSFLKDDSIDNKVLTRSDKARGKSDNVPSEEVVKKMKNYWRQLLNAKLITQRKFDNLTKAERGGLSELDKAGFIKRQLVETRQITKHVAQILDSRMNTKYDENDKLIREVKVITLKSKLVSDFRKDFQFYKVREINNYHHAHDAYLNAVVGTALIKKYPKLESEFVYGDYKVYDVRKMIAKSEQEIGKATAKYFFYSNIMNFFKTEITLANGEIRKRPLIETNGETGEIVWDKGRDFATVRKVLSMPQVNIVKKTEVQTGGFSKESILPKRNSDKLIARKKDWDPKKYGGFDSPTVAYSVLVVAKVEKGKSKKLKSVKELLGITIMERSSFEKNPIDFLEAKGYKEVKKDLIIKLPKYSLFELENGRKRMLASAGELQKGNELALPSKYVNFLYLASHYEKLKGSPEDNEQKQLFVEQHKHYLDEIIEQISEFSKRVILADANLDKVLSAYNKHRDKPIREQAENIIHLFTLTNLGAPAAFKYFDTTIDRKRYTSTKEVLDATLIHQSITGLYETRIDLSQLGGDGGGGSEAAAKGSSGGPLGTSDSPVTHADPIDWKSEEPVWVDQWPLTQEKLSAAQQLVQEQLRLGHIEPSTSAWNSPIFVIKKKSGKWRLLQDLRKVNETMMHMGALQPGLPTPSPIPDKSYIIVIDLKDCFYTIPLAPQDCKRFAFSLPSVNFKEPMQRYQWRVLPQGMTNSPTLCQKFVATAIAPVRQRFPQLYLVHYMDDILLAHTDEHLLYQAFSILKQHLSLNGLVIADEKIQTHFPYNYLGFSLYPRVYNTQLVKLQTDHLKTLNDFQKLLGDINWIRPYLKLPTYTLQPLFDILKGDSDPASPRTLSLEGRTALQSIEEAIRQQQITYCDYQRSWGLYILPTPRAPTGVLYQDKPLRWIYLSATPTKHLLPYYELVAKIIAKGRHEAIQYFGMEPPFICVPYALEQQDWLFQFSDNWSIAFANYPGQITHHYPSDKLLQFASSHAFIFPKIVRRQPIPEATLIFTDGSSNGTAALIINHQTYYAQTSFSSAQVVELFAVHQALLTVPTSFNLFTDSSYVVGALQMIETVPIIGTTSPEVLNLFTLIQQVLHCRQHPCFFGHIRAHSTLPGALVQGNHTADVLTKQVFFQSAGKRTADGSEFEKRTADGSEFESPKKKAKVE

SEQ ID NO: 1602 - protein, 2013 aa, synthetic construct
MPAAKRVKLDGGDKKYSIGLDIGTNSVGWAVITDEYKVPSKKFKVLGNTDRHSIKKNLIGALLFDSGETAEATRLKRTARRRYTRRKNRICYLQEIFSNEMAKVDDSFFHRLEESFLVEEDKKHERHPIFGNIVDEVAYHEKYPTIYHLRKKLVDSTDKADLRLIYLALAHMIKFRGHFLIEGDLNPDNSDVDKLFIQLVQTYNQLFEENPINASGVDAKAILSARLSKSRRLENLIAQLPGEKKNGLFGNLIALSLGLTPNFKSNFDLAEDAKLQLSKDTYDDDLDNLLAQIGDQYADLFLAAKNLSDAILLSDILRVNTEITKAPLSASMIKRYDEHHQDLTLLKALVRQQLPEKYKEIFFDQSKNGYAGYIDGGASQEEFYKFIKPILEKMDGTEELLVKLNREDLLRKQRTFDNGSIPHQIHLGELHAILRRQEDFYPFLKDNREKIEKILTFRIPYYVGPLARGNSRFAWMTRKSEETITPWNFEEVVDKGASAQSFIERMTNFDKNLPNEKVLPKHSLLYEYFTVYNELTKVKYVTEGMRKPAFLSGEQKKAIVDLLFKTNRKVTVKQLKEDYFKKIECFDSVEISGVEDRFNASLGTYHDLLKIIKDKDFLDNEENEDILEDIVLTLTLFEDREMIEERLKTYAHLFDDKVMKQLKRRRYTGWGRLSRKLINGIRDKQSGKTILDFLKSDGFANRNFMQLIHDDSLTFKEDIQKAQVSGQGDSLHEHIANLAGSPAIKKGILQTVKVVDELVKVMGRHKPENIVIEMARENQTTQKGQKNSRERMKRIEEGIKELGSQILKEHPVENTQLQNEKLYLYYLQNGRDMYVDQELDINRLSDYDVDHIVPQSFLKDDSIDNKVLTRSDKARGKSDNVPSEEVVKKMKNYWRQLLNAKLITQRKFDNLTKAERGGLSELDKAGFIKRQLVETRQITKHVAQILDSRMNTKYDENDKLIREVKVITLKSKLVSDFRKDFQFYKVREINNYHHAHDAYLNAVVGTALIKKYPKLESEFVYGDYKVYDVRKMIAKSEQEIGKATAKYFFYSNIMNFFKTEITLANGEIRKRPLIETNGETGEIVWDKGRDFATVRKVLSMPQVNIVKKTEVQTGGFSKESILPKRNSDKLIARKKDWDPKKYGGFDSPTVAYSVLVVAKVEKGKSKKLKSVKELLGITIMERSSFEKNPIDFLEAKGYKEVKKDLIIKLPKYSLFELENGRKRMLASAGELQKGNELALPSKYVNFLYLASHYEKLKGSPEDNEQKQLFVEQHKHYLDEIIEQISEFSKRVILADANLDKVLSAYNKHRDKPIREQAENIIHLFTLTNLGAPAAFKYFDTTIDRKRYTSTKEVLDATLIHQSITGLYETRIDLSQLGGDGGGSSGSSGSSGSSGSSGSSGGPLGTSDSPVTHADPIDWKSEEPVWVDQWPLTQEKLSAAQQLVQEQLRLGHIEPSTSAWNSPIFVIKKKSGKWRLLQDLRKVNETMMHMGALQPGLPTPSPIPDKSYIIVIDLKDCFYTIPLAPQDCKRFAFSLPSVNFKEPMQRYQWRVLPQGMTNSPTLCQKFVATAIAPVRQRFPQLYLVHYMDDILLAHTDEHLLYQAFSILKQHLSLNGLVIADEKIQTHFPYNYLGFSLYPRVYNTQLVKLQTDHLKTLNDFQKLLGDINWIRPYLKLPTYTLQPLFDILKGDSDPASPRTLSLEGRTALQSIEEAIRQQQITYCDYQRSWGLYILPTPRAPTGVLYQDKPLRWIYLSATPTKHLLPYYELVAKIIAKGRHEAIQYFGMEPPFICVPYALEQQDWLFQFSDNWSIAFANYPGQITHHYPSDKLLQFASSHAFIFPKIVRRQPIPEATLIFTDGSSNGTAALIINHQTYYAQTSFSSAQVVELFAVHQALLTVPTSFNLFTDSSYVVGALQMIETVPIIGTTSPEVLNLFTLIQQVLHCRQHPCFFGHIRAHSTLPGALVQGNHTADVLTKQVFFQSAGKRTADGSEFEKRTADGSEFESPKKKAKVE

SEQ ID NO: 1603 - protein, 2001 aa, synthetic construct
MPAAKRVKLDGGDKKYSIGLDIGTNSVGWAVITDEYKVPSKKFKVLGNTDRHSIKKNLIGALLFDSGETAEATRLKRTARRRYTRRKNRICYLQEIFSNEMAKVDDSFFHRLEESFLVEEDKKHERHPIFGNIVDEVAYHEKYPTIYHLRKKLVDSTDKADLRLIYLALAHMIKFRGHFLIEGDLNPDNSDVDKLFIQLVQTYNQLFEENPINASGVDAKAILSARLSKSRRLENLIAQLPGEKKNGLFGNLIALSLGLTPNFKSNFDLAEDAKLQLSKDTYDDDLDNLLAQIGDQYADLFLAAKNLSDAILLSDILRVNTEITKAPLSASMIKRYDEHHQDLTLLKALVRQQLPEKYKEIFFDQSKNGYAGYIDGGASQEEFYKFIKPILEKMDGTEELLVKLNREDLLRKQRTFDNGSIPHQIHLGELHAILRRQEDFYPFLKDNREKIEKILTFRIPYYVGPLARGNSRFAWMTRKSEETITPWNFEEVVDKGASAQSFIERMTNFDKNLPNEKVLPKHSLLYEYFTVYNELTKVKYVTEGMRKPAFLSGEQKKAIVDLLFKTNRKVTVKQLKEDYFKKIECFDSVEISGVEDRFNASLGTYHDLLKIIKDKDFLDNEENEDILEDIVLTLTLFEDREMIEERLKTYAHLFDDKVMKQLKRRRYTGWGRLSRKLINGIRDKQSGKTILDFLKSDGFANRNFMQLIHDDSLTFKEDIQKAQVSGQGDSLHEHIANLAGSPAIKKGILQTVKVVDELVKVMGRHKPENIVIEMARENQTTQKGQKNSRERMKRIEEGIKELGSQILKEHPVENTQLQNEKLYLYYLQNGRDMYVDQELDINRLSDYDVDHIVPQSFLKDDSIDNKVLTRSDKARGKSDNVPSEEVVKKMKNYWRQLLNAKLITQRKFDNLTKAERGGLSELDKAGFIKRQLVETRQITKHVAQILDSRMNTKYDENDKLIREVKVITLKSKLVSDFRKDFQFYKVREINNYHHAHDAYLNAVVGTALIKKYPKLESEFVYGDYKVYDVRKMIAKSEQEIGKATAKYFFYSNIMNFFKTEITLANGEIRKRPLIETNGETGEIVWDKGRDFATVRKVLSMPQVNIVKKTEVQTGGFSKESILPKRNSDKLIARKKDWDPKKYGGFDSPTVAYSVLVVAKVEKGKSKKLKSVKELLGITIMERSSFEKNPIDFLEAKGYKEVKKDLIIKLPKYSLFELENGRKRMLASAGELQKGNELALPSKYVNFLYLASHYEKLKGSPEDNEQKQLFVEQHKHYLDEIIEQISEFSKRVILADANLDKVLSAYNKHRDKPIREQAENIIHLFTLTNLGAPAAFKYFDTTIDRKRYTSTKEVLDATLIHQSITGLYETRIDLSQLGGDGGGSSGSSGGPLGTSDSPVTHADPIDWKSEEPVWVDQWPLTQEKLSAAQQLVQEQLRLGHIEPSTSAWNSPIFVIKKKSGKWRLLQDLRKVNETMMHMGALQPGLPTPSPIPDKSYIIVIDLKDCFYTIPLAPQDCKRFAFSLPSVNFKEPMQRYQWRVLPQGMTNSPTLCQKFVATAIAPVRQRFPQLYLVHYMDDILLAHTDEHLLYQAFSILKQHLSLNGLVIADEKIQTHFPYNYLGFSLYPRVYNTQLVKLQTDHLKTLNDFQKLLGDINWIRPYLKLPTYTLQPLFDILKGDSDPASPRTLSLEGRTALQSIEEAIRQQQITYCDYQRSWGLYILPTPRAPTGVLYQDKPLRWIYLSATPTKHLLPYYELVAKIIAKGRHEAIQYFGMEPPFICVPYALEQQDWLFQFSDNWSIAFANYPGQITHHYPSDKLLQFASSHAFIFPKIVRRQPIPEATLIFTDGSSNGTAALIINHQTYYAQTSFSSAQVVELFAVHQALLTVPTSFNLFTDSSYVVGALQMIETVPIIGTTSPEVLNLFTLIQQVLHCRQHPCFFGHIRAHSTLPGALVQGNHTADVLTKQVFFQSAGKRTADGSEFEKRTADGSEFESPKKKAKVE

SEQ ID NO: 1604 - protein, 2216 aa, synthetic construct
MPAAKRVKLDGGDKKYSIGLDIGTNSVGWAVITDEYKVPSKKFKVLGNTDRHSIKKNLIGALLFDSGETAEATRLKRTARRRYTRRKNRICYLQEIFSNEMAKVDDSFFHRLEESFLVEEDKKHERHPIFGNIVDEVAYHEKYPTIYHLRKKLVDSTDKADLRLIYLALAHMIKFRGHFLIEGDLNPDNSDVDKLFIQLVQTYNQLFEENPINASGVDAKAILSARLSKSRRLENLIAQLPGEKKNGLFGNLIALSLGLTPNFKSNFDLAEDAKLQLSKDTYDDDLDNLLAQIGDQYADLFLAAKNLSDAILLSDILRVNTEITKAPLSASMIKRYDEHHQDLTLLKALVRQQLPEKYKEIFFDQSKNGYAGYIDGGASQEEFYKFIKPILEKMDGTEELLVKLNREDLLRKQRTFDNGSIPHQIHLGELHAILRRQEDFYPFLKDNREKIEKILTFRIPYYVGPLARGNSRFAWMTRKSEETITPWNFEEVVDKGASAQSFIERMTNFDKNLPNEKVLPKHSLLYEYFTVYNELTKVKYVTEGMRKPAFLSGEQKKAIVDLLFKTNRKVTVKQLKEDYFKKIECFDSVEISGVEDRFNASLGTYHDLLKIIKDKDFLDNEENEDILEDIVLTLTLFEDREMIEERLKTYAHLFDDKVMKQLKRRRYTGWGRLSRKLINGIRDKQSGKTILDFLKSDGFANRNFMQLIHDDSLTFKEDIQKAQVSGQGDSLHEHIANLAGSPAIKKGILQTVKVVDELVKVMGRHKPENIVIEMARENQTTQKGQKNSRERMKRIEEGIKELGSQILKEHPVENTQLQNEKLYLYYLQNGRDMYVDQELDINRLSDYDVDHIVPQSFLKDDSIDNKVLTRSDKARGKSDNVPSEEVVKKMKNYWRQLLNAKLITQRKFDNLTKAERGGLSELDKAGFIKRQLVETRQITKHVAQILDSRMNTKYDENDKLIREVKVITLKSKLVSDFRKDFQFYKVREINNYHHAHDAYLNAVVGTALIKKYPKLESEFVYGDYKVYDVRKMIAKSEQEIGKATAKYFFYSNIMNFFKTEITLANGEIRKRPLIETNGETGEIVWDKGRDFATVRKVLSMPQVNIVKKTEVQTGGFSKESILPKRNSDKLIARKKDWDPKKYGGFDSPTVAYSVLVVAKVEKGKSKKLKSVKELLGITIMERSSFEKNPIDFLEAKGYKEVKKDLIIKLPKYSLFELENGRKRMLASAGELQKGNELALPSKYVNFLYLASHYEKLKGSPEDNEQKQLFVEQHKHYLDEIIEQISEFSKRVILADANLDKVLSAYNKHRDKPIREQAENIIHLFTLTNLGAPAAFKYFDTTIDRKRYTSTKEVLDATLIHQSITGLYETRIDLSQLGGDGGPAPGSSGGGGGTLGDQGSRGSDPLPEPRVTLTVEGIPTEFLVNTGAEHSVLTKPMGKMGSKRTVVAGATGSKVYPWTTKRLLKIGQKQVTHSFLVIPECPAPLLGRDLLTKLKAQIQFSTEGPQVTWEDRPAMCLVLNLEEEYRLHEKPVPPSIDPSWLQLFPMVWAEKAGMGLANQVPPVVVELKSDASPVAVRQYPMSKEAREGIRPHIQRFLDLGILVPCQSPWNTPLLPVKKPGTNDYRPVQDLREVNKRVQDIHPTVPNPYNLLSSLPPSHTWYSVLDLKDAFFCLKLHPNSQPLFAFEWRDPEKGNTGQLTWTRLPQGFKNSPTLFDEALHRDLASFRALNPQVVMLQYVDDLLVAAPTYRDCKEGTRRLLQELSKLGYRVSAKKAQLCREEVTYLGYLLKGGKRWLTPARKATVMKIPTPTTPRQVREFLGTAGFCRLWIPGFASLAAPLYPLTREKVPFTWTEAHQEAFGRIKEALLSAPALALPDLTKPFALYVDEKEGVARGVLTQTLGPWRRPVAYLSKKLDPVASGWPTCLKAIAAVALLLKDADKLTLGQNVLVIAPHNLESIVRQPPDRWMTNARMTHYQSLLLNERVSFAPPAILNPATLLPVESDDTPIHICSEILAEETGTRPDLRDQPLPGVPAWYTDGSSFIMDGRRQAGAAIVDNKRTVWASNLPEGTSAQKAELIALTQALRLAEGKSINIYTDSRYAFATAHVHGAIYKQRGLLTSAGKDIKNKEEILALLEAIHLPKRVAIIHCPGHQRGTDPVATGNRKADEAAKQAAQSTRILTETTKNAGKRTADGSEFEKRTADGSEFESPKKKAKVE

SEQ ID NO: 1605 - protein, 2218 aa, synthetic construct
MPAAKRVKLDGGDKKYSIGLDIGTNSVGWAVITDEYKVPSKKFKVLGNTDRHSIKKNLIGALLFDSGETAEATRLKRTARRRYTRRKNRICYLQEIFSNEMAKVDDSFFHRLEESFLVEEDKKHERHPIFGNIVDEVAYHEKYPTIYHLRKKLVDSTDKADLRLIYLALAHMIKFRGHFLIEGDLNPDNSDVDKLFIQLVQTYNQLFEENPINASGVDAKAILSARLSKSRRLENLIAQLPGEKKNGLFGNLIALSLGLTPNFKSNFDLAEDAKLQLSKDTYDDDLDNLLAQIGDQYADLFLAAKNLSDAILLSDILRVNTEITKAPLSASMIKRYDEHHQDLTLLKALVRQQLPEKYKEIFFDQSKNGYAGYIDGGASQEEFYKFIKPILEKMDGTEELLVKLNREDLLRKQRTFDNGSIPHQIHLGELHAILRRQEDFYPFLKDNREKIEKILTFRIPYYVGPLARGNSRFAWMTRKSEETITPWNFEEVVDKGASAQSFIERMTNFDKNLPNEKVLPKHSLLYEYFTVYNELTKVKYVTEGMRKPAFLSGEQKKAIVDLLFKTNRKVTVKQLKEDYFKKIECFDSVEISGVEDRFNASLGTYHDLLKIIKDKDFLDNEENEDILEDIVLTLTLFEDREMIEERLKTYAHLFDDKVMKQLKRRRYTGWGRLSRKLINGIRDKQSGKTILDFLKSDGFANRNFMQLIHDDSLTFKEDIQKAQVSGQGDSLHEHIANLAGSPAIKKGILQTVKVVDELVKVMGRHKPENIVIEMARENQTTQKGQKNSRERMKRIEEGIKELGSQILKEHPVENTQLQNEKLYLYYLQNGRDMYVDQELDINRLSDYDVDHIVPQSFLKDDSIDNKVLTRSDKARGKSDNVPSEEVVKKMKNYWRQLLNAKLITQRKFDNLTKAERGGLSELDKAGFIKRQLVETRQITKHVAQILDSRMNTKYDENDKLIREVKVITLKSKLVSDFRKDFQFYKVREINNYHHAHDAYLNAVVGTALIKKYPKLESEFVYGDYKVYDVRKMIAKSEQEIGKATAKYFFYSNIMNFFKTEITLANGEIRKRPLIETNGETGEIVWDKGRDFATVRKVLSMPQVNIVKKTEVQTGGFSKESILPKRNSDKLIARKKDWDPKKYGGFDSPTVAYSVLVVAKVEKGKSKKLKSVKELLGITIMERSSFEKNPIDFLEAKGYKEVKKDLIIKLPKYSLFELENGRKRMLASAGELQKGNELALPSKYVNFLYLASHYEKLKGSPEDNEQKQLFVEQHKHYLDEIIEQISEFSKRVILADANLDKVLSAYNKHRDKPIREQAENIIHLFTLTNLGAPAAFKYFDTTIDRKRYTSTKEVLDATLIHQSITGLYETRIDLSQLGGDGGPAPGGGEAAAKGGTLGDQGSRGSDPLPEPRVTLTVEGIPTEFLVNTGAEHSVLTKPMGKMGSKRTVVAGATGSKVYPWTTKRLLKIGQKQVTHSFLVIPECPAPLLGRDLLTKLKAQIQFSTEGPQVTWEDRPAMCLVLNLEEEYRLHEKPVPPSIDPSWLQLFPMVWAEKAGMGLANQVPPVVVELKSDASPVAVRQYPMSKEAREGIRPHIQRFLDLGILVPCQSPWNTPLLPVKKPGTNDYRPVQDLREVNKRVQDIHPTVPNPYNLLSSLPPSHTWYSVLDLKDAFFCLKLHPNSQPLFAFEWRDPEKGNTGQLTWTRLPQGFKNSPTLFDEALHRDLASFRALNPQVVMLQYVDDLLVAAPTYRDCKEGTRRLLQELSKLGYRVSAKKAQLCREEVTYLGYLLKGGKRWLTPARKATVMKIPTPTTPRQVREFLGTAGFCRLWIPGFASLAAPLYPLTREKVPFTWTEAHQEAFGRIKEALLSAPALALPDLTKPFALYVDEKEGVARGVLTQTLGPWRRPVAYLSKKLDPVASGWPTCLKAIAAVALLLKDADKLTLGQNVLVIAPHNLESIVRQPPDRWMTNARMTHYQSLLLNERVSFAPPAILNPATLLPVESDDTPIHICSEILAEETGTRPDLRDQPLPGVPAWYTDGSSFIMDGRRQAGAAIVDNKRTVWASNLPEGTSAQKAELIALTQALRLAEGKSINIYTDSRYAFATAHVHGAIYKQRGLLTSAGKDIKNKEEILALLEAIHLPKRVAIIHCPGHQRGTDPVATGNRKADEAAKQAAQSTRILTETTKNAGKRTADGSEFEKRTADGSEFESPKKKAKVE

SEQ ID NO: 1606 - protein, 2218 aa, synthetic construct
MPAAKRVKLDGGDKKYSIGLDIGTNSVGWAVITDEYKVPSKKFKVLGNTDRHSIKKNLIGALLFDSGETAEATRLKRTARRRYTRRKNRICYLQEIFSNEMAKVDDSFFHRLEESFLVEEDKKHERHPIFGNIVDEVAYHEKYPTIYHLRKKLVDSTDKADLRLIYLALAHMIKFRGHFLIEGDLNPDNSDVDKLFIQLVQTYNQLFEENPINASGVDAKAILSARLSKSRRLENLIAQLPGEKKNGLFGNLIALSLGLTPNFKSNFDLAEDAKLQLSKDTYDDDLDNLLAQIGDQYADLFLAAKNLSDAILLSDILRVNTEITKAPLSASMIKRYDEHHQDLTLLKALVRQQLPEKYKEIFFDQSKNGYAGYIDGGASQEEFYKFIKPILEKMDGTEELLVKLNREDLLRKQRTFDNGSIPHQIHLGELHAILRRQEDFYPFLKDNREKIEKILTFRIPYYVGPLARGNSRFAWMTRKSEETITPWNFEEVVDKGASAQSFIERMTNFDKNLPNEKVLPKHSLLYEYFTVYNELTKVKYVTEGMRKPAFLSGEQKKAIVDLLFKTNRKVTVKQLKEDYFKKIECFDSVEISGVEDRFNASLGTYHDLLKIIKDKDFLDNEENEDILEDIVLTLTLFEDREMIEERLKTYAHLFDDKVMKQLKRRRYTGWGRLSRKLINGIRDKQSGKTILDFLKSDGFANRNFMQLIHDDSLTFKEDIQKAQVSGQGDSLHEHIANLAGSPAIKKGILQTVKVVDELVKVMGRHKPENIVIEMARENQTTQKGQKNSRERMKRIEEGIKELGSQILKEHPVENTQLQNEKLYLYYLQNGRDMYVDQELDINRLSDYDVDHIVPQSFLKDDSIDNKVLTRSDKARGKSDNVPSEEVVKKMKNYWRQLLNAKLITQRKFDNLTKAERGGLSELDKAGFIKRQLVETRQITKHVAQILDSRMNTKYDENDKLIREVKVITLKSKLVSDFRKDFQFYKVREINNYHHAHDAYLNAVVGTALIKKYPKLESEFVYGDYKVYDVRKMIAKSEQEIGKATAKYFFYSNIMNFFKTEITLANGEIRKRPLIETNGETGEIVWDKGRDFATVRKVLSMPQVNIVKKTEVQTGGFSKESILPKRNSDKLIARKKDWDPKKYGGFDSPTVAYSVLVVAKVEKGKSKKLKSVKELLGITIMERSSFEKNPIDFLEAKGYKEVKKDLIIKLPKYSLFELENGRKRMLASAGELQKGNELALPSKYVNFLYLASHYEKLKGSPEDNEQKQLFVEQHKHYLDEIIEQISEFSKRVILADANLDKVLSAYNKHRDKPIREQAENIIHLFTLTNLGAPAAFKYFDTTIDRKRYTSTKEVLDATLIHQSITGLYETRIDLSQLGGDGGGGGGSSEAAAKGGTLGDQGSRGSDPLPEPRVTLTVEGIPTEFLVNTGAEHSVLTKPMGKMGSKRTVVAGATGSKVYPWTTKRLLKIGQKQVTHSFLVIPECPAPLLGRDLLTKLKAQIQFSTEGPQVTWEDRPAMCLVLNLEEEYRLHEKPVPPSIDPSWLQLFPMVWAEKAGMGLANQVPPVVVELKSDASPVAVRQYPMSKEAREGIRPHIQRFLDLGILVPCQSPWNTPLLPVKKPGTNDYRPVQDLREVNKRVQDIHPTVPNPYNLLSSLPPSHTWYSVLDLKDAFFCLKLHPNSQPLFAFEWRDPEKGNTGQLTWTRLPQGFKNSPTLFDEALHRDLASFRALNPQVVMLQYVDDLLVAAPTYRDCKEGTRRLLQELSKLGYRVSAKKAQLCREEVTYLGYLLKGGKRWLTPARKATVMKIPTPTTPRQVREFLGTAGFCRLWIPGFASLAAPLYPLTREKVPFTWTEAHQEAFGRIKEALLSAPALALPDLTKPFALYVDEKEGVARGVLTQTLGPWRRPVAYLSKKLDPVASGWPTCLKAIAAVALLLKDADKLTLGQNVLVIAPHNLESIVRQPPDRWMTNARMTHYQSLLLNERVSFAPPAILNPATLLPVESDDTPIHICSEILAEETGTRPDLRDQPLPGVPAWYTDGSSFIMDGRRQAGAAIVDNKRTVWASNLPEGTSAQKAELIALTQALRLAEGKSINIYTDSRYAFATAHVHGAIYKQRGLLTSAGKDIKNKEEILALLEAIHLPKRVAIIHCPGHQRGTDPVATGNRKADEAAKQAAQSTRILTETTKNAGKRTADGSEFEKRTADGSEFESPKKKAKVE

SEQ ID NO: 1607 - protein, 2213 aa, synthetic construct
MPAAKRVKLDGGDKKYSIGLDIGTNSVGWAVITDEYKVPSKKFKVLGNTDRHSIKKNLIGALLFDSGETAEATRLKRTARRRYTRRKNRICYLQEIFSNEMAKVDDSFFHRLEESFLVEEDKKHERHPIFGNIVDEVAYHEKYPTIYHLRKKLVDSTDKADLRLIYLALAHMIKFRGHFLIEGDLNPDNSDVDKLFIQLVQTYNQLFEENPINASGVDAKAILSARLSKSRRLENLIAQLPGEKKNGLFGNLIALSLGLTPNFKSNFDLAEDAKLQLSKDTYDDDLDNLLAQIGDQYADLFLAAKNLSDAILLSDILRVNTEITKAPLSASMIKRYDEHHQDLTLLKALVRQQLPEKYKEIFFDQSKNGYAGYIDGGASQEEFYKFIKPILEKMDGTEELLVKLNREDLLRKQRTFDNGSIPHQIHLGELHAILRRQEDFYPFLKDNREKIEKILTFRIPYYVGPLARGNSRFAWMTRKSEETITPWNFEEVVDKGASAQSFIERMTNFDKNLPNEKVLPKHSLLYEYFTVYNELTKVKYVTEGMRKPAFLSGEQKKAIVDLLFKTNRKVTVKQLKEDYFKKIECFDSVEISGVEDRFNASLGTYHDLLKIIKDKDFLDNEENEDILEDIVLTLTLFEDREMIEERLKTYAHLFDDKVMKQLKRRRYTGWGRLSRKLINGIRDKQSGKTILDFLKSDGFANRNFMQLIHDDSLTFKEDIQKAQVSGQGDSLHEHIANLAGSPAIKKGILQTVKVVDELVKVMGRHKPENIVIEMARENQTTQKGQKNSRERMKRIEEGIKELGSQILKEHPVENTQLQNEKLYLYYLQNGRDMYVDQELDINRLSDYDVDHIVPQSFLKDDSIDNKVLTRSDKARGKSDNVPSEEVVKKMKNYWRQLLNAKLITQRKFDNLTKAERGGLSELDKAGFIKRQLVETRQITKHVAQILDSRMNTKYDENDKLIREVKVITLKSKLVSDFRKDFQFYKVREINNYHHAHDAYLNAVVGTALIKKYPKLESEFVYGDYKVYDVRKMIAKSEQEIGKATAKYFFYSNIMNFFKTEITLANGEIRKRPLIETNGETGEIVWDKGRDFATVRKVLSMPQVNIVKKTEVQTGGFSKESILPKRNSDKLIARKKDWDPKKYGGFDSPTVAYSVLVVAKVEKGKSKKLKSVKELLGITIMERSSFEKNPIDFLEAKGYKEVKKDLIIKLPKYSLFELENGRKRMLASAGELQKGNELALPSKYVNFLYLASHYEKLKGSPEDNEQKQLFVEQHKHYLDEIIEQISEFSKRVILADANLDKVLSAYNKHRDKPIREQAENIIHLFTLTNLGAPAAFKYFDTTIDRKRYTSTKEVLDATLIHQSITGLYETRIDLSQLGGDGGGGSPAPGGTLGDQGSRGSDPLPEPRVTLTVEGIPTEFLVNTGAEHSVLTKPMGKMGSKRTVVAGATGSKVYPWTTKRLLKIGQKQVTHSFLVIPECPAPLLGRDLLTKLKAQIQFSTEGPQVTWEDRPAMCLVLNLEEEYRLHEKPVPPSIDPSWLQLFPMVWAEKAGMGLANQVPPVVVELKSDASPVAVRQYPMSKEAREGIRPHIQRFLDLGILVPCQSPWNTPLLPVKKPGTNDYRPVQDLREVNKRVQDIHPTVPNPYNLLSSLPPSHTWYSVLDLKDAFFCLKLHPNSQPLFAFEWRDPEKGNTGQLTWTRLPQGFKNSPTLFDEALHRDLASFRALNPQVVMLQYVDDLLVAAPTYRDCKEGTRRLLQELSKLGYRVSAKKAQLCREEVTYLGYLLKGGKRWLTPARKATVMKIPTPTTPRQVREFLGTAGFCRLWIPGFASLAAPLYPLTREKVPFTWTEAHQEAFGRIKEALLSAPALALPDLTKPFALYVDEKEGVARGVLTQTLGPWRRPVAYLSKKLDPVASGWPTCLKAIAAVALLLKDADKLTLGQNVLVIAPHNLESIVRQPPDRWMTNARMTHYQSLLLNERVSFAPPAILNPATLLPVESDDTPIHICSEILAEETGTRPDLRDQPLPGVPAWYTDGSSFIMDGRRQAGAAIVDNKRTVWASNLPEGTSAQKAELIALTQALRLAEGKSINIYTDSRYAFATAHVHGAIYKQRGLLTSAGKDIKNKEEILALLEAIHLPKRVAIIHCPGHQRGTDPVATGNRKADEAAKQAAQSTRILTETTKNAGKRTADGSEFEKRTADGSEFESPKKKAKVE

SEQ ID NO: 1608 - protein, 2216 aa, synthetic construct
MPAAKRVKLDGGDKKYSIGLDIGTNSVGWAVITDEYKVPSKKFKVLGNTDRHSIKKNLIGALLFDSGETAEATRLKRTARRRYTRRKNRICYLQEIFSNEMAKVDDSFFHRLEESFLVEEDKKHERHPIFGNIVDEVAYHEKYPTIYHLRKKLVDSTDKADLRLIYLALAHMIKFRGHFLIEGDLNPDNSDVDKLFIQLVQTYNQLFEENPINASGVDAKAILSARLSKSRRLENLIAQLPGEKKNGLFGNLIALSLGLTPNFKSNFDLAEDAKLQLSKDTYDDDLDNLLAQIGDQYADLFLAAKNLSDAILLSDILRVNTEITKAPLSASMIKRYDEHHQDLTLLKALVRQQLPEKYKEIFFDQSKNGYAGYIDGGASQEEFYKFIKPILEKMDGTEELLVKLNREDLLRKQRTFDNGSIPHQIHLGELHAILRRQEDFYPFLKDNREKIEKILTFRIPYYVGPLARGNSRFAWMTRKSEETITPWNFEEVVDKGASAQSFIERMTNFDKNLPNEKVLPKHSLLYEYFTVYNELTKVKYVTEGMRKPAFLSGEQKKAIVDLLFKTNRKVTVKQLKEDYFKKIECFDSVEISGVEDRFNASLGTYHDLLKIIKDKDFLDNEENEDILEDIVLTLTLFEDREMIEERLKTYAHLFDDKVMKQLKRRRYTGWGRLSRKLINGIRDKQSGKTILDFLKSDGFANRNFMQLIHDDSLTFKEDIQKAQVSGQGDSLHEHIANLAGSPAIKKGILQTVKVVDELVKVMGRHKPENIVIEMARENQTTQKGQKNSRERMKRIEEGIKELGSQILKEHPVENTQLQNEKLYLYYLQNGRDMYVDQELDINRLSDYDVDHIVPQSFLKDDSIDNKVLTRSDKARGKSDNVPSEEVVKKMKNYWRQLLNAKLITQRKFDNLTKAERGGLSELDKAGFIKRQLVETRQITKHVAQILDSRMNTKYDENDKLIREVKVITLKSKLVSDFRKDFQFYKVREINNYHHAHDAYLNAVVGTALIKKYPKLESEFVYGDYKVYDVRKMIAKSEQEIGKATAKYFFYSNIMNFFKTEITLANGEIRKRPLIETNGETGEIVWDKGRDFATVRKVLSMPQVNIVKKTEVQTGGFSKESILPKRNSDKLIARKKDWDPKKYGGFDSPTVAYSVLVVAKVEKGKSKKLKSVKELLGITIMERSSFEKNPIDFLEAKGYKEVKKDLIIKLPKYSLFELENGRKRMLASAGELQKGNELALPSKYVNFLYLASHYEKLKGSPEDNEQKQLFVEQHKHYLDEIIEQISEFSKRVILADANLDKVLSAYNKHRDKPIREQAENIIHLFTLTNLGAPAAFKYFDTTIDRKRYTSTKEVLDATLIHQSITGLYETRIDLSQLGGDGGGGSGGGGSSGGTLGDQGSRGSDPLPEPRVTLTVEGIPTEFLVNTGAEHSVLTKPMGKMGSKRTVVAGATGSKVYPWTTKRLLKIGQKQVTHSFLVIPECPAPLLGRDLLTKLKAQIQFSTEGPQVTWEDRPAMCLVLNLEEEYRLHEKPVPPSIDPSWLQLFPMVWAEKAGMGLANQVPPVVVELKSDASPVAVRQYPMSKEAREGIRPHIQRFLDLGILVPCQSPWNTPLLPVKKPGTNDYRPVQDLREVNKRVQDIHPTVPNPYNLLSSLPPSHTWYSVLDLKDAFFCLKLHPNSQPLFAFEWRDPEKGNTGQLTWTRLPQGFKNSPTLFDEALHRDLASFRALNPQVVMLQYVDDLLVAAPTYRDCKEGTRRLLQELSKLGYRVSAKKAQLCREEVTYLGYLLKGGKRWLTPARKATVMKIPTPTTPRQVREFLGTAGFCRLWIPGFASLAAPLYPLTREKVPFTWTEAHQEAFGRIKEALLSAPALALPDLTKPFALYVDEKEGVARGVLTQTLGPWRRPVAYLSKKLDPVASGWPTCLKAIAAVALLLKDADKLTLGQNVLVIAPHNLESIVRQPPDRWMTNARMTHYQSLLLNERVSFAPPAILNPATLLPVESDDTPIHICSEILAEETGTRPDLRDQPLPGVPAWYTDGSSFIMDGRRQAGAAIVDNKRTVWASNLPEGTSAQKAELIALTQALRLAEGKSINIYTDSRYAFATAHVHGAIYKQRGLLTSAGKDIKNKEEILALLEAIHLPKRVAIIHCPGHQRGTDPVATGNRKADEAAKQAAQSTRILTETTKNAGKRTADGSEFEKRTADGSEFESPKKKAKVE

SEQ ID NO: 1609 - protein, 2220 aa, synthetic construct
MPAAKRVKLDGGDKKYSIGLDIGTNSVGWAVITDEYKVPSKKFKVLGNTDRHSIKKNLIGALLFDSGETAEATRLKRTARRRYTRRKNRICYLQEIFSNEMAKVDDSFFHRLEESFLVEEDKKHERHPIFGNIVDEVAYHEKYPTIYHLRKKLVDSTDKADLRLIYLALAHMIKFRGHFLIEGDLNPDNSDVDKLFIQLVQTYNQLFEENPINASGVDAKAILSARLSKSRRLENLIAQLPGEKKNGLFGNLIALSLGLTPNFKSNFDLAEDAKLQLSKDTYDDDLDNLLAQIGDQYADLFLAAKNLSDAILLSDILRVNTEITKAPLSASMIKRYDEHHQDLTLLKALVRQQLPEKYKEIFFDQSKNGYAGYIDGGASQEEFYKFIKPILEKMDGTEELLVKLNREDLLRKQRTFDNGSIPHQIHLGELHAILRRQEDFYPFLKDNREKIEKILTFRIPYYVGPLARGNSRFAWMTRKSEETITPWNFEEVVDKGASAQSFIERMTNFDKNLPNEKVLPKHSLLYEYFTVYNELTKVKYVTEGMRKPAFLSGEQKKAIVDLLFKTNRKVTVKQLKEDYFKKIECFDSVEISGVEDRFNASLGTYHDLLKIIKDKDFLDNEENEDILEDIVLTLTLFEDREMIEERLKTYAHLFDDKVMKQLKRRRYTGWGRLSRKLINGIRDKQSGKTILDFLKSDGFANRNFMQLIHDDSLTFKEDIQKAQVSGQGDSLHEHIANLAGSPAIKKGILQTVKVVDELVKVMGRHKPENIVIEMARENQTTQKGQKNSRERMKRIEEGIKELGSQILKEHPVENTQLQNEKLYLYYLQNGRDMYVDQELDINRLSDYDVDHIVPQSFLKDDSIDNKVLTRSDKARGKSDNVPSEEVVKKMKNYWRQLLNAKLITQRKFDNLTKAERGGLSELDKAGFIKRQLVETRQITKHVAQILDSRMNTKYDENDKLIREVKVITLKSKLVSDFRKDFQFYKVREINNYHHAHDAYLNAVVGTALIKKYPKLESEFVYGDYKVYDVRKMIAKSEQEIGKATAKYFFYSNIMNFFKTEITLANGEIRKRPLIETNGETGEIVWDKGRDFATVRKVLSMPQVNIVKKTEVQTGGFSKESILPKRNSDKLIARKKDWDPKKYGGFDSPTVAYSVLVVAKVEKGKSKKLKSVKELLGITIMERSSFEKNPIDFLEAKGYKEVKKDLIIKLPKYSLFELENGRKRMLASAGELQKGNELALPSKYVNFLYLASHYEKLKGSPEDNEQKQLFVEQHKHYLDEIIEQISEFSKRVILADANLDKVLSAYNKHRDKPIREQAENIIHLFTLTNLGAPAAFKYFDTTIDRKRYTSTKEVLDATLIHQSITGLYETRIDLSQLGGDGGPAPAPAPAPAPAPGGTLGDQGSRGSDPLPEPRVTLTVEGIPTEFLVNTGAEHSVLTKPMGKMGSKRTVVAGATGSKVYPWTTKRLLKIGQKQVTHSFLVIPECPAPLLGRDLLTKLKAQIQFSTEGPQVTWEDRPAMCLVLNLEEEYRLHEKPVPPSIDPSWLQLFPMVWAEKAGMGLANQVPPVVVELKSDASPVAVRQYPMSKEAREGIRPHIQRFLDLGILVPCQSPWNTPLLPVKKPGTNDYRPVQDLREVNKRVQDIHPTVPNPYNLLSSLPPSHTWYSVLDLKDAFFCLKLHPNSQPLFAFEWRDPEKGNTGQLTWTRLPQGFKNSPTLFDEALHRDLASFRALNPQVVMLQYVDDLLVAAPTYRDCKEGTRRLLQELSKLGYRVSAKKAQLCREEVTYLGYLLKGGKRWLTPARKATVMKIPTPTTPRQVREFLGTAGFCRLWIPGFASLAAPLYPLTREKVPFTWTEAHQEAFGRIKEALLSAPALALPDLTKPFALYVDEKEGVARGVLTQTLGPWRRPVAYLSKKLDPVASGWPTCLKAIAAVALLLKDADKLTLGQNVLVIAPHNLESIVRQPPDRWMTNARMTHYQSLLLNERVSFAPPAILNPATLLPVESDDTPIHICSEILAEETGTRPDLRDQPLPGVPAWYTDGSSFIMDGRRQAGAAIVDNKRTVWASNLPEGTSAQKAELIALTQALRLAEGKSINIYTDSRYAFATAHVHGAIYKQRGLLTSAGKDIKNKEEILALLEAIHLPKRVAIIHCPGHQRGTDPVATGNRKADEAAKQAAQSTRILTETTKNAGKRTADGSEFEKRTADGSEFESPKKKAKVE

SEQ ID NO: 1610 - protein, 2127 aa, synthetic construct
MPAAKRVKLDGGDKKYSIGLDIGTNSVGWAVITDEYKVPSKKFKVLGNTDRHSIKKNLIGALLFDSGETAEATRLKRTARRRYTRRKNRICYLQEIFSNEMAKVDDSFFHRLEESFLVEEDKKHERHPIFGNIVDEVAYHEKYPTIYHLRKKLVDSTDKADLRLIYLALAHMIKFRGHFLIEGDLNPDNSDVDKLFIQLVQTYNQLFEENPINASGVDAKAILSARLSKSRRLENLIAQLPGEKKNGLFGNLIALSLGLTPNFKSNFDLAEDAKLQLSKDTYDDDLDNLLAQIGDQYADLFLAAKNLSDAILLSDILRVNTEITKAPLSASMIKRYDEHHQDLTLLKALVRQQLPEKYKEIFFDQSKNGYAGYIDGGASQEEFYKFIKPILEKMDGTEELLVKLNREDLLRKQRTFDNGSIPHQIHLGELHAILRRQEDFYPFLKDNREKIEKILTFRIPYYVGPLARGNSRFAWMTRKSEETITPWNFEEVVDKGASAQSFIERMTNFDKNLPNEKVLPKHSLLYEYFTVYNELTKVKYVTEGMRKPAFLSGEQKKAIVDLLFKTNRKVTVKQLKEDYFKKIECFDSVEISGVEDRFNASLGTYHDLLKIIKDKDFLDNEENEDILEDIVLTLTLFEDREMIEERLKTYAHLFDDKVMKQLKRRRYTGWGRLSRKLINGIRDKQSGKTILDFLKSDGFANRNFMQLIHDDSLTFKEDIQKAQVSGQGDSLHEHIANLAGSPAIKKGILQTVKVVDELVKVMGRHKPENIVIEMARENQTTQKGQKNSRERMKRIEEGIKELGSQILKEHPVENTQLQNEKLYLYYLQNGRDMYVDQELDINRLSDYDVDHIVPQSFLKDDSIDNKVLTRSDKARGKSDNVPSEEVVKKMKNYWRQLLNAKLITQRKFDNLTKAERGGLSELDKAGFIKRQLVETRQITKHVAQILDSRMNTKYDENDKLIREVKVITLKSKLVSDFRKDFQFYKVREINNYHHAHDAYLNAVVGTALIKKYPKLESEFVYGDYKVYDVRKMIAKSEQEIGKATAKYFFYSNIMNFFKTEITLANGEIRKRPLIETNGETGEIVWDKGRDFATVRKVLSMPQVNIVKKTEVQTGGFSKESILPKRNSDKLIARKKDWDPKKYGGFDSPTVAYSVLVVAKVEKGKSKKLKSVKELLGITIMERSSFEKNPIDFLEAKGYKEVKKDLIIKLPKYSLFELENGRKRMLASAGELQKGNELALPSKYVNFLYLASHYEKLKGSPEDNEQKQLFVEQHKHYLDEIIEQISEFSKRVILADANLDKVLSAYNKHRDKPIREQAENIIHLFTLTNLGAPAAFKYFDTTIDRKRYTSTKEVLDATLIHQSITGLYETRIDLSQLGGDGGEAAAKGGSPAPGGLLGRDLLTKLKAQIQFSTEGPQVTWEDRPAMCLVLNLEEEYRLHEKPVPPSIDPSWLQLFPMVWAEKAGMGLANQVPPVVVELKSDASPVAVRQYPMSKEAREGIRPHIQRFLDLGILVPCQSPWNTPLLPVKKPGTNDYRPVQDLREVNKRVQDIHPTVPNPYNLLSSLPPSHTWYSVLDLKDAFFCLKLHPNSQPLFAFEWRDPEKGNTGQLTWTRLPQGFKNSPTLFDEALHRDLASFRALNPQVVMLQYVDDLLVAAPTYRDCKEGTRRLLQELSKLGYRVSAKKAQLCREEVTYLGYLLKGGKRWLTPARKATVMKIPTPTTPRQVREFLGTAGFCRLWIPGFASLAAPLYPLTREKVPFTWTEAHQEAFGRIKEALLSAPALALPDLTKPFALYVDEKEGVARGVLTQTLGPWRRPVAYLSKKLDPVASGWPTCLKAIAAVALLLKDADKLTLGQNVLVIAPHNLESIVRQPPDRWMTNARMTHYQSLLLNERVSFAPPAILNPATLLPVESDDTPIHICSEILAEETGTRPDLRDQPLPGVPAWYTDGSSFIMDGRRQAGAAIVDNKRTVWASNLPEGTSAQKAELIALTQALRLAEGKSINIYTDSRYAFATAHVHGAIYKQRGLLTSAGKDIKNKEEILALLEAIHLPKRVAIIHCPGHQRGTDPVATGNRKADEAAKQAAQSTRILTETTKNAGKRTADGSEFEKRTADGSEFESPKKKAKVE

SEQ ID NO: 1611 - protein, 2125 aa, synthetic construct
MPAAKRVKLDGGDKKYSIGLDIGTNSVGWAVITDEYKVPSKKFKVLGNTDRHSIKKNLIGALLFDSGETAEATRLKRTARRRYTRRKNRICYLQEIFSNEMAKVDDSFFHRLEESFLVEEDKKHERHPIFGNIVDEVAYHEKYPTIYHLRKKLVDSTDKADLRLIYLALAHMIKFRGHFLIEGDLNPDNSDVDKLFIQLVQTYNQLFEENPINASGVDAKAILSARLSKSRRLENLIAQLPGEKKNGLFGNLIALSLGLTPNFKSNFDLAEDAKLQLSKDTYDDDLDNLLAQIGDQYADLFLAAKNLSDAILLSDILRVNTEITKAPLSASMIKRYDEHHQDLTLLKALVRQQLPEKYKEIFFDQSKNGYAGYIDGGASQEEFYKFIKPILEKMDGTEELLVKLNREDLLRKQRTFDNGSIPHQIHLGELHAILRRQEDFYPFLKDNREKIEKILTFRIPYYVGPLARGNSRFAWMTRKSEETITPWNFEEVVDKGASAQSFIERMTNFDKNLPNEKVLPKHSLLYEYFTVYNELTKVKYVTEGMRKPAFLSGEQKKAIVDLLFKTNRKVTVKQLKEDYFKKIECFDSVEISGVEDRFNASLGTYHDLLKIIKDKDFLDNEENEDILEDIVLTLTLFEDREMIEERLKTYAHLFDDKVMKQLKRRRYTGWGRLSRKLINGIRDKQSGKTILDFLKSDGFANRNFMQLIHDDSLTFKEDIQKAQVSGQGDSLHEHIANLAGSPAIKKGILQTVKVVDELVKVMGRHKPENIVIEMARENQTTQKGQKNSRERMKRIEEGIKELGSQILKEHPVENTQLQNEKLYLYYLQNGRDMYVDQELDINRLSDYDVDHIVPQSFLKDDSIDNKVLTRSDKARGKSDNVPSEEVVKKMKNYWRQLLNAKLITQRKFDNLTKAERGGLSELDKAGFIKRQLVETRQITKHVAQILDSRMNTKYDENDKLIREVKVITLKSKLVSDFRKDFQFYKVREINNYHHAHDAYLNAVVGTALIKKYPKLESEFVYGDYKVYDVRKMIAKSEQEIGKATAKYFFYSNIMNFFKTEITLANGEIRKRPLIETNGETGEIVWDKGRDFATVRKVLSMPQVNIVKKTEVQTGGFSKESILPKRNSDKLIARKKDWDPKKYGGFDSPTVAYSVLVVAKVEKGKSKKLKSVKELLGITIMERSSFEKNPIDFLEAKGYKEVKKDLIIKLPKYSLFELENGRKRMLASAGELQKGNELALPSKYVNFLYLASHYEKLKGSPEDNEQKQLFVEQHKHYLDEIIEQISEFSKRVILADANLDKVLSAYNKHRDKPIREQAENIIHLFTLTNLGAPAAFKYFDTTIDRKRYTSTKEVLDATLIHQSITGLYETRIDLSQLGGDGGGGGGGSGSSGGLLGRDLLTKLKAQIQFSTEGPQVTWEDRPAMCLVLNLEEEYRLHEKPVPPSIDPSWLQLFPMVWAEKAGMGLANQVPPVVVELKSDASPVAVRQYPMSKEAREGIRPHIQRFLDLGILVPCQSPWNTPLLPVKKPGTNDYRPVQDLREVNKRVQDIHPTVPNPYNLLSSLPPSHTWYSVLDLKDAFFCLKLHPNSQPLFAFEWRDPEKGNTGQLTWTRLPQGFKNSPTLFDEALHRDLASFRALNPQVVMLQYVDDLLVAAPTYRDCKEGTRRLLQELSKLGYRVSAKKAQLCREEVTYLGYLLKGGKRWLTPARKATVMKIPTPTTPRQVREFLGTAGFCRLWIPGFASLAAPLYPLTREKVPFTWTEAHQEAFGRIKEALLSAPALALPDLTKPFALYVDEKEGVARGVLTQTLGPWRRPVAYLSKKLDPVASGWPTCLKAIAAVALLLKDADKLTLGQNVLVIAPHNLESIVRQPPDRWMTNARMTHYQSLLLNERVSFAPPAILNPATLLPVESDDTPIHICSEILAEETGTRPDLRDQPLPGVPAWYTDGSSFIMDGRRQAGAAIVDNKRTVWASNLPEGTSAQKAELIALTQALRLAEGKSINIYTDSRYAFATAHVHGAIYKQRGLLTSAGKDIKNKEEILALLEAIHLPKRVAIIHCPGHQRGTDPVATGNRKADEAAKQAAQSTRILTETTKNAGKRTADGSEFEKRTADGSEFESPKKKAKVE

SEQ ID NO: 1612 - protein, 2127 aa, synthetic construct
MPAAKRVKLDGGDKKYSIGLDIGTNSVGWAVITDEYKVPSKKFKVLGNTDRHSIKKNLIGALLFDSGETAEATRLKRTARRRYTRRKNRICYLQEIFSNEMAKVDDSFFHRLEESFLVEEDKKHERHPIFGNIVDEVAYHEKYPTIYHLRKKLVDSTDKADLRLIYLALAHMIKFRGHFLIEGDLNPDNSDVDKLFIQLVQTYNQLFEENPINASGVDAKAILSARLSKSRRLENLIAQLPGEKKNGLFGNLIALSLGLTPNFKSNFDLAEDAKLQLSKDTYDDDLDNLLAQIGDQYADLFLAAKNLSDAILLSDILRVNTEITKAPLSASMIKRYDEHHQDLTLLKALVRQQLPEKYKEIFFDQSKNGYAGYIDGGASQEEFYKFIKPILEKMDGTEELLVKLNREDLLRKQRTFDNGSIPHQIHLGELHAILRRQEDFYPFLKDNREKIEKILTFRIPYYVGPLARGNSRFAWMTRKSEETITPWNFEEVVDKGASAQSFIERMTNFDKNLPNEKVLPKHSLLYEYFTVYNELTKVKYVTEGMRKPAFLSGEQKKAIVDLLFKTNRKVTVKQLKEDYFKKIECFDSVEISGVEDRFNASLGTYHDLLKIIKDKDFLDNEENEDILEDIVLTLTLFEDREMIEERLKTYAHLFDDKVMKQLKRRRYTGWGRLSRKLINGIRDKQSGKTILDFLKSDGFANRNFMQLIHDDSLTFKEDIQKAQVSGQGDSLHEHIANLAGSPAIKKGILQTVKVVDELVKVMGRHKPENIVIEMARENQTTQKGQKNSRERMKRIEEGIKELGSQILKEHPVENTQLQNEKLYLYYLQNGRDMYVDQELDINRLSDYDVDHIVPQSFLKDDSIDNKVLTRSDKARGKSDNVPSEEVVKKMKNYWRQLLNAKLITQRKFDNLTKAERGGLSELDKAGFIKRQLVETRQITKHVAQILDSRMNTKYDENDKLIREVKVITLKSKLVSDFRKDFQFYKVREINNYHHAHDAYLNAVVGTALIKKYPKLESEFVYGDYKVYDVRKMIAKSEQEIGKATAKYFFYSNIMNFFKTEITLANGEIRKRPLIETNGETGEIVWDKGRDFATVRKVLSMPQVNIVKKTEVQTGGFSKESILPKRNSDKLIARKKDWDPKKYGGFDSPTVAYSVLVVAKVEKGKSKKLKSVKELLGITIMERSSFEKNPIDFLEAKGYKEVKKDLIIKLPKYSLFELENGRKRMLASAGELQKGNELALPSKYVNFLYLASHYEKLKGSPEDNEQKQLFVEQHKHYLDEIIEQISEFSKRVILADANLDKVLSAYNKHRDKPIREQAENIIHLFTLTNLGAPAAFKYFDTTIDRKRYTSTKEVLDATLIHQSITGLYETRIDLSQLGGDGGEAAAKGGGPAPGGLLGRDLLTKLKAQIQFSTEGPQVTWEDRPAMCLVLNLEEEYRLHEKPVPPSIDPSWLQLFPMVWAEKAGMGLANQVPPVVVELKSDASPVAVRQYPMSKEAREGIRPHIQRFLDLGILVPCQSPWNTPLLPVKKPGTNDYRPVQDLREVNKRVQDIHPTVPNPYNLLSSLPPSHTWYSVLDLKDAFFCLKLHPNSQPLFAFEWRDPEKGNTGQLTWTRLPQGFKNSPTLFDEALHRDLASFRALNPQVVMLQYVDDLLVAAPTYRDCKEGTRRLLQELSKLGYRVSAKKAQLCREEVTYLGYLLKGGKRWLTPARKATVMKIPTPTTPRQVREFLGTAGFCRLWIPGFASLAAPLYPLTREKVPFTWTEAHQEAFGRIKEALLSAPALALPDLTKPFALYVDEKEGVARGVLTQTLGPWRRPVAYLSKKLDPVASGWPTCLKAIAAVALLLKDADKLTLGQNVLVIAPHNLESIVRQPPDRWMTNARMTHYQSLLLNERVSFAPPAILNPATLLPVESDDTPIHICSEILAEETGTRPDLRDQPLPGVPAWYTDGSSFIMDGRRQAGAAIVDNKRTVWASNLPEGTSAQKAELIALTQALRLAEGKSINIYTDSRYAFATAHVHGAIYKQRGLLTSAGKDIKNKEEILALLEAIHLPKRVAIIHCPGHQRGTDPVATGNRKADEAAKQAAQSTRILTETTKNAGKRTADGSEFEKRTADGSEFESPKKKAKVE

SEQ ID NO: 1613 - protein, 2127 aa, synthetic construct
MPAAKRVKLDGGDKKYSIGLDIGTNSVGWAVITDEYKVPSKKFKVLGNTDRHSIKKNLIGALLFDSGETAEATRLKRTARRRYTRRKNRICYLQEIFSNEMAKVDDSFFHRLEESFLVEEDKKHERHPIFGNIVDEVAYHEKYPTIYHLRKKLVDSTDKADLRLIYLALAHMIKFRGHFLIEGDLNPDNSDVDKLFIQLVQTYNQLFEENPINASGVDAKAILSARLSKSRRLENLIAQLPGEKKNGLFGNLIALSLGLTPNFKSNFDLAEDAKLQLSKDTYDDDLDNLLAQIGDQYADLFLAAKNLSDAILLSDILRVNTEITKAPLSASMIKRYDEHHQDLTLLKALVRQQLPEKYKEIFFDQSKNGYAGYIDGGASQEEFYKFIKPILEKMDGTEELLVKLNREDLLRKQRTFDNGSIPHQIHLGELHAILRRQEDFYPFLKDNREKIEKILTFRIPYYVGPLARGNSRFAWMTRKSEETITPWNFEEVVDKGASAQSFIERMTNFDKNLPNEKVLPKHSLLYEYFTVYNELTKVKYVTEGMRKPAFLSGEQKKAIVDLLFKTNRKVTVKQLKEDYFKKIECFDSVEISGVEDRFNASLGTYHDLLKIIKDKDFLDNEENEDILEDIVLTLTLFEDREMIEERLKTYAHLFDDKVMKQLKRRRYTGWGRLSRKLINGIRDKQSGKTILDFLKSDGFANRNFMQLIHDDSLTFKEDIQKAQVSGQGDSLHEHIANLAGSPAIKKGILQTVKVVDELVKVMGRHKPENIVIEMARENQTTQKGQKNSRERMKRIEEGIKELGSQILKEHPVENTQLQNEKLYLYYLQNGRDMYVDQELDINRLSDYDVDHIVPQSFLKDDSIDNKVLTRSDKARGKSDNVPSEEVVKKMKNYWRQLLNAKLITQRKFDNLTKAERGGLSELDKAGFIKRQLVETRQITKHVAQILDSRMNTKYDENDKLIREVKVITLKSKLVSDFRKDFQFYKVREINNYHHAHDAYLNAVVGTALIKKYPKLESEFVYGDYKVYDVRKMIAKSEQEIGKATAKYFFYSNIMNFFKTEITLANGEIRKRPLIETNGETGEIVWDKGRDFATVRKVLSMPQVNIVKKTEVQTGGFSKESILPKRNSDKLIARKKDWDPKKYGGFDSPTVAYSVLVVAKVEKGKSKKLKSVKELLGITIMERSSFEKNPIDFLEAKGYKEVKKDLIIKLPKYSLFELENGRKRMLASAGELQKGNELALPSKYVNFLYLASHYEKLKGSPEDNEQKQLFVEQHKHYLDEIIEQISEFSKRVILADANLDKVLSAYNKHRDKPIREQAENIIHLFTLTNLGAPAAFKYFDTTIDRKRYTSTKEVLDATLIHQSITGLYETRIDLSQLGGDGGEAAAKPAPGSSGGLLGRDLLTKLKAQIQFSTEGPQVTWEDRPAMCLVLNLEEEYRLHEKPVPPSIDPSWLQLFPMVWAEKAGMGLANQVPPVVVELKSDASPVAVRQYPMSKEAREGIRPHIQRFLDLGILVPCQSPWNTPLLPVKKPGTNDYRPVQDLREVNKRVQDIHPTVPNPYNLLSSLPPSHTWYSVLDLKDAFFCLKLHPNSQPLFAFEWRDPEKGNTGQLTWTRLPQGFKNSPTLFDEALHRDLASFRALNPQVVMLQYVDDLLVAAPTYRDCKEGTRRLLQELSKLGYRVSAKKAQLCREEVTYLGYLLKGGKRWLTPARKATVMKIPTPTTPRQVREFLGTAGFCRLWIPGFASLAAPLYPLTREKVPFTWTEAHQEAFGRIKEALLSAPALALPDLTKPFALYVDEKEGVARGVLTQTLGPWRRPVAYLSKKLDPVASGWPTCLKAIAAVALLLKDADKLTLGQNVLVIAPHNLESIVRQPPDRWMTNARMTHYQSLLLNERVSFAPPAILNPATLLPVESDDTPIHICSEILAEETGTRPDLRDQPLPGVPAWYTDGSSFIMDGRRQAGAAIVDNKRTVWASNLPEGTSAQKAELIALTQALRLAEGKSINIYTDSRYAFATAHVHGAIYKQRGLLTSAGKDIKNKEEILALLEAIHLPKRVAIIHCPGHQRGTDPVATGNRKADEAAKQAAQSTRILTETTKNAGKRTADGSEFEKRTADGSEFESPKKKAKVE

SEQ ID NO: 1614 - protein, 2127 aa, synthetic construct
MPAAKRVKLDGGDKKYSIGLDIGTNSVGWAVITDEYKVPSKKFKVLGNTDRHSIKKNLIGALLFDSGETAEATRLKRTARRRYTRRKNRICYLQEIFSNEMAKVDDSFFHRLEESFLVEEDKKHERHPIFGNIVDEVAYHEKYPTIYHLRKKLVDSTDKADLRLIYLALAHMIKFRGHFLIEGDLNPDNSDVDKLFIQLVQTYNQLFEENPINASGVDAKAILSARLSKSRRLENLIAQLPGEKKNGLFGNLIALSLGLTPNFKSNFDLAEDAKLQLSKDTYDDDLDNLLAQIGDQYADLFLAAKNLSDAILLSDILRVNTEITKAPLSASMIKRYDEHHQDLTLLKALVRQQLPEKYKEIFFDQSKNGYAGYIDGGASQEEFYKFIKPILEKMDGTEELLVKLNREDLLRKQRTFDNGSIPHQIHLGELHAILRRQEDFYPFLKDNREKIEKILTFRIPYYVGPLARGNSRFAWMTRKSEETITPWNFEEVVDKGASAQSFIERMTNFDKNLPNEKVLPKHSLLYEYFTVYNELTKVKYVTEGMRKPAFLSGEQKKAIVDLLFKTNRKVTVKQLKEDYFKKIECFDSVEISGVEDRFNASLGTYHDLLKIIKDKDFLDNEENEDILEDIVLTLTLFEDREMIEERLKTYAHLFDDKVMKQLKRRRYTGWGRLSRKLINGIRDKQSGKTILDFLKSDGFANRNFMQLIHDDSLTFKEDIQKAQVSGQGDSLHEHIANLAGSPAIKKGILQTVKVVDELVKVMGRHKPENIVIEMARENQTTQKGQKNSRERMKRIEEGIKELGSQILKEHPVENTQLQNEKLYLYYLQNGRDMYVDQELDINRLSDYDVDHIVPQSFLKDDSIDNKVLTRSDKARGKSDNVPSEEVVKKMKNYWRQLLNAKLITQRKFDNLTKAERGGLSELDKAGFIKRQLVETRQITKHVAQILDSRMNTKYDENDKLIREVKVITLKSKLVSDFRKDFQFYKVREINNYHHAHDAYLNAVVGTALIKKYPKLESEFVYGDYKVYDVRKMIAKSEQEIGKATAKYFFYSNIMNFFKTEITLANGEIRKRPLIETNGETGEIVWDKGRDFATVRKVLSMPQVNIVKKTEVQTGGFSKESILPKRNSDKLIARKKDWDPKKYGGFDSPTVAYSVLVVAKVEKGKSKKLKSVKELLGITIMERSSFEKNPIDFLEAKGYKEVKKDLIIKLPKYSLFELENGRKRMLASAGELQKGNELALPSKYVNFLYLASHYEKLKGSPEDNEQKQLFVEQHKHYLDEIIEQISEFSKRVILADANLDKVLSAYNKHRDKPIREQAENIIHLFTLTNLGAPAAFKYFDTTIDRKRYTSTKEVLDATLIHQSITGLYETRIDLSQLGGDGGPAPGGSEAAAKGGLLGRDLLTKLKAQIQFSTEGPQVTWEDRPAMCLVLNLEEEYRLHEKPVPPSIDPSWLQLFPMVWAEKAGMGLANQVPPVVVELKSDASPVAVRQYPMSKEAREGIRPHIQRFLDLGILVPCQSPWNTPLLPVKKPGTNDYRPVQDLREVNKRVQDIHPTVPNPYNLLSSLPPSHTWYSVLDLKDAFFCLKLHPNSQPLFAFEWRDPEKGNTGQLTWTRLPQGFKNSPTLFDEALHRDLASFRALNPQVVMLQYVDDLLVAAPTYRDCKEGTRRLLQELSKLGYRVSAKKAQLCREEVTYLGYLLKGGKRWLTPARKATVMKIPTPTTPRQVREFLGTAGFCRLWIPGFASLAAPLYPLTREKVPFTWTEAHQEAFGRIKEALLSAPALALPDLTKPFALYVDEKEGVARGVLTQTLGPWRRPVAYLSKKLDPVASGWPTCLKAIAAVALLLKDADKLTLGQNVLVIAPHNLESIVRQPPDRWMTNARMTHYQSLLLNERVSFAPPAILNPATLLPVESDDTPIHICSEILAEETGTRPDLRDQPLPGVPAWYTDGSSFIMDGRRQAGAAIVDNKRTVWASNLPEGTSAQKAELIALTQALRLAEGKSINIYTDSRYAFATAHVHGAIYKQRGLLTSAGKDIKNKEEILALLEAIHLPKRVAIIHCPGHQRGTDPVATGNRKADEAAKQAAQSTRILTETTKNAGKRTADGSEFEKRTADGSEFESPKKKAKVE

SEQ ID NO: 1615 - protein, 2134 aa, synthetic construct
MPAAKRVKLDGGDKKYSIGLDIGTNSVGWAVITDEYKVPSKKFKVLGNTDRHSIKKNLIGALLFDSGETAEATRLKRTARRRYTRRKNRICYLQEIFSNEMAKVDDSFFHRLEESFLVEEDKKHERHPIFGNIVDEVAYHEKYPTIYHLRKKLVDSTDKADLRLIYLALAHMIKFRGHFLIEGDLNPDNSDVDKLFIQLVQTYNQLFEENPINASGVDAKAILSARLSKSRRLENLIAQLPGEKKNGLFGNLIALSLGLTPNFKSNFDLAEDAKLQLSKDTYDDDLDNLLAQIGDQYADLFLAAKNLSDAILLSDILRVNTEITKAPLSASMIKRYDEHHQDLTLLKALVRQQLPEKYKEIFFDQSKNGYAGYIDGGASQEEFYKFIKPILEKMDGTEELLVKLNREDLLRKQRTFDNGSIPHQIHLGELHAILRRQEDFYPFLKDNREKIEKILTFRIPYYVGPLARGNSRFAWMTRKSEETITPWNFEEVVDKGASAQSFIERMTNFDKNLPNEKVLPKHSLLYEYFTVYNELTKVKYVTEGMRKPAFLSGEQKKAIVDLLFKTNRKVTVKQLKEDYFKKIECFDSVEISGVEDRFNASLGTYHDLLKIIKDKDFLDNEENEDILEDIVLTLTLFEDREMIEERLKTYAHLFDDKVMKQLKRRRYTGWGRLSRKLINGIRDKQSGKTILDFLKSDGFANRNFMQLIHDDSLTFKEDIQKAQVSGQGDSLHEHIANLAGSPAIKKGILQTVKVVDELVKVMGRHKPENIVIEMARENQTTQKGQKNSRERMKRIEEGIKELGSQILKEHPVENTQLQNEKLYLYYLQNGRDMYVDQELDINRLSDYDVDHIVPQSFLKDDSIDNKVLTRSDKARGKSDNVPSEEVVKKMKNYWRQLLNAKLITQRKFDNLTKAERGGLSELDKAGFIKRQLVETRQITKHVAQILDSRMNTKYDENDKLIREVKVITLKSKLVSDFRKDFQFYKVREINNYHHAHDAYLNAVVGTALIKKYPKLESEFVYGDYKVYDVRKMIAKSEQEIGKATAKYFFYSNIMNFFKTEITLANGEIRKRPLIETNGETGEIVWDKGRDFATVRKVLSMPQVNIVKKTEVQTGGFSKESILPKRNSDKLIARKKDWDPKKYGGFDSPTVAYSVLVVAKVEKGKSKKLKSVKELLGITIMERSSFEKNPIDFLEAKGYKEVKKDLIIKLPKYSLFELENGRKRMLASAGELQKGNELALPSKYVNFLYLASHYEKLKGSPEDNEQKQLFVEQHKHYLDEIIEQISEFSKRVILADANLDKVLSAYNKHRDKPIREQAENIIHLFTLTNLGAPAAFKYFDTTIDRKRYTSTKEVLDATLIHQSITGLYETRIDLSQLGGDGGGSSGSSGSSGSSGSSGSSGGLLGRDLLTKLKAQIQFSTEGPQVTWEDRPAMCLVLNLEEEYRLHEKPVPPSIDPSWLQLFPMVWAEKAGMGLANQVPPVVVELKSDASPVAVRQYPMSKEAREGIRPHIQRFLDLGILVPCQSPWNTPLLPVKKPGTNDYRPVQDLREVNKRVQDIHPTVPNPYNLLSSLPPSHTWYSVLDLKDAFFCLKLHPNSQPLFAFEWRDPEKGNTGQLTWTRLPQGFKNSPTLFDEALHRDLASFRALNPQVVMLQYVDDLLVAAPTYRDCKEGTRRLLQELSKLGYRVSAKKAQLCREEVTYLGYLLKGGKRWLTPARKATVMKIPTPTTPRQVREFLGTAGFCRLWIPGFASLAAPLYPLTREKVPFTWTEAHQEAFGRIKEALLSAPALALPDLTKPFALYVDEKEGVARGVLTQTLGPWRRPVAYLSKKLDPVASGWPTCLKAIAAVALLLKDADKLTLGQNVLVIAPHNLESIVRQPPDRWMTNARMTHYQSLLLNERVSFAPPAILNPATLLPVESDDTPIHICSEILAEETGTRPDLRDQPLPGVPAWYTDGSSFIMDGRRQAGAAIVDNKRTVWASNLPEGTSAQKAELIALTQALRLAEGKSINIYTDSRYAFATAHVHGAIYKQRGLLTSAGKDIKNKEEILALLEAIHLPKRVAIIHCPGHQRGTDPVATGNRKADEAAKQAAQSTRILTETTKNAGKRTADGSEFEKRTADGSEFESPKKKAKVE

SEQ ID NO: 1616 - protein, 2123 aa, synthetic construct
MPAAKRVKLDGGDKKYSIGLDIGTNSVGWAVITDEYKVPSKKFKVLGNTDRHSIKKNLIGALLFDSGETAEATRLKRTARRRYTRRKNRICYLQEIFSNEMAKVDDSFFHRLEESFLVEEDKKHERHPIFGNIVDEVAYHEKYPTIYHLRKKLVDSTDKADLRLIYLALAHMIKFRGHFLIEGDLNPDNSDVDKLFIQLVQTYNQLFEENPINASGVDAKAILSARLSKSRRLENLIAQLPGEKKNGLFGNLIALSLGLTPNFKSNFDLAEDAKLQLSKDTYDDDLDNLLAQIGDQYADLFLAAKNLSDAILLSDILRVNTEITKAPLSASMIKRYDEHHQDLTLLKALVRQQLPEKYKEIFFDQSKNGYAGYIDGGASQEEFYKFIKPILEKMDGTEELLVKLNREDLLRKQRTFDNGSIPHQIHLGELHAILRRQEDFYPFLKDNREKIEKILTFRIPYYVGPLARGNSRFAWMTRKSEETITPWNFEEVVDKGASAQSFIERMTNFDKNLPNEKVLPKHSLLYEYFTVYNELTKVKYVTEGMRKPAFLSGEQKKAIVDLLFKTNRKVTVKQLKEDYFKKIECFDSVEISGVEDRFNASLGTYHDLLKIIKDKDFLDNEENEDILEDIVLTLTLFEDREMIEERLKTYAHLFDDKVMKQLKRRRYTGWGRLSRKLINGIRDKQSGKTILDFLKSDGFANRNFMQLIHDDSLTFKEDIQKAQVSGQGDSLHEHIANLAGSPAIKKGILQTVKVVDELVKVMGRHKPENIVIEMARENQTTQKGQKNSRERMKRIEEGIKELGSQILKEHPVENTQLQNEKLYLYYLQNGRDMYVDQELDINRLSDYDVDHIVPQSFLKDDSIDNKVLTRSDKARGKSDNVPSEEVVKKMKNYWRQLLNAKLITQRKFDNLTKAERGGLSELDKAGFIKRQLVETRQITKHVAQILDSRMNTKYDENDKLIREVKVITLKSKLVSDFRKDFQFYKVREINNYHHAHDAYLNAVVGTALIKKYPKLESEFVYGDYKVYDVRKMIAKSEQEIGKATAKYFFYSNIMNFFKTEITLANGEIRKRPLIETNGETGEIVWDKGRDFATVRKVLSMPQVNIVKKTEVQTGGFSKESILPKRNSDKLIARKKDWDPKKYGGFDSPTVAYSVLVVAKVEKGKSKKLKSVKELLGITIMERSSFEKNPIDFLEAKGYKEVKKDLIIKLPKYSLFELENGRKRMLASAGELQKGNELALPSKYVNFLYLASHYEKLKGSPEDNEQKQLFVEQHKHYLDEIIEQISEFSKRVILADANLDKVLSAYNKHRDKPIREQAENIIHLFTLTNLGAPAAFKYFDTTIDRKRYTSTKEVLDATLIHQSITGLYETRIDLSQLGGDGGPAPAPAPGGLLGRDLLTKLKAQIQFSTEGPQVTWEDRPAMCLVLNLEEEYRLHEKPVPPSIDPSWLQLFPMVWAEKAGMGLANQVPPVVVELKSDASPVAVRQYPMSKEAREGIRPHIQRFLDLGILVPCQSPWNTPLLPVKKPGTNDYRPVQDLREVNKRVQDIHPTVPNPYNLLSSLPPSHTWYSVLDLKDAFFCLKLHPNSQPLFAFEWRDPEKGNTGQLTWTRLPQGFKNSPTLFNEALHRDLASFRALNPQVVMLQYVDDLLVAAPTYRDCKEGTRRLLQELSKLGYRVSAKKAQLCREEVTYLGYLLKGGKRWLTPARKATVMKIPTPTTPRQVREFLGTAGFCRLWIPGFASLAAPLYPLTRPKVPFTWTEAHQEAFGRIKEALLSAPALALPDLTKPFALYVDEKEGVARGVLTQTLGPWRRPVAYLSKKLDPVASGWPTCLKAIAAVALLLKDADKLTLGQNVLVIAPHNLESIVRQPPDRWMTNARMTHYQSLLLNERVSFAPPAILNPATLLPVESDDTPIHICSEILAEETGTRPDLRDQPLPGVPAWYTDGSSFIMDGRRQAGAAIVDNKRTVWASNLPEGTSAQKAELIALTQALRLAEGKSINIYTDSRYAFATAHVHGAIYKQRGWLTSAGKDIKNKEEILALLEAIHLPKRVAIIHCPGHQRGTDPVATGNRKADEAAKQAAQSTRILTETTKNAGKRTADGSEFEKRTADGSEFESPKKKAKVE

SEQ ID NO: 1617 - protein, 2131 aa, synthetic construct
MPAAKRVKLDGGDKKYSIGLDIGTNSVGWAVITDEYKVPSKKFKVLGNTDRHSIKKNLIGALLFDSGETAEATRLKRTARRRYTRRKNRICYLQEIFSNEMAKVDDSFFHRLEESFLVEEDKKHERHPIFGNIVDEVAYHEKYPTIYHLRKKLVDSTDKADLRLIYLALAHMIKFRGHFLIEGDLNPDNSDVDKLFIQLVQTYNQLFEENPINASGVDAKAILSARLSKSRRLENLIAQLPGEKKNGLFGNLIALSLGLTPNFKSNFDLAEDAKLQLSKDTYDDDLDNLLAQIGDQYADLFLAAKNLSDAILLSDILRVNTEITKAPLSASMIKRYDEHHQDLTLLKALVRQQLPEKYKEIFFDQSKNGYAGYIDGGASQEEFYKFIKPILEKMDGTEELLVKLNREDLLRKQRTFDNGSIPHQIHLGELHAILRRQEDFYPFLKDNREKIEKILTFRIPYYVGPLARGNSRFAWMTRKSEETITPWNFEEVVDKGASAQSFIERMTNFDKNLPNEKVLPKHSLLYEYFTVYNELTKVKYVTEGMRKPAFLSGEQKKAIVDLLFKTNRKVTVKQLKEDYFKKIECFDSVEISGVEDRFNASLGTYHDLLKIIKDKDFLDNEENEDILEDIVLTLTLFEDREMIEERLKTYAHLFDDKVMKQLKRRRYTGWGRLSRKLINGIRDKQSGKTILDFLKSDGFANRNFMQLIHDDSLTFKEDIQKAQVSGQGDSLHEHIANLAGSPAIKKGILQTVKVVDELVKVMGRHKPENIVIEMARENQTTQKGQKNSRERMKRIEEGIKELGSQILKEHPVENTQLQNEKLYLYYLQNGRDMYVDQELDINRLSDYDVDHIVPQSFLKDDSIDNKVLTRSDKARGKSDNVPSEEVVKKMKNYWRQLLNAKLITQRKFDNLTKAERGGLSELDKAGFIKRQLVETRQITKHVAQILDSRMNTKYDENDKLIREVKVITLKSKLVSDFRKDFQFYKVREINNYHHAHDAYLNAVVGTALIKKYPKLESEFVYGDYKVYDVRKMIAKSEQEIGKATAKYFFYSNIMNFFKTEITLANGEIRKRPLIETNGETGEIVWDKGRDFATVRKVLSMPQVNIVKKTEVQTGGFSKESILPKRNSDKLIARKKDWDPKKYGGFDSPTVAYSVLVVAKVEKGKSKKLKSVKELLGITIMERSSFEKNPIDFLEAKGYKEVKKDLIIKLPKYSLFELENGRKRMLASAGELQKGNELALPSKYVNFLYLASHYEKLKGSPEDNEQKQLFVEQHKHYLDEIIEQISEFSKRVILADANLDKVLSAYNKHRDKPIREQAENIIHLFTLTNLGAPAAFKYFDTTIDRKRYTSTKEVLDATLIHQSITGLYETRIDLSQLGGDGGGSSGSSGSSGSSGSSGGLLGRDLLTKLKAQIQFSTEGPQVTWEDRPAMCLVLNLEEEYRLHEKPVPPSIDPSWLQLFPMVWAEKAGMGLANQVPPVVVELKSDASPVAVRQYPMSKEAREGIRPHIQRFLDLGILVPCQSPWNTPLLPVKKPGTNDYRPVQDLREVNKRVQDIHPTVPNPYNLLSSLPPSHTWYSVLDLKDAFFCLKLHPNSQPLFAFEWRDPEKGNTGQLTWTRLPQGFKNSPTLFNEALHRDLASFRALNPQVVMLQYVDDLLVAAPTYRDCKEGTRRLLQELSKLGYRVSAKKAQLCREEVTYLGYLLKGGKRWLTPARKATVMKIPTPTTPRQVREFLGTAGFCRLWIPGFASLAAPLYPLTRPKVPFTWTEAHQEAFGRIKEALLSAPALALPDLTKPFALYVDEKEGVARGVLTQTLGPWRRPVAYLSKKLDPVASGWPTCLKAIAAVALLLKDADKLTLGQNVLVIAPHNLESIVRQPPDRWMTNARMTHYQSLLLNERVSFAPPAILNPATLLPVESDDTPIHICSEILAEETGTRPDLRDQPLPGVPAWYTDGSSFIMDGRRQAGAAIVDNKRTVWASNLPEGTSAQKAELIALTQALRLAEGKSINIYTDSRYAFATAHVHGAIYKQRGWLTSAGKDIKNKEEILALLEAIHLPKRVAIIHCPGHQRGTDPVATGNRKADEAAKQAAQSTRILTETTKNAGKRTADGSEFEKRTADGSEFESPKKKAKVE

SEQ ID NO: 1618 - protein, 2127 aa, synthetic construct
MPAAKRVKLDGGDKKYSIGLDIGTNSVGWAVITDEYKVPSKKFKVLGNTDRHSIKKNLIGALLFDSGETAEATRLKRTARRRYTRRKNRICYLQEIFSNEMAKVDDSFFHRLEESFLVEEDKKHERHPIFGNIVDEVAYHEKYPTIYHLRKKLVDSTDKADLRLIYLALAHMIKFRGHFLIEGDLNPDNSDVDKLFIQLVQTYNQLFEENPINASGVDAKAILSARLSKSRRLENLIAQLPGEKKNGLFGNLIALSLGLTPNFKSNFDLAEDAKLQLSKDTYDDDLDNLLAQIGDQYADLFLAAKNLSDAILLSDILRVNTEITKAPLSASMIKRYDEHHQDLTLLKALVRQQLPEKYKEIFFDQSKNGYAGYIDGGASQEEFYKFIKPILEKMDGTEELLVKLNREDLLRKQRTFDNGSIPHQIHLGELHAILRRQEDFYPFLKDNREKIEKILTFRIPYYVGPLARGNSRFAWMTRKSEETITPWNFEEVVDKGASAQSFIERMTNFDKNLPNEKVLPKHSLLYEYFTVYNELTKVKYVTEGMRKPAFLSGEQKKAIVDLLFKTNRKVTVKQLKEDYFKKIECFDSVEISGVEDRFNASLGTYHDLLKIIKDKDFLDNEENEDILEDIVLTLTLFEDREMIEERLKTYAHLFDDKVMKQLKRRRYTGWGRLSRKLINGIRDKQSGKTILDFLKSDGFANRNFMQLIHDDSLTFKEDIQKAQVSGQGDSLHEHIANLAGSPAIKKGILQTVKVVDELVKVMGRHKPENIVIEMARENQTTQKGQKNSRERMKRIEEGIKELGSQILKEHPVENTQLQNEKLYLYYLQNGRDMYVDQELDINRLSDYDVDHIVPQSFLKDDSIDNKVLTRSDKARGKSDNVPSEEVVKKMKNYWRQLLNAKLITQRKFDNLTKAERGGLSELDKAGFIKRQLVETRQITKHVAQILDSRMNTKYDENDKLIREVKVITLKSKLVSDFRKDFQFYKVREINNYHHAHDAYLNAVVGTALIKKYPKLESEFVYGDYKVYDVRKMIAKSEQEIGKATAKYFFYSNIMNFFKTEITLANGEIRKRPLIETNGETGEIVWDKGRDFATVRKVLSMPQVNIVKKTEVQTGGFSKESILPKRNSDKLIARKKDWDPKKYGGFDSPTVAYSVLVVAKVEKGKSKKLKSVKELLGITIMERSSFEKNPIDFLEAKGYKEVKKDLIIKLPKYSLFELENGRKRMLASAGELQKGNELALPSKYVNFLYLASHYEKLKGSPEDNEQKQLFVEQHKHYLDEIIEQISEFSKRVILADANLDKVLSAYNKHRDKPIREQAENIIHLFTLTNLGAPAAFKYFDTTIDRKRYTSTKEVLDATLIHQSITGLYETRIDLSQLGGDGGEAAAKPAPGSSGGLLGRDLLTKLKAQIQFSTEGPQVTWEDRPAMCLVLNLEEEYRLHEKPVPPSIDPSWLQLFPMVWAEKAGMGLANQVPPVVVELKSDASPVAVRQYPMSKEAREGIRPHIQRFLDLGILVPCQSPWNTPLLPVKKPGTNDYRPVQDLREVNKRVQDIHPTVPNPYNLLSSLPPSHTWYSVLDLKDAFFCLKLHPNSQPLFAFEWRDPEKGNTGQLTWTRLPQGFKNSPTLFNEALHRDLASFRALNPQVVMLQYVDDLLVAAPTYRDCKEGTRRLLQELSKLGYRVSAKKAQLCREEVTYLGYLLKGGKRWLTPARKATVMKIPTPTTPRQVREFLGTAGFCRLWIPGFASLAAPLYPLTRPKVPFTWTEAHQEAFGRIKEALLSAPALALPDLTKPFALYVDEKEGVARGVLTQTLGPWRRPVAYLSKKLDPVASGWPTCLKAIAAVALLLKDADKLTLGQNVLVIAPHNLESIVRQPPDRWMTNARMTHYQSLLLNERVSFAPPAILNPATLLPVESDDTPIHICSEILAEETGTRPDLRDQPLPGVPAWYTDGSSFIMDGRRQAGAAIVDNKRTVWASNLPEGTSAQKAELIALTQALRLAEGKSINIYTDSRYAFATAHVHGAIYKQRGWLTSAGKDIKNKEEILALLEAIHLPKRVAIIHCPGHQRGTDPVATGNRKADEAAKQAAQSTRILTETTKNAGKRTADGSEFEKRTADGSEFESPKKKAKVE

SEQ ID NO: 1619 - protein, 2127 aa, synthetic construct
MPAAKRVKLDGGDKKYSIGLDIGTNSVGWAVITDEYKVPSKKFKVLGNTDRHSIKKNLIGALLFDSGETAEATRLKRTARRRYTRRKNRICYLQEIFSNEMAKVDDSFFHRLEESFLVEEDKKHERHPIFGNIVDEVAYHEKYPTIYHLRKKLVDSTDKADLRLIYLALAHMIKFRGHFLIEGDLNPDNSDVDKLFIQLVQTYNQLFEENPINASGVDAKAILSARLSKSRRLENLIAQLPGEKKNGLFGNLIALSLGLTPNFKSNFDLAEDAKLQLSKDTYDDDLDNLLAQIGDQYADLFLAAKNLSDAILLSDILRVNTEITKAPLSASMIKRYDEHHQDLTLLKALVRQQLPEKYKEIFFDQSKNGYAGYIDGGASQEEFYKFIKPILEKMDGTEELLVKLNREDLLRKQRTFDNGSIPHQIHLGELHAILRRQEDFYPFLKDNREKIEKILTFRIPYYVGPLARGNSRFAWMTRKSEETITPWNFEEVVDKGASAQSFIERMTNFDKNLPNEKVLPKHSLLYEYFTVYNELTKVKYVTEGMRKPAFLSGEQKKAIVDLLFKTNRKVTVKQLKEDYFKKIECFDSVEISGVEDRFNASLGTYHDLLKIIKDKDFLDNEENEDILEDIVLTLTLFEDREMIEERLKTYAHLFDDKVMKQLKRRRYTGWGRLSRKLINGIRDKQSGKTILDFLKSDGFANRNFMQLIHDDSLTFKEDIQKAQVSGQGDSLHEHIANLAGSPAIKKGILQTVKVVDELVKVMGRHKPENIVIEMARENQTTQKGQKNSRERMKRIEEGIKELGSQILKEHPVENTQLQNEKLYLYYLQNGRDMYVDQELDINRLSDYDVDHIVPQSFLKDDSIDNKVLTRSDKARGKSDNVPSEEVVKKMKNYWRQLLNAKLITQRKFDNLTKAERGGLSELDKAGFIKRQLVETRQITKHVAQILDSRMNTKYDENDKLIREVKVITLKSKLVSDFRKDFQFYKVREINNYHHAHDAYLNAVVGTALIKKYPKLESEFVYGDYKVYDVRKMIAKSEQEIGKATAKYFFYSNIMNFFKTEITLANGEIRKRPLIETNGETGEIVWDKGRDFATVRKVLSMPQVNIVKKTEVQTGGFSKESILPKRNSDKLIARKKDWDPKKYGGFDSPTVAYSVLVVAKVEKGKSKKLKSVKELLGITIMERSSFEKNPIDFLEAKGYKEVKKDLIIKLPKYSLFELENGRKRMLASAGELQKGNELALPSKYVNFLYLASHYEKLKGSPEDNEQKQLFVEQHKHYLDEIIEQISEFSKRVILADANLDKVLSAYNKHRDKPIREQAENIIHLFTLTNLGAPAAFKYFDTTIDRKRYTSTKEVLDATLIHQSITGLYETRIDLSQLGGDGGPAPAPAPAPAPGGLLGRDLLTKLKAQIQFSTEGPQVTWEDRPAMCLVLNLEEEYRLHEKPVPPSIDPSWLQLFPMVWAEKAGMGLANQVPPVVVELKSDASPVAVRQYPMSKEAREGIRPHIQRFLDLGILVPCQSPWNTPLLPVKKPGTNDYRPVQDLREVNKRVQDIHPTVPNPYNLLSSLPPSHTWYSVLDLKDAFFCLKLHPNSQPLFAFEWRDPEKGNTGQLTWTRLPQGFKNSPTLFNEALHRDLASFRALNPQVVMLQYVDDLLVAAPTYRDCKEGTRRLLQELSKLGYRVSAKKAQLCREEVTYLGYLLKGGKRWLTPARKATVMKIPTPTTPRQVREFLGTAGFCRLWIPGFASLAAPLYPLTRPKVPFTWTEAHQEAFGRIKEALLSAPALALPDLTKPFALYVDEKEGVARGVLTQTLGPWRRPVAYLSKKLDPVASGWPTCLKAIAAVALLLKDADKLTLGQNVLVIAPHNLESIVRQPPDRWMTNARMTHYQSLLLNERVSFAPPAILNPATLLPVESDDTPIHICSEILAEETGTRPDLRDQPLPGVPAWYTDGSSFIMDGRRQAGAAIVDNKRTVWASNLPEGTSAQKAELIALTQALRLAEGKSINIYTDSRYAFATAHVHGAIYKQRGWLTSAGKDIKNKEEILALLEAIHLPKRVAIIHCPGHQRGTDPVATGNRKADEAAKQAAQSTRILTETTKNAGKRTADGSEFEKRTADGSEFESPKKKAKVE

SEQ ID NO: 1620 - protein, 2127 aa, synthetic construct
MPAAKRVKLDGGDKKYSIGLDIGTNSVGWAVITDEYKVPSKKFKVLGNTDRHSIKKNLIGALLFDSGETAEATRLKRTARRRYTRRKNRICYLQEIFSNEMAKVDDSFFHRLEESFLVEEDKKHERHPIFGNIVDEVAYHEKYPTIYHLRKKLVDSTDKADLRLIYLALAHMIKFRGHFLIEGDLNPDNSDVDKLFIQLVQTYNQLFEENPINASGVDAKAILSARLSKSRRLENLIAQLPGEKKNGLFGNLIALSLGLTPNFKSNFDLAEDAKLQLSKDTYDDDLDNLLAQIGDQYADLFLAAKNLSDAILLSDILRVNTEITKAPLSASMIKRYDEHHQDLTLLKALVRQQLPEKYKEIFFDQSKNGYAGYIDGGASQEEFYKFIKPILEKMDGTEELLVKLNREDLLRKQRTFDNGSIPHQIHLGELHAILRRQEDFYPFLKDNREKIEKILTFRIPYYVGPLARGNSRFAWMTRKSEETITPWNFEEVVDKGASAQSFIERMTNFDKNLPNEKVLPKHSLLYEYFTVYNELTKVKYVTEGMRKPAFLSGEQKKAIVDLLFKTNRKVTVKQLKEDYFKKIECFDSVEISGVEDRFNASLGTYHDLLKIIKDKDFLDNEENEDILEDIVLTLTLFEDREMIEERLKTYAHLFDDKVMKQLKRRRYTGWGRLSRKLINGIRDKQSGKTILDFLKSDGFANRNFMQLIHDDSLTFKEDIQKAQVSGQGDSLHEHIANLAGSPAIKKGILQTVKVVDELVKVMGRHKPENIVIEMARENQTTQKGQKNSRERMKRIEEGIKELGSQILKEHPVENTQLQNEKLYLYYLQNGRDMYVDQELDINRLSDYDVDHIVPQSFLKDDSIDNKVLTRSDKARGKSDNVPSEEVVKKMKNYWRQLLNAKLITQRKFDNLTKAERGGLSELDKAGFIKRQLVETRQITKHVAQILDSRMNTKYDENDKLIREVKVITLKSKLVSDFRKDFQFYKVREINNYHHAHDAYLNAVVGTALIKKYPKLESEFVYGDYKVYDVRKMIAKSEQEIGKATAKYFFYSNIMNFFKTEITLANGEIRKRPLIETNGETGEIVWDKGRDFATVRKVLSMPQVNIVKKTEVQTGGFSKESILPKRNSDKLIARKKDWDPKKYGGFDSPTVAYSVLVVAKVEKGKSKKLKSVKELLGITIMERSSFEKNPIDFLEAKGYKEVKKDLIIKLPKYSLFELENGRKRMLASAGELQKGNELALPSKYVNFLYLASHYEKLKGSPEDNEQKQLFVEQHKHYLDEIIEQISEFSKRVILADANLDKVLSAYNKHRDKPIREQAENIIHLFTLTNLGAPAAFKYFDTTIDRKRYTSTKEVLDATLIHQSITGLYETRIDLSQLGGDGGGGSPAPEAAAKGGLLGRDLLTKLKAQIQFSTEGPQVTWEDRPAMCLVLNLEEEYRLHEKPVPPSIDPSWLQLFPMVWAEKAGMGLANQVPPVVVELKSDASPVAVRQYPMSKEAREGIRPHIQRFLDLGILVPCQSPWNTPLLPVKKPGTNDYRPVQDLREVNKRVQDIHPTVPNPYNLLSSLPPSHTWYSVLDLKDAFFCLKLHPNSQPLFAFEWRDPEKGNTGQLTWTRLPQGFKNSPTLFNEALHRDLASFRALNPQVVMLQYVDDLLVAAPTYRDCKEGTRRLLQELSKLGYRVSAKKAQLCREEVTYLGYLLKGGKRWLTPARKATVMKIPTPTTPRQVREFLGTAGFCRLWIPGFASLAAPLYPLTRPKVPFTWTEAHQEAFGRIKEALLSAPALALPDLTKPFALYVDEKEGVARGVLTQTLGPWRRPVAYLSKKLDPVASGWPTCLKAIAAVALLLKDADKLTLGQNVLVIAPHNLESIVRQPPDRWMTNARMTHYQSLLLNERVSFAPPAILNPATLLPVESDDTPIHICSEILAEETGTRPDLRDQPLPGVPAWYTDGSSFIMDGRRQAGAAIVDNKRTVWASNLPEGTSAQKAELIALTQALRLAEGKSINIYTDSRYAFATAHVHGAIYKQRGWLTSAGKDIKNKEEILALLEAIHLPKRVAIIHCPGHQRGTDPVATGNRKADEAAKQAAQSTRILTETTKNAGKRTADGSEFEKRTADGSEFESPKKKAKVE

SEQ ID NO: 1621 - protein, 2146 aa, synthetic construct
MPAAKRVKLDGGDKKYSIGLDIGTNSVGWAVITDEYKVPSKKFKVLGNTDRHSIKKNLIGALLFDSGETAEATRLKRTARRRYTRRKNRICYLQEIFSNEMAKVDDSFFHRLEESFLVEEDKKHERHPIFGNIVDEVAYHEKYPTIYHLRKKLVDSTDKADLRLIYLALAHMIKFRGHFLIEGDLNPDNSDVDKLFIQLVQTYNQLFEENPINASGVDAKAILSARLSKSRRLENLIAQLPGEKKNGLFGNLIALSLGLTPNFKSNFDLAEDAKLQLSKDTYDDDLDNLLAQIGDQYADLFLAAKNLSDAILLSDILRVNTEITKAPLSASMIKRYDEHHQDLTLLKALVRQQLPEKYKEIFFDQSKNGYAGYIDGGASQEEFYKFIKPILEKMDGTEELLVKLNREDLLRKQRTFDNGSIPHQIHLGELHAILRRQEDFYPFLKDNREKIEKILTFRIPYYVGPLARGNSRFAWMTRKSEETITPWNFEEVVDKGASAQSFIERMTNFDKNLPNEKVLPKHSLLYEYFTVYNELTKVKYVTEGMRKPAFLSGEQKKAIVDLLFKTNRKVTVKQLKEDYFKKIECFDSVEISGVEDRFNASLGTYHDLLKIIKDKDFLDNEENEDILEDIVLTLTLFEDREMIEERLKTYAHLFDDKVMKQLKRRRYTGWGRLSRKLINGIRDKQSGKTILDFLKSDGFANRNFMQLIHDDSLTFKEDIQKAQVSGQGDSLHEHIANLAGSPAIKKGILQTVKVVDELVKVMGRHKPENIVIEMARENQTTQKGQKNSRERMKRIEEGIKELGSQILKEHPVENTQLQNEKLYLYYLQNGRDMYVDQELDINRLSDYDVDHIVPQSFLKDDSIDNKVLTRSDKARGKSDNVPSEEVVKKMKNYWRQLLNAKLITQRKFDNLTKAERGGLSELDKAGFIKRQLVETRQITKHVAQILDSRMNTKYDENDKLIREVKVITLKSKLVSDFRKDFQFYKVREINNYHHAHDAYLNAVVGTALIKKYPKLESEFVYGDYKVYDVRKMIAKSEQEIGKATAKYFFYSNIMNFFKTEITLANGEIRKRPLIETNGETGEIVWDKGRDFATVRKVLSMPQVNIVKKTEVQTGGFSKESILPKRNSDKLIARKKDWDPKKYGGFDSPTVAYSVLVVAKVEKGKSKKLKSVKELLGITIMERSSFEKNPIDFLEAKGYKEVKKDLIIKLPKYSLFELENGRKRMLASAGELQKGNELALPSKYVNFLYLASHYEKLKGSPEDNEQKQLFVEQHKHYLDEIIEQISEFSKRVILADANLDKVLSAYNKHRDKPIREQAENIIHLFTLTNLGAPAAFKYFDTTIDRKRYTSTKEVLDATLIHQSITGLYETRIDLSQLGGDGGEAAAKEAAAKEAAAKEAAAKEAAAKEAAAKGGLLGRDLLTKLKAQIQFSTEGPQVTWEDRPAMCLVLNLEEEYRLHEKPVPPSIDPSWLQLFPMVWAEKAGMGLANQVPPVVVELKSDASPVAVRQYPMSKEAREGIRPHIQRFLDLGILVPCQSPWNTPLLPVKKPGTNDYRPVQDLREVNKRVQDIHPTVPNPYNLLSSLPPSHTWYSVLDLKDAFFCLKLHPNSQPLFAFEWRDPEKGNTGQLTWTRLPQGFKNSPTLFNEALHRDLASFRALNPQVVMLQYVDDLLVAAPTYRDCKEGTRRLLQELSKLGYRVSAKKAQLCREEVTYLGYLLKGGKRWLTPARKATVMKIPTPTTPRQVREFLGTAGFCRLWIPGFASLAAPLYPLTRPKVPFTWTEAHQEAFGRIKEALLSAPALALPDLTKPFALYVDEKEGVARGVLTQTLGPWRRPVAYLSKKLDPVASGWPTCLKAIAAVALLLKDADKLTLGQNVLVIAPHNLESIVRQPPDRWMTNARMTHYQSLLLNERVSFAPPAILNPATLLPVESDDTPIHICSEILAEETGTRPDLRDQPLPGVPAWYTDGSSFIMDGRRQAGAAIVDNKRTVWASNLPEGTSAQKAELIALTQALRLAEGKSINIYTDSRYAFATAHVHGAIYKQRGWLTSAGKDIKNKEEILALLEAIHLPKRVAIIHCPGHQRGTDPVATGNRKADEAAKQAAQSTRILTETTKNAGKRTADGSEFEKRTADGSEFESPKKKAKVE

SEQ ID NO: 1622 - protein, 2162 aa, synthetic construct
MPAAKRVKLDGGDKKYSIGLDIGTNSVGWAVITDEYKVPSKKFKVLGNTDRHSIKKNLIGALLFDSGETAEATRLKRTARRRYTRRKNRICYLQEIFSNEMAKVDDSFFHRLEESFLVEEDKKHERHPIFGNIVDEVAYHEKYPTIYHLRKKLVDSTDKADLRLIYLALAHMIKFRGHFLIEGDLNPDNSDVDKLFIQLVQTYNQLFEENPINASGVDAKAILSARLSKSRRLENLIAQLPGEKKNGLFGNLIALSLGLTPNFKSNFDLAEDAKLQLSKDTYDDDLDNLLAQIGDQYADLFLAAKNLSDAILLSDILRVNTEITKAPLSASMIKRYDEHHQDLTLLKALVRQQLPEKYKEIFFDQSKNGYAGYIDGGASQEEFYKFIKPILEKMDGTEELLVKLNREDLLRKQRTFDNGSIPHQIHLGELHAILRRQEDFYPFLKDNREKIEKILTFRIPYYVGPLARGNSRFAWMTRKSEETITPWNFEEVVDKGASAQSFIERMTNFDKNLPNEKVLPKHSLLYEYFTVYNELTKVKYVTEGMRKPAFLSGEQKKAIVDLLFKTNRKVTVKQLKEDYFKKIECFDSVEISGVEDRFNASLGTYHDLLKIIKDKDFLDNEENEDILEDIVLTLTLFEDREMIEERLKTYAHLFDDKVMKQLKRRRYTGWGRLSRKLINGIRDKQSGKTILDFLKSDGFANRNFMQLIHDDSLTFKEDIQKAQVSGQGDSLHEHIANLAGSPAIKKGILQTVKVVDELVKVMGRHKPENIVIEMARENQTTQKGQKNSRERMKRIEEGIKELGSQILKEHPVENTQLQNEKLYLYYLQNGRDMYVDQELDINRLSDYDVDHIVPQSFLKDDSIDNKVLTRSDKARGKSDNVPSEEVVKKMKNYWRQLLNAKLITQRKFDNLTKAERGGLSELDKAGFIKRQLVETRQITKHVAQILDSRMNTKYDENDKLIREVKVITLKSKLVSDFRKDFQFYKVREINNYHHAHDAYLNAVVGTALIKKYPKLESEFVYGDYKVYDVRKMIAKSEQEIGKATAKYFFYSNIMNFFKTEITLANGEIRKRPLIETNGETGEIVWDKGRDFATVRKVLSMPQVNIVKKTEVQTGGFSKESILPKRNSDKLIARKKDWDPKKYGGFDSPTVAYSVLVVAKVEKGKSKKLKSVKELLGITIMERSSFEKNPIDFLEAKGYKEVKKDLIIKLPKYSLFELENGRKRMLASAGELQKGNELALPSKYVNFLYLASHYEKLKGSPEDNEQKQLFVEQHKHYLDEIIEQISEFSKRVILADANLDKVLSAYNKHRDKPIREQAENIIHLFTLTNLGAPAAFKYFDTTIDRKRYTSTKEVLDATLIHQSITGLYETRIDLSQLGGDGGAEAAAKEAAAKEAAAKEAAAKALEAEAAAKEAAAKEAAAKEAAAKAGGLLGRDLLTKLKAQIQFSTEGPQVTWEDRPAMCLVLNLEEEYRLHEKPVPPSIDPSWLQLFPMVWAEKAGMGLANQVPPVVVELKSDASPVAVRQYPMSKEAREGIRPHIQRFLDLGILVPCQSPWNTPLLPVKKPGTNDYRPVQDLREVNKRVQDIHPTVPNPYNLLSSLPPSHTWYSVLDLKDAFFCLKLHPNSQPLFAFEWRDPEKGNTGQLTWTRLPQGFKNSPTLFNEALHRDLASFRALNPQVVMLQYVDDLLVAAPTYRDCKEGTRRLLQELSKLGYRVSAKKAQLCREEVTYLGYLLKGGKRWLTPARKATVMKIPTPTTPRQVREFLGTAGFCRLWIPGFASLAAPLYPLTRPKVPFTWTEAHQEAFGRIKEALLSAPALALPDLTKPFALYVDEKEGVARGVLTQTLGPWRRPVAYLSKKLDPVASGWPTCLKAIAAVALLLKDADKLTLGQNVLVIAPHNLESIVRQPPDRWMTNARMTHYQSLLLNERVSFAPPAILNPATLLPVESDDTPIHICSEILAEETGTRPDLRDQPLPGVPAWYTDGSSFIMDGRRQAGAAIVDNKRTVWASNLPEGTSAQKAELIALTQALRLAEGKSINIYTDSRYAFATAHVHGAIYKQRGWLTSAGKDIKNKEEILALLEAIHLPKRVAIIHCPGHQRGTDPVATGNRKADEAAKQAAQSTRILTETTKNAGKRTADGSEFEKRTADGSEFESPKKKAKVE

SEQ ID NO: 1623 - protein, 2127 aa, synthetic construct
MPAAKRVKLDGGDKKYSIGLDIGTNSVGWAVITDEYKVPSKKFKVLGNTDRHSIKKNLIGALLFDSGETAEATRLKRTARRRYTRRKNRICYLQEIFSNEMAKVDDSFFHRLEESFLVEEDKKHERHPIFGNIVDEVAYHEKYPTIYHLRKKLVDSTDKADLRLIYLALAHMIKFRGHFLIEGDLNPDNSDVDKLFIQLVQTYNQLFEENPINASGVDAKAILSARLSKSRRLENLIAQLPGEKKNGLFGNLIALSLGLTPNFKSNFDLAEDAKLQLSKDTYDDDLDNLLAQIGDQYADLFLAAKNLSDAILLSDILRVNTEITKAPLSASMIKRYDEHHQDLTLLKALVRQQLPEKYKEIFFDQSKNGYAGYIDGGASQEEFYKFIKPILEKMDGTEELLVKLNREDLLRKQRTFDNGSIPHQIHLGELHAILRRQEDFYPFLKDNREKIEKILTFRIPYYVGPLARGNSRFAWMTRKSEETITPWNFEEVVDKGASAQSFIERMTNFDKNLPNEKVLPKHSLLYEYFTVYNELTKVKYVTEGMRKPAFLSGEQKKAIVDLLFKTNRKVTVKQLKEDYFKKIECFDSVEISGVEDRFNASLGTYHDLLKIIKDKDFLDNEENEDILEDIVLTLTLFEDREMIEERLKTYAHLFDDKVMKQLKRRRYTGWGRLSRKLINGIRDKQSGKTILDFLKSDGFANRNFMQLIHDDSLTFKEDIQKAQVSGQGDSLHEHIANLAGSPAIKKGILQTVKVVDELVKVMGRHKPENIVIEMARENQTTQKGQKNSRERMKRIEEGIKELGSQILKEHPVENTQLQNEKLYLYYLQNGRDMYVDQELDINRLSDYDVDHIVPQSFLKDDSIDNKVLTRSDKARGKSDNVPSEEVVKKMKNYWRQLLNAKLITQRKFDNLTKAERGGLSELDKAGFIKRQLVETRQITKHVAQILDSRMNTKYDENDKLIREVKVITLKSKLVSDFRKDFQFYKVREINNYHHAHDAYLNAVVGTALIKKYPKLESEFVYGDYKVYDVRKMIAKSEQEIGKATAKYFFYSNIMNFFKTEITLANGEIRKRPLIETNGETGEIVWDKGRDFATVRKVLSMPQVNIVKKTEVQTGGFSKESILPKRNSDKLIARKKDWDPKKYGGFDSPTVAYSVLVVAKVEKGKSKKLKSVKELLGITIMERSSFEKNPIDFLEAKGYKEVKKDLIIKLPKYSLFELENGRKRMLASAGELQKGNELALPSKYVNFLYLASHYEKLKGSPEDNEQKQLFVEQHKHYLDEIIEQISEFSKRVILADANLDKVLSAYNKHRDKPIREQAENIIHLFTLTNLGAPAAFKYFDTTIDRKRYTSTKEVLDATLIHQSITGLYETRIDLSQLGGDGGGSSEAAAKGGSGGLLGRDLLTKLKAQIQFSTEGPQVTWEDRPAMCLVLNLEEEYRLHEKPVPPSIDPSWLQLFPMVWAEKAGMGLANQVPPVVVELKSDASPVAVRQYPMSKEAREGIRPHIQRFLDLGILVPCQSPWNTPLLPVKKPGTNDYRPVQDLREVNKRVQDIHPTVPNPYNLLSSLPPSHTWYSVLDLKDAFFCLKLHPNSQPLFAFEWRDPEKGNTGQLTWTRLPQGFKNSPTLFNEALHRDLASFRALNPQVVMLQYVDDLLVAAPTYRDCKEGTRRLLQELSKLGYRVSAKKAQLCREEVTYLGYLLKGGKRWLTPARKATVMKIPTPTTPRQVREFLGTAGFCRLWIPGFASLAAPLYPLTRPKVPFTWTEAHQEAFGRIKEALLSAPALALPDLTKPFALYVDEKEGVARGVLTQTLGPWRRPVAYLSKKLDPVASGWPTCLKAIAAVALLLKDADKLTLGQNVLVIAPHNLESIVRQPPDRWMTNARMTHYQSLLLNERVSFAPPAILNPATLLPVESDDTPIHICSEILAEETGTRPDLRDQPLPGVPAWYTDGSSFIMDGRRQAGAAIVDNKRTVWASNLPEGTSAQKAELIALTQALRLAEGKSINIYTDSRYAFATAHVHGAIYKQRGWLTSAGKDIKNKEEILALLEAIHLPKRVAIIHCPGHQRGTDPVATGNRKADEAAKQAAQSTRILTETTKNAGKRTADGSEFEKRTADGSEFESPKKKAKVE

SEQ ID NO: 1624 - protein, 2127 aa, synthetic construct
MPAAKRVKLDGGDKKYSIGLDIGTNSVGWAVITDEYKVPSKKFKVLGNTDRHSIKKNLIGALLFDSGETAEATRLKRTARRRYTRRKNRICYLQEIFSNEMAKVDDSFFHRLEESFLVEEDKKHERHPIFGNIVDEVAYHEKYPTIYHLRKKLVDSTDKADLRLIYLALAHMIKFRGHFLIEGDLNPDNSDVDKLFIQLVQTYNQLFEENPINASGVDAKAILSARLSKSRRLENLIAQLPGEKKNGLFGNLIALSLGLTPNFKSNFDLAEDAKLQLSKDTYDDDLDNLLAQIGDQYADLFLAAKNLSDAILLSDILRVNTEITKAPLSASMIKRYDEHHQDLTLLKALVRQQLPEKYKEIFFDQSKNGYAGYIDGGASQEEFYKFIKPILEKMDGTEELLVKLNREDLLRKQRTFDNGSIPHQIHLGELHAILRRQEDFYPFLKDNREKIEKILTFRIPYYVGPLARGNSRFAWMTRKSEETITPWNFEEVVDKGASAQSFIERMTNFDKNLPNEKVLPKHSLLYEYFTVYNELTKVKYVTEGMRKPAFLSGEQKKAIVDLLFKTNRKVTVKQLKEDYFKKIECFDSVEISGVEDRFNASLGTYHDLLKIIKDKDFLDNEENEDILEDIVLTLTLFEDREMIEERLKTYAHLFDDKVMKQLKRRRYTGWGRLSRKLINGIRDKQSGKTILDFLKSDGFANRNFMQLIHDDSLTFKEDIQKAQVSGQGDSLHEHIANLAGSPAIKKGILQTVKVVDELVKVMGRHKPENIVIEMARENQTTQKGQKNSRERMKRIEEGIKELGSQILKEHPVENTQLQNEKLYLYYLQNGRDMYVDQELDINRLSDYDVDHIVPQSFLKDDSIDNKVLTRSDKARGKSDNVPSEEVVKKMKNYWRQLLNAKLITQRKFDNLTKAERGGLSELDKAGFIKRQLVETRQITKHVAQILDSRMNTKYDENDKLIREVKVITLKSKLVSDFRKDFQFYKVREINNYHHAHDAYLNAVVGTALIKKYPKLESEFVYGDYKVYDVRKMIAKSEQEIGKATAKYFFYSNIMNFFKTEITLANGEIRKRPLIETNGETGEIVWDKGRDFATVRKVLSMPQVNIVKKTEVQTGGFSKESILPKRNSDKLIARKKDWDPKKYGGFDSPTVAYSVLVVAKVEKGKSKKLKSVKELLGITIMERSSFEKNPIDFLEAKGYKEVKKDLIIKLPKYSLFELENGRKRMLASAGELQKGNELALPSKYVNFLYLASHYEKLKGSPEDNEQKQLFVEQHKHYLDEIIEQISEFSKRVILADANLDKVLSAYNKHRDKPIREQAENIIHLFTLTNLGAPAAFKYFDTTIDRKRYTSTKEVLDATLIHQSITGLYETRIDLSQLGGDGGEAAAKGSSPAPGGLLGRDLLTKLKAQIQFSTEGPQVTWEDRPAMCLVLNLEEEYRLHEKPVPPSIDPSWLQLFPMVWAEKAGMGLANQVPPVVVELKSDASPVAVRQYPMSKEAREGIRPHIQRFLDLGILVPCQSPWNTPLLPVKKPGTNDYRPVQDLREVNKRVQDIHPTVPNPYNLLSSLPPSHTWYSVLDLKDAFFCLKLHPNSQPLFAFEWRDPEKGNTGQLTWTRLPQGFKNSPTLFNEALHRDLASFRALNPQVVMLQYVDDLLVAAPTYRDCKEGTRRLLQELSKLGYRVSAKKAQLCREEVTYLGYLLKGGKRWLTPARKATVMKIPTPTTPRQVREFLGTAGFCRLWIPGFASLAAPLYPLTRPKVPFTWTEAHQEAFGRIKEALLSAPALALPDLTKPFALYVDEKEGVARGVLTQTLGPWRRPVAYLSKKLDPVASGWPTCLKAIAAVALLLKDADKLTLGQNVLVIAPHNLESIVRQPPDRWMTNARMTHYQSLLLNERVSFAPPAILNPATLLPVESDDTPIHICSEILAEETGTRPDLRDQPLPGVPAWYTDGSSFIMDGRRQAGAAIVDNKRTVWASNLPEGTSAQKAELIALTQALRLAEGKSINIYTDSRYAFATAHVHGAIYKQRGWLTSAGKDIKNKEEILALLEAIHLPKRVAIIHCPGHQRGTDPVATGNRKADEAAKQAAQSTRILTETTKNAGKRTADGSEFEKRTADGSEFESPKKKAKVE

SEQ ID NO: 1625 - protein, 2122 aa, synthetic construct
MPAAKRVKLDGGDKKYSIGLDIGTNSVGWAVITDEYKVPSKKFKVLGNTDRHSIKKNLIGALLFDSGETAEATRLKRTARRRYTRRKNRICYLQEIFSNEMAKVDDSFFHRLEESFLVEEDKKHERHPIFGNIVDEVAYHEKYPTIYHLRKKLVDSTDKADLRLIYLALAHMIKFRGHFLIEGDLNPDNSDVDKLFIQLVQTYNQLFEENPINASGVDAKAILSARLSKSRRLENLIAQLPGEKKNGLFGNLIALSLGLTPNFKSNFDLAEDAKLQLSKDTYDDDLDNLLAQIGDQYADLFLAAKNLSDAILLSDILRVNTEITKAPLSASMIKRYDEHHQDLTLLKALVRQQLPEKYKEIFFDQSKNGYAGYIDGGASQEEFYKFIKPILEKMDGTEELLVKLNREDLLRKQRTFDNGSIPHQIHLGELHAILRRQEDFYPFLKDNREKIEKILTFRIPYYVGPLARGNSRFAWMTRKSEETITPWNFEEVVDKGASAQSFIERMTNFDKNLPNEKVLPKHSLLYEYFTVYNELTKVKYVTEGMRKPAFLSGEQKKAIVDLLFKTNRKVTVKQLKEDYFKKIECFDSVEISGVEDRFNASLGTYHDLLKIIKDKDFLDNEENEDILEDIVLTLTLFEDREMIEERLKTYAHLFDDKVMKQLKRRRYTGWGRLSRKLINGIRDKQSGKTILDFLKSDGFANRNFMQLIHDDSLTFKEDIQKAQVSGQGDSLHEHIANLAGSPAIKKGILQTVKVVDELVKVMGRHKPENIVIEMARENQTTQKGQKNSRERMKRIEEGIKELGSQILKEHPVENTQLQNEKLYLYYLQNGRDMYVDQELDINRLSDYDVDHIVPQSFLKDDSIDNKVLTRSDKARGKSDNVPSEEVVKKMKNYWRQLLNAKLITQRKFDNLTKAERGGLSELDKAGFIKRQLVETRQITKHVAQILDSRMNTKYDENDKLIREVKVITLKSKLVSDFRKDFQFYKVREINNYHHAHDAYLNAVVGTALIKKYPKLESEFVYGDYKVYDVRKMIAKSEQEIGKATAKYFFYSNIMNFFKTEITLANGEIRKRPLIETNGETGEIVWDKGRDFATVRKVLSMPQVNIVKKTEVQTGGFSKESILPKRNSDKLIARKKDWDPKKYGGFDSPTVAYSVLVVAKVEKGKSKKLKSVKELLGITIMERSSFEKNPIDFLEAKGYKEVKKDLIIKLPKYSLFELENGRKRMLASAGELQKGNELALPSKYVNFLYLASHYEKLKGSPEDNEQKQLFVEQHKHYLDEIIEQISEFSKRVILADANLDKVLSAYNKHRDKPIREQAENIIHLFTLTNLGAPAAFKYFDTTIDRKRYTSTKEVLDATLIHQSITGLYETRIDLSQLGGDGGGSSGSSGGLLGRDLLTKLKAQIQFSTEGPQVTWEDRPAMCLVLNLEEEYRLHEKPVPPSIDPSWLQLFPMVWAEKAGMGLANQVPPVVVELKSDASPVAVRQYPMSKEAREGIRPHIQRFLDLGILVPCQSPWNTPLLPVKKPGTNDYRPVQDLREVNKRVQDIHPTVPNPYNLLSSLPPSHTWYSVLDLKDAFFCLKLHPNSQPLFAFEWRDPEKGNTGQLTWTRLPQGFKNSPTLFNEALHRDLASFRALNPQVVMLQYVDDLLVAAPTYRDCKEGTRRLLQELSKLGYRVSAKKAQLCREEVTYLGYLLKGGKRWLTPARKATVMKIPTPTTPRQVREFLGTAGFCRLWIPGFASLAAPLYPLTRPKVPFTWTEAHQEAFGRIKEALLSAPALALPDLTKPFALYVDEKEGVARGVLTQTLGPWRRPVAYLSKKLDPVASGWPTCLKAIAAVALLLKDADKLTLGQNVLVIAPHNLESIVRQPPDRWMTNARMTHYQSLLLNERVSFAPPAILNPATLLPVESDDTPIHICSEILAEETGTRPDLRDQPLPGVPAWYTDGSSFIMDGRRQAGAAIVDNKRTVWASNLPEGTSAQKAELIALTQALRLAEGKSINIYTDSRYAFATAHVHGAIYKQRGWLTSAGKDIKNKEEILALLEAIHLPKRVAIIHCPGHQRGTDPVATGNRKADEAAKQAAQSTRILTETTKNAGKRTADGSEFEKRTADGSEFESPKKKAKVE

SEQ ID NO: 1626 - protein, 2122 aa, synthetic construct
MPAAKRVKLDGGDKKYSIGLDIGTNSVGWAVITDEYKVPSKKFKVLGNTDRHSIKKNLIGALLFDSGETAEATRLKRTARRRYTRRKNRICYLQEIFSNEMAKVDDSFFHRLEESFLVEEDKKHERHPIFGNIVDEVAYHEKYPTIYHLRKKLVDSTDKADLRLIYLALAHMIKFRGHFLIEGDLNPDNSDVDKLFIQLVQTYNQLFEENPINASGVDAKAILSARLSKSRRLENLIAQLPGEKKNGLFGNLIALSLGLTPNFKSNFDLAEDAKLQLSKDTYDDDLDNLLAQIGDQYADLFLAAKNLSDAILLSDILRVNTEITKAPLSASMIKRYDEHHQDLTLLKALVRQQLPEKYKEIFFDQSKNGYAGYIDGGASQEEFYKFIKPILEKMDGTEELLVKLNREDLLRKQRTFDNGSIPHQIHLGELHAILRRQEDFYPFLKDNREKIEKILTFRIPYYVGPLARGNSRFAWMTRKSEETITPWNFEEVVDKGASAQSFIERMTNFDKNLPNEKVLPKHSLLYEYFTVYNELTKVKYVTEGMRKPAFLSGEQKKAIVDLLFKTNRKVTVKQLKEDYFKKIECFDSVEISGVEDRFNASLGTYHDLLKIIKDKDFLDNEENEDILEDIVLTLTLFEDREMIEERLKTYAHLFDDKVMKQLKRRRYTGWGRLSRKLINGIRDKQSGKTILDFLKSDGFANRNFMQLIHDDSLTFKEDIQKAQVSGQGDSLHEHIANLAGSPAIKKGILQTVKVVDELVKVMGRHKPENIVIEMARENQTTQKGQKNSRERMKRIEEGIKELGSQILKEHPVENTQLQNEKLYLYYLQNGRDMYVDQELDINRLSDYDVDHIVPQSFLKDDSIDNKVLTRSDKARGKSDNVPSEEVVKKMKNYWRQLLNAKLITQRKFDNLTKAERGGLSELDKAGFIKRQLVETRQITKHVAQILDSRMNTKYDENDKLIREVKVITLKSKLVSDFRKDFQFYKVREINNYHHAHDAYLNAVVGTALIKKYPKLESEFVYGDYKVYDVRKMIAKSEQEIGKATAKYFFYSNIMNFFKTEITLANGEIRKRPLIETNGETGEIVWDKGRDFATVRKVLSMPQVNIVKKTEVQTGGFSKESILPKRNSDKLIARKKDWDPKKYGGFDSPTVAYSVLVVAKVEKGKSKKLKSVKELLGITIMERSSFEKNPIDFLEAKGYKEVKKDLIIKLPKYSLFELENGRKRMLASAGELQKGNELALPSKYVNFLYLASHYEKLKGSPEDNEQKQLFVEQHKHYLDEIIEQISEFSKRVILADANLDKVLSAYNKHRDKPIREQAENIIHLFTLTNLGAPAAFKYFDTTIDRKRYTSTKEVLDATLIHQSITGLYETRIDLSQLGGDGGGGSGGGGGLLGRDLLTKLKAQIQFSTEGPQVTWEDRPAMCLVLNLEEEYRLHEKPVPPSIDPSWLQLFPMVWAEKAGMGLANQVPPVVVELKSDASPVAVRQYPMSKEAREGIRPHIQRFLDLGILVPCQSPWNTPLLPVKKPGTNDYRPVQDLREVNKRVQDIHPTVPNPYNLLSSLPPSHTWYSVLDLKDAFFCLKLHPNSQPLFAFEWRDPEKGNTGQLTWTRLPQGFKNSPTLFNEALHRDLASFRALNPQVVMLQYVDDLLVAAPTYRDCKEGTRRLLQELSKLGYRVSAKKAQLCREEVTYLGYLLKGGKRWLTPARKATVMKIPTPTTPRQVREFLGTAGFCRLWIPGFASLAAPLYPLTRPKVPFTWTEAHQEAFGRIKEALLSAPALALPDLTKPFALYVDEKEGVARGVLTQTLGPWRRPVAYLSKKLDPVASGWPTCLKAIAAVALLLKDADKLTLGQNVLVIAPHNLESIVRQPPDRWMTNARMTHYQSLLLNERVSFAPPAILNPATLLPVESDDTPIHICSEILAEETGTRPDLRDQPLPGVPAWYTDGSSFIMDGRRQAGAAIVDNKRTVWASNLPEGTSAQKAELIALTQALRLAEGKSINIYTDSRYAFATAHVHGAIYKQRGWLTSAGKDIKNKEEILALLEAIHLPKRVAIIHCPGHQRGTDPVATGNRKADEAAKQAAQSTRILTETTKNAGKRTADGSEFEKRTADGSEFESPKKKAKVE

SEQ ID NO: 1627 - protein, 2122 aa, synthetic construct
MPAAKRVKLDGGDKKYSIGLDIGTNSVGWAVITDEYKVPSKKFKVLGNTDRHSIKKNLIGALLFDSGETAEATRLKRTARRRYTRRKNRICYLQEIFSNEMAKVDDSFFHRLEESFLVEEDKKHERHPIFGNIVDEVAYHEKYPTIYHLRKKLVDSTDKADLRLIYLALAHMIKFRGHFLIEGDLNPDNSDVDKLFIQLVQTYNQLFEENPINASGVDAKAILSARLSKSRRLENLIAQLPGEKKNGLFGNLIALSLGLTPNFKSNFDLAEDAKLQLSKDTYDDDLDNLLAQIGDQYADLFLAAKNLSDAILLSDILRVNTEITKAPLSASMIKRYDEHHQDLTLLKALVRQQLPEKYKEIFFDQSKNGYAGYIDGGASQEEFYKFIKPILEKMDGTEELLVKLNREDLLRKQRTFDNGSIPHQIHLGELHAILRRQEDFYPFLKDNREKIEKILTFRIPYYVGPLARGNSRFAWMTRKSEETITPWNFEEVVDKGASAQSFIERMTNFDKNLPNEKVLPKHSLLYEYFTVYNELTKVKYVTEGMRKPAFLSGEQKKAIVDLLFKTNRKVTVKQLKEDYFKKIECFDSVEISGVEDRFNASLGTYHDLLKIIKDKDFLDNEENEDILEDIVLTLTLFEDREMIEERLKTYAHLFDDKVMKQLKRRRYTGWGRLSRKLINGIRDKQSGKTILDFLKSDGFANRNFMQLIHDDSLTFKEDIQKAQVSGQGDSLHEHIANLAGSPAIKKGILQTVKVVDELVKVMGRHKPENIVIEMARENQTTQKGQKNSRERMKRIEEGIKELGSQILKEHPVENTQLQNEKLYLYYLQNGRDMYVDQELDINRLSDYDVDHIVPQSFLKDDSIDNKVLTRSDKARGKSDNVPSEEVVKKMKNYWRQLLNAKLITQRKFDNLTKAERGGLSELDKAGFIKRQLVETRQITKHVAQILDSRMNTKYDENDKLIREVKVITLKSKLVSDFRKDFQFYKVREINNYHHAHDAYLNAVVGTALIKKYPKLESEFVYGDYKVYDVRKMIAKSEQEIGKATAKYFFYSNIMNFFKTEITLANGEIRKRPLIETNGETGEIVWDKGRDFATVRKVLSMPQVNIVKKTEVQTGGFSKESILPKRNSDKLIARKKDWDPKKYGGFDSPTVAYSVLVVAKVEKGKSKKLKSVKELLGITIMERSSFEKNPIDFLEAKGYKEVKKDLIIKLPKYSLFELENGRKRMLASAGELQKGNELALPSKYVNFLYLASHYEKLKGSPEDNEQKQLFVEQHKHYLDEIIEQISEFSKRVILADANLDKVLSAYNKHRDKPIREQAENIIHLFTLTNLGAPAAFKYFDTTIDRKRYTSTKEVLDATLIHQSITGLYETRIDLSQLGGDGGPAPGSSGGLLGRDLLTKLKAQIQFSTEGPQVTWEDRPAMCLVLNLEEEYRLHEKPVPPSIDPSWLQLFPMVWAEKAGMGLANQVPPVVVELKSDASPVAVRQYPMSKEAREGIRPHIQRFLDLGILVPCQSPWNTPLLPVKKPGTNDYRPVQDLREVNKRVQDIHPTVPNPYNLLSSLPPSHTWYSVLDLKDAFFCLKLHPNSQPLFAFEWRDPEKGNTGQLTWTRLPQGFKNSPTLFNEALHRDLASFRALNPQVVMLQYVDDLLVAAPTYRDCKEGTRRLLQELSKLGYRVSAKKAQLCREEVTYLGYLLKGGKRWLTPARKATVMKIPTPTTPRQVREFLGTAGFCRLWIPGFASLAAPLYPLTRPKVPFTWTEAHQEAFGRIKEALLSAPALALPDLTKPFALYVDEKEGVARGVLTQTLGPWRRPVAYLSKKLDPVASGWPTCLKAIAAVALLLKDADKLTLGQNVLVIAPHNLESIVRQPPDRWMTNARMTHYQSLLLNERVSFAPPAILNPATLLPVESDDTPIHICSEILAEETGTRPDLRDQPLPGVPAWYTDGSSFIMDGRRQAGAAIVDNKRTVWASNLPEGTSAQKAELIALTQALRLAEGKSINIYTDSRYAFATAHVHGAIYKQRGWLTSAGKDIKNKEEILALLEAIHLPKRVAIIHCPGHQRGTDPVATGNRKADEAAKQAAQSTRILTETTKNAGKRTADGSEFEKRTADGSEFESPKKKAKVE

SEQ ID NO: 1628 - protein, 2122 aa, synthetic construct
MPAAKRVKLDGGDKKYSIGLDIGTNSVGWAVITDEYKVPSKKFKVLGNTDRHSIKKNLIGALLFDSGETAEATRLKRTARRRYTRRKNRICYLQEIFSNEMAKVDDSFFHRLEESFLVEEDKKHERHPIFGNIVDEVAYHEKYPTIYHLRKKLVDSTDKADLRLIYLALAHMIKFRGHFLIEGDLNPDNSDVDKLFIQLVQTYNQLFEENPINASGVDAKAILSARLSKSRRLENLIAQLPGEKKNGLFGNLIALSLGLTPNFKSNFDLAEDAKLQLSKDTYDDDLDNLLAQIGDQYADLFLAAKNLSDAILLSDILRVNTEITKAPLSASMIKRYDEHHQDLTLLKALVRQQLPEKYKEIFFDQSKNGYAGYIDGGASQEEFYKFIKPILEKMDGTEELLVKLNREDLLRKQRTFDNGSIPHQIHLGELHAILRRQEDFYPFLKDNREKIEKILTFRIPYYVGPLARGNSRFAWMTRKSEETITPWNFEEVVDKGASAQSFIERMTNFDKNLPNEKVLPKHSLLYEYFTVYNELTKVKYVTEGMRKPAFLSGEQKKAIVDLLFKTNRKVTVKQLKEDYFKKIECFDSVEISGVEDRFNASLGTYHDLLKIIKDKDFLDNEENEDILEDIVLTLTLFEDREMIEERLKTYAHLFDDKVMKQLKRRRYTGWGRLSRKLINGIRDKQSGKTILDFLKSDGFANRNFMQLIHDDSLTFKEDIQKAQVSGQGDSLHEHIANLAGSPAIKKGILQTVKVVDELVKVMGRHKPENIVIEMARENQTTQKGQKNSRERMKRIEEGIKELGSQILKEHPVENTQLQNEKLYLYYLQNGRDMYVDQELDINRLSDYDVDHIVPQSFLKDDSIDNKVLTRSDKARGKSDNVPSEEVVKKMKNYWRQLLNAKLITQRKFDNLTKAERGGLSELDKAGFIKRQLVETRQITKHVAQILDSRMNTKYDENDKLIREVKVITLKSKLVSDFRKDFQFYKVREINNYHHAHDAYLNAVVGTALIKKYPKLESEFVYGDYKVYDVRKMIAKSEQEIGKATAKYFFYSNIMNFFKTEITLANGEIRKRPLIETNGETGEIVWDKGRDFATVRKVLSMPQVNIVKKTEVQTGGFSKESILPKRNSDKLIARKKDWDPKKYGGFDSPTVAYSVLVVAKVEKGKSKKLKSVKELLGITIMERSSFEKNPIDFLEAKGYKEVKKDLIIKLPKYSLFELENGRKRMLASAGELQKGNELALPSKYVNFLYLASHYEKLKGSPEDNEQKQLFVEQHKHYLDEIIEQISEFSKRVILADANLDKVLSAYNKHRDKPIREQAENIIHLFTLTNLGAPAAFKYFDTTIDRKRYTSTKEVLDATLIHQSITGLYETRIDLSQLGGDGGGGGGGGGGLLGRDLLTKLKAQIQFSTEGPQVTWEDRPAMCLVLNLEEEYRLHEKPVPPSIDPSWLQLFPMVWAEKAGMGLANQVPPVVVELKSDASPVAVRQYPMSKEAREGIRPHIQRFLDLGILVPCQSPWNTPLLPVKKPGTNDYRPVQDLREVNKRVQDIHPTVPNPYNLLSSLPPSHTWYSVLDLKDAFFCLKLHPNSQPLFAFEWRDPEKGNTGQLTWTRLPQGFKNSPTLFNEALHRDLASFRALNPQVVMLQYVDDLLVAAPTYRDCKEGTRRLLQELSKLGYRVSAKKAQLCREEVTYLGYLLKGGKRWLTPARKATVMKIPTPTTPRQVREFLGTAGFCRLWIPGFASLAAPLYPLTRPKVPFTWTEAHQEAFGRIKEALLSAPALALPDLTKPFALYVDEKEGVARGVLTQTLGPWRRPVAYLSKKLDPVASGWPTCLKAIAAVALLLKDADKLTLGQNVLVIAPHNLESIVRQPPDRWMTNARMTHYQSLLLNERVSFAPPAILNPATLLPVESDDTPIHICSEILAEETGTRPDLRDQPLPGVPAWYTDGSSFIMDGRRQAGAAIVDNKRTVWASNLPEGTSAQKAELIALTQALRLAEGKSINIYTDSRYAFATAHVHGAIYKQRGWLTSAGKDIKNKEEILALLEAIHLPKRVAIIHCPGHQRGTDPVATGNRKADEAAKQAAQSTRILTETTKNAGKRTADGSEFEKRTADGSEFESPKKKAKVE

SEQ ID NO: 1629 - protein, 2124 aa, synthetic construct
MPAAKRVKLDGGDKKYSIGLDIGTNSVGWAVITDEYKVPSKKFKVLGNTDRHSIKKNLIGALLFDSGETAEATRLKRTARRRYTRRKNRICYLQEIFSNEMAKVDDSFFHRLEESFLVEEDKKHERHPIFGNIVDEVAYHEKYPTIYHLRKKLVDSTDKADLRLIYLALAHMIKFRGHFLIEGDLNPDNSDVDKLFIQLVQTYNQLFEENPINASGVDAKAILSARLSKSRRLENLIAQLPGEKKNGLFGNLIALSLGLTPNFKSNFDLAEDAKLQLSKDTYDDDLDNLLAQIGDQYADLFLAAKNLSDAILLSDILRVNTEITKAPLSASMIKRYDEHHQDLTLLKALVRQQLPEKYKEIFFDQSKNGYAGYIDGGASQEEFYKFIKPILEKMDGTEELLVKLNREDLLRKQRTFDNGSIPHQIHLGELHAILRRQEDFYPFLKDNREKIEKILTFRIPYYVGPLARGNSRFAWMTRKSEETITPWNFEEVVDKGASAQSFIERMTNFDKNLPNEKVLPKHSLLYEYFTVYNELTKVKYVTEGMRKPAFLSGEQKKAIVDLLFKTNRKVTVKQLKEDYFKKIECFDSVEISGVEDRFNASLGTYHDLLKIIKDKDFLDNEENEDILEDIVLTLTLFEDREMIEERLKTYAHLFDDKVMKQLKRRRYTGWGRLSRKLINGIRDKQSGKTILDFLKSDGFANRNFMQLIHDDSLTFKEDIQKAQVSGQGDSLHEHIANLAGSPAIKKGILQTVKVVDELVKVMGRHKPENIVIEMARENQTTQKGQKNSRERMKRIEEGIKELGSQILKEHPVENTQLQNEKLYLYYLQNGRDMYVDQELDINRLSDYDVDHIVPQSFLKDDSIDNKVLTRSDKARGKSDNVPSEEVVKKMKNYWRQLLNAKLITQRKFDNLTKAERGGLSELDKAGFIKRQLVETRQITKHVAQILDSRMNTKYDENDKLIREVKVITLKSKLVSDFRKDFQFYKVREINNYHHAHDAYLNAVVGTALIKKYPKLESEFVYGDYKVYDVRKMIAKSEQEIGKATAKYFFYSNIMNFFKTEITLANGEIRKRPLIETNGETGEIVWDKGRDFATVRKVLSMPQVNIVKKTEVQTGGFSKESILPKRNSDKLIARKKDWDPKKYGGFDSPTVAYSVLVVAKVEKGKSKKLKSVKELLGITIMERSSFEKNPIDFLEAKGYKEVKKDLIIKLPKYSLFELENGRKRMLASAGELQKGNELALPSKYVNFLYLASHYEKLKGSPEDNEQKQLFVEQHKHYLDEIIEQISEFSKRVILADANLDKVLSAYNKHRDKPIREQAENIIHLFTLTNLGAPAAFKYFDTTIDRKRYTSTKEVLDATLIHQSITGLYETRIDLSQLGGDGGGGGEAAAKGGLLGRDLLTKLKAQIQFSTEGPQVTWEDRPAMCLVLNLEEEYRLHEKPVPPSIDPSWLQLFPMVWAEKAGMGLANQVPPVVVELKSDASPVAVRQYPMSKEAREGIRPHIQRFLDLGILVPCQSPWNTPLLPVKKPGTNDYRPVQDLREVNKRVQDIHPTVPNPYNLLSSLPPSHTWYSVLDLKDAFFCLKLHPNSQPLFAFEWRDPEKGNTGQLTWTRLPQGFKNSPTLFNEALHRDLASFRALNPQVVMLQYVDDLLVAAPTYRDCKEGTRRLLQELSKLGYRVSAKKAQLCREEVTYLGYLLKGGKRWLTPARKATVMKIPTPTTPRQVREFLGTAGFCRLWIPGFASLAAPLYPLTRPKVPFTWTEAHQEAFGRIKEALLSAPALALPDLTKPFALYVDEKEGVARGVLTQTLGPWRRPVAYLSKKLDPVASGWPTCLKAIAAVALLLKDADKLTLGQNVLVIAPHNLESIVRQPPDRWMTNARMTHYQSLLLNERVSFAPPAILNPATLLPVESDDTPIHICSEILAEETGTRPDLRDQPLPGVPAWYTDGSSFIMDGRRQAGAAIVDNKRTVWASNLPEGTSAQKAELIALTQALRLAEGKSINIYTDSRYAFATAHVHGAIYKQRGWLTSAGKDIKNKEEILALLEAIHLPKRVAIIHCPGHQRGTDPVATGNRKADEAAKQAAQSTRILTETTKNAGKRTADGSEFEKRTADGSEFESPKKKAKVE

SEQ ID NO: 1630 - protein, 2124 aa, synthetic construct
MPAAKRVKLDGGDKKYSIGLDIGTNSVGWAVITDEYKVPSKKFKVLGNTDRHSIKKNLIGALLFDSGETAEATRLKRTARRRYTRRKNRICYLQEIFSNEMAKVDDSFFHRLEESFLVEEDKKHERHPIFGNIVDEVAYHEKYPTIYHLRKKLVDSTDKADLRLIYLALAHMIKFRGHFLIEGDLNPDNSDVDKLFIQLVQTYNQLFEENPINASGVDAKAILSARLSKSRRLENLIAQLPGEKKNGLFGNLIALSLGLTPNFKSNFDLAEDAKLQLSKDTYDDDLDNLLAQIGDQYADLFLAAKNLSDAILLSDILRVNTEITKAPLSASMIKRYDEHHQDLTLLKALVRQQLPEKYKEIFFDQSKNGYAGYIDGGASQEEFYKFIKPILEKMDGTEELLVKLNREDLLRKQRTFDNGSIPHQIHLGELHAILRRQEDFYPFLKDNREKIEKILTFRIPYYVGPLARGNSRFAWMTRKSEETITPWNFEEVVDKGASAQSFIERMTNFDKNLPNEKVLPKHSLLYEYFTVYNELTKVKYVTEGMRKPAFLSGEQKKAIVDLLFKTNRKVTVKQLKEDYFKKIECFDSVEISGVEDRFNASLGTYHDLLKIIKDKDFLDNEENEDILEDIVLTLTLFEDREMIEERLKTYAHLFDDKVMKQLKRRRYTGWGRLSRKLINGIRDKQSGKTILDFLKSDGFANRNFMQLIHDDSLTFKEDIQKAQVSGQGDSLHEHIANLAGSPAIKKGILQTVKVVDELVKVMGRHKPENIVIEMARENQTTQKGQKNSRERMKRIEEGIKELGSQILKEHPVENTQLQNEKLYLYYLQNGRDMYVDQELDINRLSDYDVDHIVPQSFLKDDSIDNKVLTRSDKARGKSDNVPSEEVVKKMKNYWRQLLNAKLITQRKFDNLTKAERGGLSELDKAGFIKRQLVETRQITKHVAQILDSRMNTKYDENDKLIREVKVITLKSKLVSDFRKDFQFYKVREINNYHHAHDAYLNAVVGTALIKKYPKLESEFVYGDYKVYDVRKMIAKSEQEIGKATAKYFFYSNIMNFFKTEITLANGEIRKRPLIETNGETGEIVWDKGRDFATVRKVLSMPQVNIVKKTEVQTGGFSKESILPKRNSDKLIARKKDWDPKKYGGFDSPTVAYSVLVVAKVEKGKSKKLKSVKELLGITIMERSSFEKNPIDFLEAKGYKEVKKDLIIKLPKYSLFELENGRKRMLASAGELQKGNELALPSKYVNFLYLASHYEKLKGSPEDNEQKQLFVEQHKHYLDEIIEQISEFSKRVILADANLDKVLSAYNKHRDKPIREQAENIIHLFTLTNLGAPAAFKYFDTTIDRKRYTSTKEVLDATLIHQSITGLYETRIDLSQLGGDGGEAAAKGSSGGLLGRDLLTKLKAQIQFSTEGPQVTWEDRPAMCLVLNLEEEYRLHEKPVPPSIDPSWLQLFPMVWAEKAGMGLANQVPPVVVELKSDASPVAVRQYPMSKEAREGIRPHIQRFLDLGILVPCQSPWNTPLLPVKKPGTNDYRPVQDLREVNKRVQDIHPTVPNPYNLLSSLPPSHTWYSVLDLKDAFFCLKLHPNSQPLFAFEWRDPEKGNTGQLTWTRLPQGFKNSPTLFNEALHRDLASFRALNPQVVMLQYVDDLLVAAPTYRDCKEGTRRLLQELSKLGYRVSAKKAQLCREEVTYLGYLLKGGKRWLTPARKATVMKIPTPTTPRQVREFLGTAGFCRLWIPGFASLAAPLYPLTRPKVPFTWTEAHQEAFGRIKEALLSAPALALPDLTKPFALYVDEKEGVARGVLTQTLGPWRRPVAYLSKKLDPVASGWPTCLKAIAAVALLLKDADKLTLGQNVLVIAPHNLESIVRQPPDRWMTNARMTHYQSLLLNERVSFAPPAILNPATLLPVESDDTPIHICSEILAEETGTRPDLRDQPLPGVPAWYTDGSSFIMDGRRQAGAAIVDNKRTVWASNLPEGTSAQKAELIALTQALRLAEGKSINIYTDSRYAFATAHVHGAIYKQRGWLTSAGKDIKNKEEILALLEAIHLPKRVAIIHCPGHQRGTDPVATGNRKADEAAKQAAQSTRILTETTKNAGKRTADGSEFEKRTADGSEFESPKKKAKVE

SEQ ID NO: 1631 - protein, 2119 aa, synthetic construct
MPAAKRVKLDGGDKKYSIGLDIGTNSVGWAVITDEYKVPSKKFKVLGNTDRHSIKKNLIGALLFDSGETAEATRLKRTARRRYTRRKNRICYLQEIFSNEMAKVDDSFFHRLEESFLVEEDKKHERHPIFGNIVDEVAYHEKYPTIYHLRKKLVDSTDKADLRLIYLALAHMIKFRGHFLIEGDLNPDNSDVDKLFIQLVQTYNQLFEENPINASGVDAKAILSARLSKSRRLENLIAQLPGEKKNGLFGNLIALSLGLTPNFKSNFDLAEDAKLQLSKDTYDDDLDNLLAQIGDQYADLFLAAKNLSDAILLSDILRVNTEITKAPLSASMIKRYDEHHQDLTLLKALVRQQLPEKYKEIFFDQSKNGYAGYIDGGASQEEFYKFIKPILEKMDGTEELLVKLNREDLLRKQRTFDNGSIPHQIHLGELHAILRRQEDFYPFLKDNREKIEKILTFRIPYYVGPLARGNSRFAWMTRKSEETITPWNFEEVVDKGASAQSFIERMTNFDKNLPNEKVLPKHSLLYEYFTVYNELTKVKYVTEGMRKPAFLSGEQKKAIVDLLFKTNRKVTVKQLKEDYFKKIECFDSVEISGVEDRFNASLGTYHDLLKIIKDKDFLDNEENEDILEDIVLTLTLFEDREMIEERLKTYAHLFDDKVMKQLKRRRYTGWGRLSRKLINGIRDKQSGKTILDFLKSDGFANRNFMQLIHDDSLTFKEDIQKAQVSGQGDSLHEHIANLAGSPAIKKGILQTVKVVDELVKVMGRHKPENIVIEMARENQTTQKGQKNSRERMKRIEEGIKELGSQILKEHPVENTQLQNEKLYLYYLQNGRDMYVDQELDINRLSDYDVDHIVPQSFLKDDSIDNKVLTRSDKARGKSDNVPSEEVVKKMKNYWRQLLNAKLITQRKFDNLTKAERGGLSELDKAGFIKRQLVETRQITKHVAQILDSRMNTKYDENDKLIREVKVITLKSKLVSDFRKDFQFYKVREINNYHHAHDAYLNAVVGTALIKKYPKLESEFVYGDYKVYDVRKMIAKSEQEIGKATAKYFFYSNIMNFFKTEITLANGEIRKRPLIETNGETGEIVWDKGRDFATVRKVLSMPQVNIVKKTEVQTGGFSKESILPKRNSDKLIARKKDWDPKKYGGFDSPTVAYSVLVVAKVEKGKSKKLKSVKELLGITIMERSSFEKNPIDFLEAKGYKEVKKDLIIKLPKYSLFELENGRKRMLASAGELQKGNELALPSKYVNFLYLASHYEKLKGSPEDNEQKQLFVEQHKHYLDEIIEQISEFSKRVILADANLDKVLSAYNKHRDKPIREQAENIIHLFTLTNLGAPAAFKYFDTTIDRKRYTSTKEVLDATLIHQSITGLYETRIDLSQLGGDGGPAPGGLLGRDLLTKLKAQIQFSTEGPQVTWEDRPAMCLVLNLEEEYRLHEKPVPPSIDPSWLQLFPMVWAEKAGMGLANQVPPVVVELKSDASPVAVRQYPMSKEAREGIRPHIQRFLDLGILVPCQSPWNTPLLPVKKPGTNDYRPVQDLREVNKRVQDIHPTVPNPYNLLSSLPPSHTWYSVLDLKDAFFCLKLHPNSQPLFAFEWRDPEKGNTGQLTWTRLPQGFKNSPTLFNEALHRDLASFRALNPQVVMLQYVDDLLVAAPTYRDCKEGTRRLLQELSKLGYRVSAKKAQLCREEVTYLGYLLKGGKRWLTPARKATVMKIPTPTTPRQVREFLGTAGFCRLWIPGFASLAAPLYPLTRPKVPFTWTEAHQEAFGRIKEALLSAPALALPDLTKPFALYVDEKEGVARGVLTQTLGPWRRPVAYLSKKLDPVASGWPTCLKAIAAVALLLKDADKLTLGQNVLVIAPHNLESIVRQPPDRWMTNARMTHYQSLLLNERVSFAPPAILNPATLLPVESDDTPIHICSEILAEETGTRPDLRDQPLPGVPAWYTDGSSFIMDGRRQAGAAIVDNKRTVWASNLPEGTSAQKAELIALTQALRLAEGKSINIYTDSRYAFATAHVHGAIYKQRGWLTSAGKDIKNKEEILALLEAIHLPKRVAIIHCPGHQRGTDPVATGNRKADEAAKQAAQSTRILTETTKNAGKRTADGSEFEKRTADGSEFESPKKKAKVE

SEQ ID NO: 1632 - protein, 2141 aa, synthetic construct
MPAAKRVKLDGGDKKYSIGLDIGTNSVGWAVITDEYKVPSKKFKVLGNTDRHSIKKNLIGALLFDSGETAEATRLKRTARRRYTRRKNRICYLQEIFSNEMAKVDDSFFHRLEESFLVEEDKKHERHPIFGNIVDEVAYHEKYPTIYHLRKKLVDSTDKADLRLIYLALAHMIKFRGHFLIEGDLNPDNSDVDKLFIQLVQTYNQLFEENPINASGVDAKAILSARLSKSRRLENLIAQLPGEKKNGLFGNLIALSLGLTPNFKSNFDLAEDAKLQLSKDTYDDDLDNLLAQIGDQYADLFLAAKNLSDAILLSDILRVNTEITKAPLSASMIKRYDEHHQDLTLLKALVRQQLPEKYKEIFFDQSKNGYAGYIDGGASQEEFYKFIKPILEKMDGTEELLVKLNREDLLRKQRTFDNGSIPHQIHLGELHAILRRQEDFYPFLKDNREKIEKILTFRIPYYVGPLARGNSRFAWMTRKSEETITPWNFEEVVDKGASAQSFIERMTNFDKNLPNEKVLPKHSLLYEYFTVYNELTKVKYVTEGMRKPAFLSGEQKKAIVDLLFKTNRKVTVKQLKEDYFKKIECFDSVEISGVEDRFNASLGTYHDLLKIIKDKDFLDNEENEDILEDIVLTLTLFEDREMIEERLKTYAHLFDDKVMKQLKRRRYTGWGRLSRKLINGIRDKQSGKTILDFLKSDGFANRNFMQLIHDDSLTFKEDIQKAQVSGQGDSLHEHIANLAGSPAIKKGILQTVKVVDELVKVMGRHKPENIVIEMARENQTTQKGQKNSRERMKRIEEGIKELGSQILKEHPVENTQLQNEKLYLYYLQNGRDMYVDQELDINRLSDYDVDHIVPQSFLKDDSIDNKVLTRSDKARGKSDNVPSEEVVKKMKNYWRQLLNAKLITQRKFDNLTKAERGGLSELDKAGFIKRQLVETRQITKHVAQILDSRMNTKYDENDKLIREVKVITLKSKLVSDFRKDFQFYKVREINNYHHAHDAYLNAVVGTALIKKYPKLESEFVYGDYKVYDVRKMIAKSEQEIGKATAKYFFYSNIMNFFKTEITLANGEIRKRPLIETNGETGEIVWDKGRDFATVRKVLSMPQVNIVKKTEVQTGGFSKESILPKRNSDKLIARKKDWDPKKYGGFDSPTVAYSVLVVAKVEKGKSKKLKSVKELLGITIMERSSFEKNPIDFLEAKGYKEVKKDLIIKLPKYSLFELENGRKRMLASAGELQKGNELALPSKYVNFLYLASHYEKLKGSPEDNEQKQLFVEQHKHYLDEIIEQISEFSKRVILADANLDKVLSAYNKHRDKPIREQAENIIHLFTLTNLGAPAAFKYFDTTIDRKRYTSTKEVLDATLIHQSITGLYETRIDLSQLGGDGGEAAAKEAAAKEAAAKEAAAKEAAAKGGLLGRDLLTKLKAQIQFSTEGPQVTWEDRPAMCLVLNLEEEYRLHEKPVPPSIDPSWLQLFPMVWAEKAGMGLANQVPPVVVELKSDASPVAVRQYPMSKEAREGIRPHIQRFLDLGILVPCQSPWNTPLLPVKKPGTNDYRPVQDLREVNKRVQDIHPTVPNPYNLLSSLPPSHTWYSVLDLKDAFFCLKLHPNSQPLFAFEWRDPEKGNTGQLTWTRLPQGFKNSPTLFNEALHRDLASFRALNPQVVMLQYVDDLLVAAPTYRDCKEGTRRLLQELSKLGYRVSAKKAQLCREEVTYLGYLLKGGKRWLTPARKATVMKIPTPTTPRQVREFLGTAGFCRLWIPGFASLAAPLYPLTRPKVPFTWTEAHQEAFGRIKEALLSAPALALPDLTKPFALYVDEKEGVARGVLTQTLGPWRRPVAYLSKKLDPVASGWPTCLKAIAAVALLLKDADKLTLGQNVLVIAPHNLESIVRQPPDRWMTNARMTHYQSLLLNERVSFAPPAILNPATLLPVESDDTPIHICSEILAEETGTRPDLRDQPLPGVPAWYTDGSSFIMDGRRQAGAAIVDNKRTVWASNLPEGTSAQKAELIALTQALRLAEGKSINIYTDSRYAFATAHVHGAIYKQRGWLTSAGKDIKNKEEILALLEAIHLPKRVAIIHCPGHQRGTDPVATGNRKADEAAKQAAQSTRILTETTKNAGKRTADGSEFEKRTADGSEFESPKKKAKVE

SEQ ID NO: 1633 - protein, 2122 aa, synthetic construct
MPAAKRVKLDGGDKKYSIGLDIGTNSVGWAVITDEYKVPSKKFKVLGNTDRHSIKKNLIGALLFDSGETAEATRLKRTARRRYTRRKNRICYLQEIFSNEMAKVDDSFFHRLEESFLVEEDKKHERHPIFGNIVDEVAYHEKYPTIYHLRKKLVDSTDKADLRLIYLALAHMIKFRGHFLIEGDLNPDNSDVDKLFIQLVQTYNQLFEENPINASGVDAKAILSARLSKSRRLENLIAQLPGEKKNGLFGNLIALSLGLTPNFKSNFDLAEDAKLQLSKDTYDDDLDNLLAQIGDQYADLFLAAKNLSDAILLSDILRVNTEITKAPLSASMIKRYDEHHQDLTLLKALVRQQLPEKYKEIFFDQSKNGYAGYIDGGASQEEFYKFIKPILEKMDGTEELLVKLNREDLLRKQRTFDNGSIPHQIHLGELHAILRRQEDFYPFLKDNREKIEKILTFRIPYYVGPLARGNSRFAWMTRKSEETITPWNFEEVVDKGASAQSFIERMTNFDKNLPNEKVLPKHSLLYEYFTVYNELTKVKYVTEGMRKPAFLSGEQKKAIVDLLFKTNRKVTVKQLKEDYFKKIECFDSVEISGVEDRFNASLGTYHDLLKIIKDKDFLDNEENEDILEDIVLTLTLFEDREMIEERLKTYAHLFDDKVMKQLKRRRYTGWGRLSRKLINGIRDKQSGKTILDFLKSDGFANRNFMQLIHDDSLTFKEDIQKAQVSGQGDSLHEHIANLAGSPAIKKGILQTVKVVDELVKVMGRHKPENIVIEMARENQTTQKGQKNSRERMKRIEEGIKELGSQILKEHPVENTQLQNEKLYLYYLQNGRDMYVDQELDINRLSDYDVDHIVPQSFLKDDSIDNKVLTRSDKARGKSDNVPSEEVVKKMKNYWRQLLNAKLITQRKFDNLTKAERGGLSELDKAGFIKRQLVETRQITKHVAQILDSRMNTKYDENDKLIREVKVITLKSKLVSDFRKDFQFYKVREINNYHHAHDAYLNAVVGTALIKKYPKLESEFVYGDYKVYDVRKMIAKSEQEIGKATAKYFFYSNIMNFFKTEITLANGEIRKRPLIETNGETGEIVWDKGRDFATVRKVLSMPQVNIVKKTEVQTGGFSKESILPKRNSDKLIARKKDWDPKKYGGFDSPTVAYSVLVVAKVEKGKSKKLKSVKELLGITIMERSSFEKNPIDFLEAKGYKEVKKDLIIKLPKYSLFELENGRKRMLASAGELQKGNELALPSKYVNFLYLASHYEKLKGSPEDNEQKQLFVEQHKHYLDEIIEQISEFSKRVILADANLDKVLSAYNKHRDKPIREQAENIIHLFTLTNLGAPAAFKYFDTTIDRKRYTSTKEVLDATLIHQSITGLYETRIDLSQLGGDGGGGGPAPGGLLGRDLLTKLKAQIQFSTEGPQVTWEDRPAMCLVLNLEEEYRLHEKPVPPSIDPSWLQLFPMVWAEKAGMGLANQVPPVVVELKSDASPVAVRQYPMSKEAREGIRPHIQRFLDLGILVPCQSPWNTPLLPVKKPGTNDYRPVQDLREVNKRVQDIHPTVPNPYNLLSSLPPSHTWYSVLDLKDAFFCLKLHPNSQPLFAFEWRDPEKGNTGQLTWTRLPQGFKNSPTLFNEALHRDLASFRALNPQVVMLQYVDDLLVAAPTYRDCKEGTRRLLQELSKLGYRVSAKKAQLCREEVTYLGYLLKGGKRWLTPARKATVMKIPTPTTPRQVREFLGTAGFCRLWIPGFASLAAPLYPLTRPKVPFTWTEAHQEAFGRIKEALLSAPALALPDLTKPFALYVDEKEGVARGVLTQTLGPWRRPVAYLSKKLDPVASGWPTCLKAIAAVALLLKDADKLTLGQNVLVIAPHNLESIVRQPPDRWMTNARMTHYQSLLLNERVSFAPPAILNPATLLPVESDDTPIHICSEILAEETGTRPDLRDQPLPGVPAWYTDGSSFIMDGRRQAGAAIVDNKRTVWASNLPEGTSAQKAELIALTQALRLAEGKSINIYTDSRYAFATAHVHGAIYKQRGWLTSAGKDIKNKEEILALLEAIHLPKRVAIIHCPGHQRGTDPVATGNRKADEAAKQAAQSTRILTETTKNAGKRTADGSEFEKRTADGSEFESPKKKAKVE

SEQ ID NO: 1634 - protein, 2127 aa, synthetic construct
MPAAKRVKLDGGDKKYSIGLDIGTNSVGWAVITDEYKVPSKKFKVLGNTDRHSIKKNLIGALLFDSGETAEATRLKRTARRRYTRRKNRICYLQEIFSNEMAKVDDSFFHRLEESFLVEEDKKHERHPIFGNIVDEVAYHEKYPTIYHLRKKLVDSTDKADLRLIYLALAHMIKFRGHFLIEGDLNPDNSDVDKLFIQLVQTYNQLFEENPINASGVDAKAILSARLSKSRRLENLIAQLPGEKKNGLFGNLIALSLGLTPNFKSNFDLAEDAKLQLSKDTYDDDLDNLLAQIGDQYADLFLAAKNLSDAILLSDILRVNTEITKAPLSASMIKRYDEHHQDLTLLKALVRQQLPEKYKEIFFDQSKNGYAGYIDGGASQEEFYKFIKPILEKMDGTEELLVKLNREDLLRKQRTFDNGSIPHQIHLGELHAILRRQEDFYPFLKDNREKIEKILTFRIPYYVGPLARGNSRFAWMTRKSEETITPWNFEEVVDKGASAQSFIERMTNFDKNLPNEKVLPKHSLLYEYFTVYNELTKVKYVTEGMRKPAFLSGEQKKAIVDLLFKTNRKVTVKQLKEDYFKKIECFDSVEISGVEDRFNASLGTYHDLLKIIKDKDFLDNEENEDILEDIVLTLTLFEDREMIEERLKTYAHLFDDKVMKQLKRRRYTGWGRLSRKLINGIRDKQSGKTILDFLKSDGFANRNFMQLIHDDSLTFKEDIQKAQVSGQGDSLHEHIANLAGSPAIKKGILQTVKVVDELVKVMGRHKPENIVIEMARENQTTQKGQKNSRERMKRIEEGIKELGSQILKEHPVENTQLQNEKLYLYYLQNGRDMYVDQELDINRLSDYDVDHIVPQSFLKDDSIDNKVLTRSDKARGKSDNVPSEEVVKKMKNYWRQLLNAKLITQRKFDNLTKAERGGLSELDKAGFIKRQLVETRQITKHVAQILDSRMNTKYDENDKLIREVKVITLKSKLVSDFRKDFQFYKVREINNYHHAHDAYLNAVVGTALIKKYPKLESEFVYGDYKVYDVRKMIAKSEQEIGKATAKYFFYSNIMNFFKTEITLANGEIRKRPLIETNGETGEIVWDKGRDFATVRKVLSMPQVNIVKKTEVQTGGFSKESILPKRNSDKLIARKKDWDPKKYGGFDSPTVAYSVLVVAKVEKGKSKKLKSVKELLGITIMERSSFEKNPIDFLEAKGYKEVKKDLIIKLPKYSLFELENGRKRMLASAGELQKGNELALPSKYVNFLYLASHYEKLKGSPEDNEQKQLFVEQHKHYLDEIIEQISEFSKRVILADANLDKVLSAYNKHRDKPIREQAENIIHLFTLTNLGAPAAFKYFDTTIDRKRYTSTKEVLDATLIHQSITGLYETRIDLSQLGGDGGGSSEAAAKGGGGGLLGRDLLTKLKAQIQFSTEGPQVTWEDRPAMCLVLNLEEEYRLHEKPVPPSIDPSWLQLFPMVWAEKAGMGLANQVPPVVVELKSDASPVAVRQYPMSKEAREGIRPHIQRFLDLGILVPCQSPWNTPLLPVKKPGTNDYRPVQDLREVNKRVQDIHPTVPNPYNLLSSLPPSHTWYSVLDLKDAFFCLKLHPNSQPLFAFEWRDPEKGNTGQLTWTRLPQGFKNSPTLFNEALHRDLASFRALNPQVVMLQYVDDLLVAAPTYRDCKEGTRRLLQELSKLGYRVSAKKAQLCREEVTYLGYLLKGGKRWLTPARKATVMKIPTPTTPRQVREFLGTAGFCRLWIPGFASLAAPLYPLTRPKVPFTWTEAHQEAFGRIKEALLSAPALALPDLTKPFALYVDEKEGVARGVLTQTLGPWRRPVAYLSKKLDPVASGWPTCLKAIAAVALLLKDADKLTLGQNVLVIAPHNLESIVRQPPDRWMTNARMTHYQSLLLNERVSFAPPAILNPATLLPVESDDTPIHICSEILAEETGTRPDLRDQPLPGVPAWYTDGSSFIMDGRRQAGAAIVDNKRTVWASNLPEGTSAQKAELIALTQALRLAEGKSINIYTDSRYAFATAHVHGAIYKQRGWLTSAGKDIKNKEEILALLEAIHLPKRVAIIHCPGHQRGTDPVATGNRKADEAAKQAAQSTRILTETTKNAGKRTADGSEFEKRTADGSEFESPKKKAKVE

SEQ ID NO: 1635 - protein, 2131 aa, synthetic construct
MPAAKRVKLDGGDKKYSIGLDIGTNSVGWAVITDEYKVPSKKFKVLGNTDRHSIKKNLIGALLFDSGETAEATRLKRTARRRYTRRKNRICYLQEIFSNEMAKVDDSFFHRLEESFLVEEDKKHERHPIFGNIVDEVAYHEKYPTIYHLRKKLVDSTDKADLRLIYLALAHMIKFRGHFLIEGDLNPDNSDVDKLFIQLVQTYNQLFEENPINASGVDAKAILSARLSKSRRLENLIAQLPGEKKNGLFGNLIALSLGLTPNFKSNFDLAEDAKLQLSKDTYDDDLDNLLAQIGDQYADLFLAAKNLSDAILLSDILRVNTEITKAPLSASMIKRYDEHHQDLTLLKALVRQQLPEKYKEIFFDQSKNGYAGYIDGGASQEEFYKFIKPILEKMDGTEELLVKLNREDLLRKQRTFDNGSIPHQIHLGELHAILRRQEDFYPFLKDNREKIEKILTFRIPYYVGPLARGNSRFAWMTRKSEETITPWNFEEVVDKGASAQSFIERMTNFDKNLPNEKVLPKHSLLYEYFTVYNELTKVKYVTEGMRKPAFLSGEQKKAIVDLLFKTNRKVTVKQLKEDYFKKIECFDSVEISGVEDRFNASLGTYHDLLKIIKDKDFLDNEENEDILEDIVLTLTLFEDREMIEERLKTYAHLFDDKVMKQLKRRRYTGWGRLSRKLINGIRDKQSGKTILDFLKSDGFANRNFMQLIHDDSLTFKEDIQKAQVSGQGDSLHEHIANLAGSPAIKKGILQTVKVVDELVKVMGRHKPENIVIEMARENQTTQKGQKNSRERMKRIEEGIKELGSQILKEHPVENTQLQNEKLYLYYLQNGRDMYVDQELDINRLSDYDVDHIVPQSFLKDDSIDNKVLTRSDKARGKSDNVPSEEVVKKMKNYWRQLLNAKLITQRKFDNLTKAERGGLSELDKAGFIKRQLVETRQITKHVAQILDSRMNTKYDENDKLIREVKVITLKSKLVSDFRKDFQFYKVREINNYHHAHDAYLNAVVGTALIKKYPKLESEFVYGDYKVYDVRKMIAKSEQEIGKATAKYFFYSNIMNFFKTEITLANGEIRKRPLIETNGETGEIVWDKGRDFATVRKVLSMPQVNIVKKTEVQTGGFSKESILPKRNSDKLIARKKDWDPKKYGGFDSPTVAYSVLVVAKVEKGKSKKLKSVKELLGITIMERSSFEKNPIDFLEAKGYKEVKKDLIIKLPKYSLFELENGRKRMLASAGELQKGNELALPSKYVNFLYLASHYEKLKGSPEDNEQKQLFVEQHKHYLDEIIEQISEFSKRVILADANLDKVLSAYNKHRDKPIREQAENIIHLFTLTNLGAPAAFKYFDTTIDRKRYTSTKEVLDATLIHQSITGLYETRIDLSQLGGDGGGGGGSEAAAKGGGGSGGLLGRDLLTKLKAQIQFSTEGPQVTWEDRPAMCLVLNLEEEYRLHEKPVPPSIDPSWLQLFPMVWAEKAGMGLANQVPPVVVELKSDASPVAVRQYPMSKEAREGIRPHIQRFLDLGILVPCQSPWNTPLLPVKKPGTNDYRPVQDLREVNKRVQDIHPTVPNPYNLLSSLPPSHTWYSVLDLKDAFFCLKLHPNSQPLFAFEWRDPEKGNTGQLTWTRLPQGFKNSPTLFNEALHRDLASFRALNPQVVMLQYVDDLLVAAPTYRDCKEGTRRLLQELSKLGYRVSAKKAQLCREEVTYLGYLLKGGKRWLTPARKATVMKIPTPTTPRQVREFLGTAGFCRLWIPGFASLAAPLYPLTRPKVPFTWTEAHQEAFGRIKEALLSAPALALPDLTKPFALYVDEKEGVARGVLTQTLGPWRRPVAYLSKKLDPVASGWPTCLKAIAAVALLLKDADKLTLGQNVLVIAPHNLESIVRQPPDRWMTNARMTHYQSLLLNERVSFAPPAILNPATLLPVESDDTPIHICSEILAEETGTRPDLRDQPLPGVPAWYTDGSSFIMDGRRQAGAAIVDNKRTVWASNLPEGTSAQKAELIALTQALRLAEGKSINIYTDSRYAFATAHVHGAIYKQRGWLTSAGKDIKNKEEILALLEAIHLPKRVAIIHCPGHQRGTDPVATGNRKADEAAKQAAQSTRILTETTKNAGKRTADGSEFEKRTADGSEFESPKKKAKVE

SEQ ID NO: 1636 - protein, 2122 aa, synthetic construct
MPAAKRVKLDGGDKKYSIGLDIGTNSVGWAVITDEYKVPSKKFKVLGNTDRHSIKKNLIGALLFDSGETAEATRLKRTARRRYTRRKNRICYLQEIFSNEMAKVDDSFFHRLEESFLVEEDKKHERHPIFGNIVDEVAYHEKYPTIYHLRKKLVDSTDKADLRLIYLALAHMIKFRGHFLIEGDLNPDNSDVDKLFIQLVQTYNQLFEENPINASGVDAKAILSARLSKSRRLENLIAQLPGEKKNGLFGNLIALSLGLTPNFKSNFDLAEDAKLQLSKDTYDDDLDNLLAQIGDQYADLFLAAKNLSDAILLSDILRVNTEITKAPLSASMIKRYDEHHQDLTLLKALVRQQLPEKYKEIFFDQSKNGYAGYIDGGASQEEFYKFIKPILEKMDGTEELLVKLNREDLLRKQRTFDNGSIPHQIHLGELHAILRRQEDFYPFLKDNREKIEKILTFRIPYYVGPLARGNSRFAWMTRKSEETITPWNFEEVVDKGASAQSFIERMTNFDKNLPNEKVLPKHSLLYEYFTVYNELTKVKYVTEGMRKPAFLSGEQKKAIVDLLFKTNRKVTVKQLKEDYFKKIECFDSVEISGVEDRFNASLGTYHDLLKIIKDKDFLDNEENEDILEDIVLTLTLFEDREMIEERLKTYAHLFDDKVMKQLKRRRYTGWGRLSRKLINGIRDKQSGKTILDFLKSDGFANRNFMQLIHDDSLTFKEDIQKAQVSGQGDSLHEHIANLAGSPAIKKGILQTVKVVDELVKVMGRHKPENIVIEMARENQTTQKGQKNSRERMKRIEEGIKELGSQILKEHPVENTQLQNEKLYLYYLQNGRDMYVDQELDINRLSDYDVDHIVPQSFLKDDSIDNKVLTRSDKARGKSDNVPSEEVVKKMKNYWRQLLNAKLITQRKFDNLTKAERGGLSELDKAGFIKRQLVETRQITKHVAQILDSRMNTKYDENDKLIREVKVITLKSKLVSDFRKDFQFYKVREINNYHHAHDAYLNAVVGTALIKKYPKLESEFVYGDYKVYDVRKMIAKSEQEIGKATAKYFFYSNIMNFFKTEITLANGEIRKRPLIETNGETGEIVWDKGRDFATVRKVLSMPQVNIVKKTEVQTGGFSKESILPKRNSDKLIARKKDWDPKKYGGFDSPTVAYSVLVVAKVEKGKSKKLKSVKELLGITIMERSSFEKNPIDFLEAKGYKEVKKDLIIKLPKYSLFELENGRKRMLASAGELQKGNELALPSKYVNFLYLASHYEKLKGSPEDNEQKQLFVEQHKHYLDEIIEQISEFSKRVILADANLDKVLSAYNKHRDKPIREQAENIIHLFTLTNLGAPAAFKYFDTTIDRKRYTSTKEVLDATLIHQSITGLYETRIDLSQLGGDGGPAPGGSGGLLGRDLLTKLKAQIQFSTEGPQVTWEDRPAMCLVLNLEEEYRLHEKPVPPSIDPSWLQLFPMVWAEKAGMGLANQVPPVVVELKSDASPVAVRQYPMSKEAREGIRPHIQRFLDLGILVPCQSPWNTPLLPVKKPGTNDYRPVQDLREVNKRVQDIHPTVPNPYNLLSSLPPSHTWYSVLDLKDAFFCLKLHPNSQPLFAFEWRDPEKGNTGQLTWTRLPQGFKNSPTLFNEALHRDLASFRALNPQVVMLQYVDDLLVAAPTYRDCKEGTRRLLQELSKLGYRVSAKKAQLCREEVTYLGYLLKGGKRWLTPARKATVMKIPTPTTPRQVREFLGTAGFCRLWIPGFASLAAPLYPLTRPKVPFTWTEAHQEAFGRIKEALLSAPALALPDLTKPFALYVDEKEGVARGVLTQTLGPWRRPVAYLSKKLDPVASGWPTCLKAIAAVALLLKDADKLTLGQNVLVIAPHNLESIVRQPPDRWMTNARMTHYQSLLLNERVSFAPPAILNPATLLPVESDDTPIHICSEILAEETGTRPDLRDQPLPGVPAWYTDGSSFIMDGRRQAGAAIVDNKRTVWASNLPEGTSAQKAELIALTQALRLAEGKSINIYTDSRYAFATAHVHGAIYKQRGWLTSAGKDIKNKEEILALLEAIHLPKRVAIIHCPGHQRGTDPVATGNRKADEAAKQAAQSTRILTETTKNAGKRTADGSEFEKRTADGSEFESPKKKAKVE

SEQ ID NO: 1637 - protein, 2122 aa, synthetic construct
MPAAKRVKLDGGDKKYSIGLDIGTNSVGWAVITDEYKVPSKKFKVLGNTDRHSIKKNLIGALLFDSGETAEATRLKRTARRRYTRRKNRICYLQEIFSNEMAKVDDSFFHRLEESFLVEEDKKHERHPIFGNIVDEVAYHEKYPTIYHLRKKLVDSTDKADLRLIYLALAHMIKFRGHFLIEGDLNPDNSDVDKLFIQLVQTYNQLFEENPINASGVDAKAILSARLSKSRRLENLIAQLPGEKKNGLFGNLIALSLGLTPNFKSNFDLAEDAKLQLSKDTYDDDLDNLLAQIGDQYADLFLAAKNLSDAILLSDILRVNTEITKAPLSASMIKRYDEHHQDLTLLKALVRQQLPEKYKEIFFDQSKNGYAGYIDGGASQEEFYKFIKPILEKMDGTEELLVKLNREDLLRKQRTFDNGSIPHQIHLGELHAILRRQEDFYPFLKDNREKIEKILTFRIPYYVGPLARGNSRFAWMTRKSEETITPWNFEEVVDKGASAQSFIERMTNFDKNLPNEKVLPKHSLLYEYFTVYNELTKVKYVTEGMRKPAFLSGEQKKAIVDLLFKTNRKVTVKQLKEDYFKKIECFDSVEISGVEDRFNASLGTYHDLLKIIKDKDFLDNEENEDILEDIVLTLTLFEDREMIEERLKTYAHLFDDKVMKQLKRRRYTGWGRLSRKLINGIRDKQSGKTILDFLKSDGFANRNFMQLIHDDSLTFKEDIQKAQVSGQGDSLHEHIANLAGSPAIKKGILQTVKVVDELVKVMGRHKPENIVIEMARENQTTQKGQKNSRERMKRIEEGIKELGSQILKEHPVENTQLQNEKLYLYYLQNGRDMYVDQELDINRLSDYDVDHIVPQSFLKDDSIDNKVLTRSDKARGKSDNVPSEEVVKKMKNYWRQLLNAKLITQRKFDNLTKAERGGLSELDKAGFIKRQLVETRQITKHVAQILDSRMNTKYDENDKLIREVKVITLKSKLVSDFRKDFQFYKVREINNYHHAHDAYLNAVVGTALIKKYPKLESEFVYGDYKVYDVRKMIAKSEQEIGKATAKYFFYSNIMNFFKTEITLANGEIRKRPLIETNGETGEIVWDKGRDFATVRKVLSMPQVNIVKKTEVQTGGFSKESILPKRNSDKLIARKKDWDPKKYGGFDSPTVAYSVLVVAKVEKGKSKKLKSVKELLGITIMERSSFEKNPIDFLEAKGYKEVKKDLIIKLPKYSLFELENGRKRMLASAGELQKGNELALPSKYVNFLYLASHYEKLKGSPEDNEQKQLFVEQHKHYLDEIIEQISEFSKRVILADANLDKVLSAYNKHRDKPIREQAENIIHLFTLTNLGAPAAFKYFDTTIDRKRYTSTKEVLDATLIHQSITGLYETRIDLSQLGGDGGGGSGSSGGLLGRDLLTKLKAQIQFSTEGPQVTWEDRPAMCLVLNLEEEYRLHEKPVPPSIDPSWLQLFPMVWAEKAGMGLANQVPPVVVELKSDASPVAVRQYPMSKEAREGIRPHIQRFLDLGILVPCQSPWNTPLLPVKKPGTNDYRPVQDLREVNKRVQDIHPTVPNPYNLLSSLPPSHTWYSVLDLKDAFFCLKLHPNSQPLFAFEWRDPEKGNTGQLTWTRLPQGFKNSPTLFNEALHRDLASFRALNPQVVMLQYVDDLLVAAPTYRDCKEGTRRLLQELSKLGYRVSAKKAQLCREEVTYLGYLLKGGKRWLTPARKATVMKIPTPTTPRQVREFLGTAGFCRLWIPGFASLAAPLYPLTRPKVPFTWTEAHQEAFGRIKEALLSAPALALPDLTKPFALYVDEKEGVARGVLTQTLGPWRRPVAYLSKKLDPVASGWPTCLKAIAAVALLLKDADKLTLGQNVLVIAPHNLESIVRQPPDRWMTNARMTHYQSLLLNERVSFAPPAILNPATLLPVESDDTPIHICSEILAEETGTRPDLRDQPLPGVPAWYTDGSSFIMDGRRQAGAAIVDNKRTVWASNLPEGTSAQKAELIALTQALRLAEGKSINIYTDSRYAFATAHVHGAIYKQRGWLTSAGKDIKNKEEILALLEAIHLPKRVAIIHCPGHQRGTDPVATGNRKADEAAKQAAQSTRILTETTKNAGKRTADGSEFEKRTADGSEFESPKKKAKVE

SEQ ID NO: 1638 - protein, 2131 aa, synthetic construct
MPAAKRVKLDGGDKKYSIGLDIGTNSVGWAVITDEYKVPSKKFKVLGNTDRHSIKKNLIGALLFDSGETAEATRLKRTARRRYTRRKNRICYLQEIFSNEMAKVDDSFFHRLEESFLVEEDKKHERHPIFGNIVDEVAYHEKYPTIYHLRKKLVDSTDKADLRLIYLALAHMIKFRGHFLIEGDLNPDNSDVDKLFIQLVQTYNQLFEENPINASGVDAKAILSARLSKSRRLENLIAQLPGEKKNGLFGNLIALSLGLTPNFKSNFDLAEDAKLQLSKDTYDDDLDNLLAQIGDQYADLFLAAKNLSDAILLSDILRVNTEITKAPLSASMIKRYDEHHQDLTLLKALVRQQLPEKYKEIFFDQSKNGYAGYIDGGASQEEFYKFIKPILEKMDGTEELLVKLNREDLLRKQRTFDNGSIPHQIHLGELHAILRRQEDFYPFLKDNREKIEKILTFRIPYYVGPLARGNSRFAWMTRKSEETITPWNFEEVVDKGASAQSFIERMTNFDKNLPNEKVLPKHSLLYEYFTVYNELTKVKYVTEGMRKPAFLSGEQKKAIVDLLFKTNRKVTVKQLKEDYFKKIECFDSVEISGVEDRFNASLGTYHDLLKIIKDKDFLDNEENEDILEDIVLTLTLFEDREMIEERLKTYAHLFDDKVMKQLKRRRYTGWGRLSRKLINGIRDKQSGKTILDFLKSDGFANRNFMQLIHDDSLTFKEDIQKAQVSGQGDSLHEHIANLAGSPAIKKGILQTVKVVDELVKVMGRHKPENIVIEMARENQTTQKGQKNSRERMKRIEEGIKELGSQILKEHPVENTQLQNEKLYLYYLQNGRDMYVDQELDINRLSDYDVDHIVPQSFLKDDSIDNKVLTRSDKARGKSDNVPSEEVVKKMKNYWRQLLNAKLITQRKFDNLTKAERGGLSELDKAGFIKRQLVETRQITKHVAQILDSRMNTKYDENDKLIREVKVITLKSKLVSDFRKDFQFYKVREINNYHHAHDAYLNAVVGTALIKKYPKLESEFVYGDYKVYDVRKMIAKSEQEIGKATAKYFFYSNIMNFFKTEITLANGEIRKRPLIETNGETGEIVWDKGRDFATVRKVLSMPQVNIVKKTEVQTGGFSKESILPKRNSDKLIARKKDWDPKKYGGFDSPTVAYSVLVVAKVEKGKSKKLKSVKELLGITIMERSSFEKNPIDFLEAKGYKEVKKDLIIKLPKYSLFELENGRKRMLASAGELQKGNELALPSKYVNFLYLASHYEKLKGSPEDNEQKQLFVEQHKHYLDEIIEQISEFSKRVILADANLDKVLSAYNKHRDKPIREQAENIIHLFTLTNLGAPAAFKYFDTTIDRKRYTSTKEVLDATLIHQSITGLYETRIDLSQLGGDGGEAAAKGGGGSEAAAKGGLLGRDLLTKLKAQIQFSTEGPQVTWEDRPAMCLVLNLEEEYRLHEKPVPPSIDPSWLQLFPMVWAEKAGMGLANQVPPVVVELKSDASPVAVRQYPMSKEAREGIRPHIQRFLDLGILVPCQSPWNTPLLPVKKPGTNDYRPVQDLREVNKRVQDIHPTVPNPYNLLSSLPPSHTWYSVLDLKDAFFCLKLHPNSQPLFAFEWRDPEKGNTGQLTWTRLPQGFKNSPTLFNEALHRDLASFRALNPQVVMLQYVDDLLVAAPTYRDCKEGTRRLLQELSKLGYRVSAKKAQLCREEVTYLGYLLKGGKRWLTPARKATVMKIPTPTTPRQVREFLGTAGFCRLWIPGFASLAAPLYPLTRPKVPFTWTEAHQEAFGRIKEALLSAPALALPDLTKPFALYVDEKEGVARGVLTQTLGPWRRPVAYLSKKLDPVASGWPTCLKAIAAVALLLKDADKLTLGQNVLVIAPHNLESIVRQPPDRWMTNARMTHYQSLLLNERVSFAPPAILNPATLLPVESDDTPIHICSEILAEETGTRPDLRDQPLPGVPAWYTDGSSFIMDGRRQAGAAIVDNKRTVWASNLPEGTSAQKAELIALTQALRLAEGKSINIYTDSRYAFATAHVHGAIYKQRGWLTSAGKDIKNKEEILALLEAIHLPKRVAIIHCPGHQRGTDPVATGNRKADEAAKQAAQSTRILTETTKNAGKRTADGSEFEKRTADGSEFESPKKKAKVE

SEQ ID NO: 1639 - protein, 2127 aa, synthetic construct
MPAAKRVKLDGGDKKYSIGLDIGTNSVGWAVITDEYKVPSKKFKVLGNTDRHSIKKNLIGALLFDSGETAEATRLKRTARRRYTRRKNRICYLQEIFSNEMAKVDDSFFHRLEESFLVEEDKKHERHPIFGNIVDEVAYHEKYPTIYHLRKKLVDSTDKADLRLIYLALAHMIKFRGHFLIEGDLNPDNSDVDKLFIQLVQTYNQLFEENPINASGVDAKAILSARLSKSRRLENLIAQLPGEKKNGLFGNLIALSLGLTPNFKSNFDLAEDAKLQLSKDTYDDDLDNLLAQIGDQYADLFLAAKNLSDAILLSDILRVNTEITKAPLSASMIKRYDEHHQDLTLLKALVRQQLPEKYKEIFFDQSKNGYAGYIDGGASQEEFYKFIKPILEKMDGTEELLVKLNREDLLRKQRTFDNGSIPHQIHLGELHAILRRQEDFYPFLKDNREKIEKILTFRIPYYVGPLARGNSRFAWMTRKSEETITPWNFEEVVDKGASAQSFIERMTNFDKNLPNEKVLPKHSLLYEYFTVYNELTKVKYVTEGMRKPAFLSGEQKKAIVDLLFKTNRKVTVKQLKEDYFKKIECFDSVEISGVEDRFNASLGTYHDLLKIIKDKDFLDNEENEDILEDIVLTLTLFEDREMIEERLKTYAHLFDDKVMKQLKRRRYTGWGRLSRKLINGIRDKQSGKTILDFLKSDGFANRNFMQLIHDDSLTFKEDIQKAQVSGQGDSLHEHIANLAGSPAIKKGILQTVKVVDELVKVMGRHKPENIVIEMARENQTTQKGQKNSRERMKRIEEGIKELGSQILKEHPVENTQLQNEKLYLYYLQNGRDMYVDQELDINRLSDYDVDHIVPQSFLKDDSIDNKVLTRSDKARGKSDNVPSEEVVKKMKNYWRQLLNAKLITQRKFDNLTKAERGGLSELDKAGFIKRQLVETRQITKHVAQILDSRMNTKYDENDKLIREVKVITLKSKLVSDFRKDFQFYKVREINNYHHAHDAYLNAVVGTALIKKYPKLESEFVYGDYKVYDVRKMIAKSEQEIGKATAKYFFYSNIMNFFKTEITLANGEIRKRPLIETNGETGEIVWDKGRDFATVRKVLSMPQVNIVKKTEVQTGGFSKESILPKRNSDKLIARKKDWDPKKYGGFDSPTVAYSVLVVAKVEKGKSKKLKSVKELLGITIMERSSFEKNPIDFLEAKGYKEVKKDLIIKLPKYSLFELENGRKRMLASAGELQKGNELALPSKYVNFLYLASHYEKLKGSPEDNEQKQLFVEQHKHYLDEIIEQISEFSKRVILADANLDKVLSAYNKHRDKPIREQAENIIHLFTLTNLGAPAAFKYFDTTIDRKRYTSTKEVLDATLIHQSITGLYETRIDLSQLGGDGGGGGGSSEAAAKGGLLGRDLLTKLKAQIQFSTEGPQVTWEDRPAMCLVLNLEEEYRLHEKPVPPSIDPSWLQLFPMVWAEKAGMGLANQVPPVVVELKSDASPVAVRQYPMSKEAREGIRPHIQRFLDLGILVPCQSPWNTPLLPVKKPGTNDYRPVQDLREVNKRVQDIHPTVPNPYNLLSSLPPSHTWYSVLDLKDAFFCLKLHPNSQPLFAFEWRDPEKGNTGQLTWTRLPQGFKNSPTLFNEALHRDLASFRALNPQVVMLQYVDDLLVAAPTYRDCKEGTRRLLQELSKLGYRVSAKKAQLCREEVTYLGYLLKGGKRWLTPARKATVMKIPTPTTPRQVREFLGTAGFCRLWIPGFASLAAPLYPLTRPKVPFTWTEAHQEAFGRIKEALLSAPALALPDLTKPFALYVDEKEGVARGVLTQTLGPWRRPVAYLSKKLDPVASGWPTCLKAIAAVALLLKDADKLTLGQNVLVIAPHNLESIVRQPPDRWMTNARMTHYQSLLLNERVSFAPPAILNPATLLPVESDDTPIHICSEILAEETGTRPDLRDQPLPGVPAWYTDGSSFIMDGRRQAGAAIVDNKRTVWASNLPEGTSAQKAELIALTQALRLAEGKSINIYTDSRYAFATAHVHGAIYKQRGWLTSAGKDIKNKEEILALLEAIHLPKRVAIIHCPGHQRGTDPVATGNRKADEAAKQAAQSTRILTETTKNAGKRTADGSEFEKRTADGSEFESPKKKAKVE

SEQ ID NO: 1640 - protein, 2127 aa, synthetic construct
MPAAKRVKLDGGDKKYSIGLDIGTNSVGWAVITDEYKVPSKKFKVLGNTDRHSIKKNLIGALLFDSGETAEATRLKRTARRRYTRRKNRICYLQEIFSNEMAKVDDSFFHRLEESFLVEEDKKHERHPIFGNIVDEVAYHEKYPTIYHLRKKLVDSTDKADLRLIYLALAHMIKFRGHFLIEGDLNPDNSDVDKLFIQLVQTYNQLFEENPINASGVDAKAILSARLSKSRRLENLIAQLPGEKKNGLFGNLIALSLGLTPNFKSNFDLAEDAKLQLSKDTYDDDLDNLLAQIGDQYADLFLAAKNLSDAILLSDILRVNTEITKAPLSASMIKRYDEHHQDLTLLKALVRQQLPEKYKEIFFDQSKNGYAGYIDGGASQEEFYKFIKPILEKMDGTEELLVKLNREDLLRKQRTFDNGSIPHQIHLGELHAILRRQEDFYPFLKDNREKIEKILTFRIPYYVGPLARGNSRFAWMTRKSEETITPWNFEEVVDKGASAQSFIERMTNFDKNLPNEKVLPKHSLLYEYFTVYNELTKVKYVTEGMRKPAFLSGEQKKAIVDLLFKTNRKVTVKQLKEDYFKKIECFDSVEISGVEDRFNASLGTYHDLLKIIKDKDFLDNEENEDILEDIVLTLTLFEDREMIEERLKTYAHLFDDKVMKQLKRRRYTGWGRLSRKLINGIRDKQSGKTILDFLKSDGFANRNFMQLIHDDSLTFKEDIQKAQVSGQGDSLHEHIANLAGSPAIKKGILQTVKVVDELVKVMGRHKPENIVIEMARENQTTQKGQKNSRERMKRIEEGIKELGSQILKEHPVENTQLQNEKLYLYYLQNGRDMYVDQELDINRLSDYDVDHIVPQSFLKDDSIDNKVLTRSDKARGKSDNVPSEEVVKKMKNYWRQLLNAKLITQRKFDNLTKAERGGLSELDKAGFIKRQLVETRQITKHVAQILDSRMNTKYDENDKLIREVKVITLKSKLVSDFRKDFQFYKVREINNYHHAHDAYLNAVVGTALIKKYPKLESEFVYGDYKVYDVRKMIAKSEQEIGKATAKYFFYSNIMNFFKTEITLANGEIRKRPLIETNGETGEIVWDKGRDFATVRKVLSMPQVNIVKKTEVQTGGFSKESILPKRNSDKLIARKKDWDPKKYGGFDSPTVAYSVLVVAKVEKGKSKKLKSVKELLGITIMERSSFEKNPIDFLEAKGYKEVKKDLIIKLPKYSLFELENGRKRMLASAGELQKGNELALPSKYVNFLYLASHYEKLKGSPEDNEQKQLFVEQHKHYLDEIIEQISEFSKRVILADANLDKVLSAYNKHRDKPIREQAENIIHLFTLTNLGAPAAFKYFDTTIDRKRYTSTKEVLDATLIHQSITGLYETRIDLSQLGGDGGPAPGGSEAAAKGGLLGRDLLTKLKAQIQFSTEGPQVTWEDRPAMCLVLNLEEEYRLHEKPVPPSIDPSWLQLFPMVWAEKAGMGLANQVPPVVVELKSDASPVAVRQYPMSKEAREGIRPHIQRFLDLGILVPCQSPWNTPLLPVKKPGTNDYRPVQDLREVNKRVQDIHPTVPNPYNLLSSLPPSHTWYSVLDLKDAFFCLKLHPNSQPLFAFEWRDPEKGNTGQLTWTRLPQGFKNSPTLFNEALHRDLASFRALNPQVVMLQYVDDLLVAAPTYRDCKEGTRRLLQELSKLGYRVSAKKAQLCREEVTYLGYLLKGGKRWLTPARKATVMKIPTPTTPRQVREFLGTAGFCRLWIPGFASLAAPLYPLTRPKVPFTWTEAHQEAFGRIKEALLSAPALALPDLTKPFALYVDEKEGVARGVLTQTLGPWRRPVAYLSKKLDPVASGWPTCLKAIAAVALLLKDADKLTLGQNVLVIAPHNLESIVRQPPDRWMTNARMTHYQSLLLNERVSFAPPAILNPATLLPVESDDTPIHICSEILAEETGTRPDLRDQPLPGVPAWYTDGSSFIMDGRRQAGAAIVDNKRTVWASNLPEGTSAQKAELIALTQALRLAEGKSINIYTDSRYAFATAHVHGAIYKQRGWLTSAGKDIKNKEEILALLEAIHLPKRVAIIHCPGHQRGTDPVATGNRKADEAAKQAAQSTRILTETTKNAGKRTADGSEFEKRTADGSEFESPKKKAKVE

SEQ ID NO: 1641 - protein, 2127 aa, synthetic construct
MPAAKRVKLDGGDKKYSIGLDIGTNSVGWAVITDEYKVPSKKFKVLGNTDRHSIKKNLIGALLFDSGETAEATRLKRTARRRYTRRKNRICYLQEIFSNEMAKVDDSFFHRLEESFLVEEDKKHERHPIFGNIVDEVAYHEKYPTIYHLRKKLVDSTDKADLRLIYLALAHMIKFRGHFLIEGDLNPDNSDVDKLFIQLVQTYNQLFEENPINASGVDAKAILSARLSKSRRLENLIAQLPGEKKNGLFGNLIALSLGLTPNFKSNFDLAEDAKLQLSKDTYDDDLDNLLAQIGDQYADLFLAAKNLSDAILLSDILRVNTEITKAPLSASMIKRYDEHHQDLTLLKALVRQQLPEKYKEIFFDQSKNGYAGYIDGGASQEEFYKFIKPILEKMDGTEELLVKLNREDLLRKQRTFDNGSIPHQIHLGELHAILRRQEDFYPFLKDNREKIEKILTFRIPYYVGPLARGNSRFAWMTRKSEETITPWNFEEVVDKGASAQSFIERMTNFDKNLPNEKVLPKHSLLYEYFTVYNELTKVKYVTEGMRKPAFLSGEQKKAIVDLLFKTNRKVTVKQLKEDYFKKIECFDSVEISGVEDRFNASLGTYHDLLKIIKDKDFLDNEENEDILEDIVLTLTLFEDREMIEERLKTYAHLFDDKVMKQLKRRRYTGWGRLSRKLINGIRDKQSGKTILDFLKSDGFANRNFMQLIHDDSLTFKEDIQKAQVSGQGDSLHEHIANLAGSPAIKKGILQTVKVVDELVKVMGRHKPENIVIEMARENQTTQKGQKNSRERMKRIEEGIKELGSQILKEHPVENTQLQNEKLYLYYLQNGRDMYVDQELDINRLSDYDVDHIVPQSFLKDDSIDNKVLTRSDKARGKSDNVPSEEVVKKMKNYWRQLLNAKLITQRKFDNLTKAERGGLSELDKAGFIKRQLVETRQITKHVAQILDSRMNTKYDENDKLIREVKVITLKSKLVSDFRKDFQFYKVREINNYHHAHDAYLNAVVGTALIKKYPKLESEFVYGDYKVYDVRKMIAKSEQEIGKATAKYFFYSNIMNFFKTEITLANGEIRKRPLIETNGETGEIVWDKGRDFATVRKVLSMPQVNIVKKTEVQTGGFSKESILPKRNSDKLIARKKDWDPKKYGGFDSPTVAYSVLVVAKVEKGKSKKLKSVKELLGITIMERSSFEKNPIDFLEAKGYKEVKKDLIIKLPKYSLFELENGRKRMLASAGELQKGNELALPSKYVNFLYLASHYEKLKGSPEDNEQKQLFVEQHKHYLDEIIEQISEFSKRVILADANLDKVLSAYNKHRDKPIREQAENIIHLFTLTNLGAPAAFKYFDTTIDRKRYTSTKEVLDATLIHQSITGLYETRIDLSQLGGDGGPAPEAAAKGGSGGLLGRDLLTKLKAQIQFSTEGPQVTWEDRPAMCLVLNLEEEYRLHEKPVPPSIDPSWLQLFPMVWAEKAGMGLANQVPPVVVELKSDASPVAVRQYPMSKEAREGIRPHIQRFLDLGILVPCQSPWNTPLLPVKKPGTNDYRPVQDLREVNKRVQDIHPTVPNPYNLLSSLPPSHTWYSVLDLKDAFFCLKLHPNSQPLFAFEWRDPEKGNTGQLTWTRLPQGFKNSPTLFNEALHRDLASFRALNPQVVMLQYVDDLLVAAPTYRDCKEGTRRLLQELSKLGYRVSAKKAQLCREEVTYLGYLLKGGKRWLTPARKATVMKIPTPTTPRQVREFLGTAGFCRLWIPGFASLAAPLYPLTRPKVPFTWTEAHQEAFGRIKEALLSAPALALPDLTKPFALYVDEKEGVARGVLTQTLGPWRRPVAYLSKKLDPVASGWPTCLKAIAAVALLLKDADKLTLGQNVLVIAPHNLESIVRQPPDRWMTNARMTHYQSLLLNERVSFAPPAILNPATLLPVESDDTPIHICSEILAEETGTRPDLRDQPLPGVPAWYTDGSSFIMDGRRQAGAAIVDNKRTVWASNLPEGTSAQKAELIALTQALRLAEGKSINIYTDSRYAFATAHVHGAIYKQRGWLTSAGKDIKNKEEILALLEAIHLPKRVAIIHCPGHQRGTDPVATGNRKADEAAKQAAQSTRILTETTKNAGKRTADGSEFEKRTADGSEFESPKKKAKVE

SEQ ID NO: 1642 - protein, 2122 aa, synthetic construct
MPAAKRVKLDGGDKKYSIGLDIGTNSVGWAVITDEYKVPSKKFKVLGNTDRHSIKKNLIGALLFDSGETAEATRLKRTARRRYTRRKNRICYLQEIFSNEMAKVDDSFFHRLEESFLVEEDKKHERHPIFGNIVDEVAYHEKYPTIYHLRKKLVDSTDKADLRLIYLALAHMIKFRGHFLIEGDLNPDNSDVDKLFIQLVQTYNQLFEENPINASGVDAKAILSARLSKSRRLENLIAQLPGEKKNGLFGNLIALSLGLTPNFKSNFDLAEDAKLQLSKDTYDDDLDNLLAQIGDQYADLFLAAKNLSDAILLSDILRVNTEITKAPLSASMIKRYDEHHQDLTLLKALVRQQLPEKYKEIFFDQSKNGYAGYIDGGASQEEFYKFIKPILEKMDGTEELLVKLNREDLLRKQRTFDNGSIPHQIHLGELHAILRRQEDFYPFLKDNREKIEKILTFRIPYYVGPLARGNSRFAWMTRKSEETITPWNFEEVVDKGASAQSFIERMTNFDKNLPNEKVLPKHSLLYEYFTVYNELTKVKYVTEGMRKPAFLSGEQKKAIVDLLFKTNRKVTVKQLKEDYFKKIECFDSVEISGVEDRFNASLGTYHDLLKIIKDKDFLDNEENEDILEDIVLTLTLFEDREMIEERLKTYAHLFDDKVMKQLKRRRYTGWGRLSRKLINGIRDKQSGKTILDFLKSDGFANRNFMQLIHDDSLTFKEDIQKAQVSGQGDSLHEHIANLAGSPAIKKGILQTVKVVDELVKVMGRHKPENIVIEMARENQTTQKGQKNSRERMKRIEEGIKELGSQILKEHPVENTQLQNEKLYLYYLQNGRDMYVDQELDINRLSDYDVDHIVPQSFLKDDSIDNKVLTRSDKARGKSDNVPSEEVVKKMKNYWRQLLNAKLITQRKFDNLTKAERGGLSELDKAGFIKRQLVETRQITKHVAQILDSRMNTKYDENDKLIREVKVITLKSKLVSDFRKDFQFYKVREINNYHHAHDAYLNAVVGTALIKKYPKLESEFVYGDYKVYDVRKMIAKSEQEIGKATAKYFFYSNIMNFFKTEITLANGEIRKRPLIETNGETGEIVWDKGRDFATVRKVLSMPQVNIVKKTEVQTGGFSKESILPKRNSDKLIARKKDWDPKKYGGFDSPTVAYSVLVVAKVEKGKSKKLKSVKELLGITIMERSSFEKNPIDFLEAKGYKEVKKDLIIKLPKYSLFELENGRKRMLASAGELQKGNELALPSKYVNFLYLASHYEKLKGSPEDNEQKQLFVEQHKHYLDEIIEQISEFSKRVILADANLDKVLSAYNKHRDKPIREQAENIIHLFTLTNLGAPAAFKYFDTTIDRKRYTSTKEVLDATLIHQSITGLYETRIDLSQLGGDGGGGGGGSGGLLGRDLLTKLKAQIQFSTEGPQVTWEDRPAMCLVLNLEEEYRLHEKPVPPSIDPSWLQLFPMVWAEKAGMGLANQVPPVVVELKSDASPVAVRQYPMSKEAREGIRPHIQRFLDLGILVPCQSPWNTPLLPVKKPGTNDYRPVQDLREVNKRVQDIHPTVPNPYNLLSSLPPSHTWYSVLDLKDAFFCLKLHPNSQPLFAFEWRDPEKGNTGQLTWTRLPQGFKNSPTLFNEALHRDLASFRALNPQVVMLQYVDDLLVAAPTYRDCKEGTRRLLQELSKLGYRVSAKKAQLCREEVTYLGYLLKGGKRWLTPARKATVMKIPTPTTPRQVREFLGTAGFCRLWIPGFASLAAPLYPLTRPKVPFTWTEAHQEAFGRIKEALLSAPALALPDLTKPFALYVDEKEGVARGVLTQTLGPWRRPVAYLSKKLDPVASGWPTCLKAIAAVALLLKDADKLTLGQNVLVIAPHNLESIVRQPPDRWMTNARMTHYQSLLLNERVSFAPPAILNPATLLPVESDDTPIHICSEILAEETGTRPDLRDQPLPGVPAWYTDGSSFIMDGRRQAGAAIVDNKRTVWASNLPEGTSAQKAELIALTQALRLAEGKSINIYTDSRYAFATAHVHGAIYKQRGWLTSAGKDIKNKEEILALLEAIHLPKRVAIIHCPGHQRGTDPVATGNRKADEAAKQAAQSTRILTETTKNAGKRTADGSEFEKRTADGSEFESPKKKAKVE

SEQ ID NO: 1643 - protein, 2121 aa, synthetic construct
MPAAKRVKLDGGDKKYSIGLDIGTNSVGWAVITDEYKVPSKKFKVLGNTDRHSIKKNLIGALLFDSGETAEATRLKRTARRRYTRRKNRICYLQEIFSNEMAKVDDSFFHRLEESFLVEEDKKHERHPIFGNIVDEVAYHEKYPTIYHLRKKLVDSTDKADLRLIYLALAHMIKFRGHFLIEGDLNPDNSDVDKLFIQLVQTYNQLFEENPINASGVDAKAILSARLSKSRRLENLIAQLPGEKKNGLFGNLIALSLGLTPNFKSNFDLAEDAKLQLSKDTYDDDLDNLLAQIGDQYADLFLAAKNLSDAILLSDILRVNTEITKAPLSASMIKRYDEHHQDLTLLKALVRQQLPEKYKEIFFDQSKNGYAGYIDGGASQEEFYKFIKPILEKMDGTEELLVKLNREDLLRKQRTFDNGSIPHQIHLGELHAILRRQEDFYPFLKDNREKIEKILTFRIPYYVGPLARGNSRFAWMTRKSEETITPWNFEEVVDKGASAQSFIERMTNFDKNLPNEKVLPKHSLLYEYFTVYNELTKVKYVTEGMRKPAFLSGEQKKAIVDLLFKTNRKVTVKQLKEDYFKKIECFDSVEISGVEDRFNASLGTYHDLLKIIKDKDFLDNEENEDILEDIVLTLTLFEDREMIEERLKTYAHLFDDKVMKQLKRRRYTGWGRLSRKLINGIRDKQSGKTILDFLKSDGFANRNFMQLIHDDSLTFKEDIQKAQVSGQGDSLHEHIANLAGSPAIKKGILQTVKVVDELVKVMGRHKPENIVIEMARENQTTQKGQKNSRERMKRIEEGIKELGSQILKEHPVENTQLQNEKLYLYYLQNGRDMYVDQELDINRLSDYDVDHIVPQSFLKDDSIDNKVLTRSDKARGKSDNVPSEEVVKKMKNYWRQLLNAKLITQRKFDNLTKAERGGLSELDKAGFIKRQLVETRQITKHVAQILDSRMNTKYDENDKLIREVKVITLKSKLVSDFRKDFQFYKVREINNYHHAHDAYLNAVVGTALIKKYPKLESEFVYGDYKVYDVRKMIAKSEQEIGKATAKYFFYSNIMNFFKTEITLANGEIRKRPLIETNGETGEIVWDKGRDFATVRKVLSMPQVNIVKKTEVQTGGFSKESILPKRNSDKLIARKKDWDPKKYGGFDSPTVAYSVLVVAKVEKGKSKKLKSVKELLGITIMERSSFEKNPIDFLEAKGYKEVKKDLIIKLPKYSLFELENGRKRMLASAGELQKGNELALPSKYVNFLYLASHYEKLKGSPEDNEQKQLFVEQHKHYLDEIIEQISEFSKRVILADANLDKVLSAYNKHRDKPIREQAENIIHLFTLTNLGAPAAFKYFDTTIDRKRYTSTKEVLDATLIHQSITGLYETRIDLSQLGGDGGGGGGGGGLLGRDLLTKLKAQIQFSTEGPQVTWEDRPAMCLVLNLEEEYRLHEKPVPPSIDPSWLQLFPMVWAEKAGMGLANQVPPVVVELKSDASPVAVRQYPMSKEAREGIRPHIQRFLDLGILVPCQSPWNTPLLPVKKPGTNDYRPVQDLREVNKRVQDIHPTVPNPYNLLSSLPPSHTWYSVLDLKDAFFCLKLHPNSQPLFAFEWRDPEKGNTGQLTWTRLPQGFKNSPTLFNEALHRDLASFRALNPQVVMLQYVDDLLVAAPTYRDCKEGTRRLLQELSKLGYRVSAKKAQLCREEVTYLGYLLKGGKRWLTPARKATVMKIPTPTTPRQVREFLGTAGFCRLWIPGFASLAAPLYPLTRPKVPFTWTEAHQEAFGRIKEALLSAPALALPDLTKPFALYVDEKEGVARGVLTQTLGPWRRPVAYLSKKLDPVASGWPTCLKAIAAVALLLKDADKLTLGQNVLVIAPHNLESIVRQPPDRWMTNARMTHYQSLLLNERVSFAPPAILNPATLLPVESDDTPIHICSEILAEETGTRPDLRDQPLPGVPAWYTDGSSFIMDGRRQAGAAIVDNKRTVWASNLPEGTSAQKAELIALTQALRLAEGKSINIYTDSRYAFATAHVHGAIYKQRGWLTSAGKDIKNKEEILALLEAIHLPKRVAIIHCPGHQRGTDPVATGNRKADEAAKQAAQSTRILTETTKNAGKRTADGSEFEKRTADGSEFESPKKKAKVE

SEQ ID NO: 1644 - protein, 2127 aa, synthetic construct
MPAAKRVKLDGGDKKYSIGLDIGTNSVGWAVITDEYKVPSKKFKVLGNTDRHSIKKNLIGALLFDSGETAEATRLKRTARRRYTRRKNRICYLQEIFSNEMAKVDDSFFHRLEESFLVEEDKKHERHPIFGNIVDEVAYHEKYPTIYHLRKKLVDSTDKADLRLIYLALAHMIKFRGHFLIEGDLNPDNSDVDKLFIQLVQTYNQLFEENPINASGVDAKAILSARLSKSRRLENLIAQLPGEKKNGLFGNLIALSLGLTPNFKSNFDLAEDAKLQLSKDTYDDDLDNLLAQIGDQYADLFLAAKNLSDAILLSDILRVNTEITKAPLSASMIKRYDEHHQDLTLLKALVRQQLPEKYKEIFFDQSKNGYAGYIDGGASQEEFYKFIKPILEKMDGTEELLVKLNREDLLRKQRTFDNGSIPHQIHLGELHAILRRQEDFYPFLKDNREKIEKILTFRIPYYVGPLARGNSRFAWMTRKSEETITPWNFEEVVDKGASAQSFIERMTNFDKNLPNEKVLPKHSLLYEYFTVYNELTKVKYVTEGMRKPAFLSGEQKKAIVDLLFKTNRKVTVKQLKEDYFKKIECFDSVEISGVEDRFNASLGTYHDLLKIIKDKDFLDNEENEDILEDIVLTLTLFEDREMIEERLKTYAHLFDDKVMKQLKRRRYTGWGRLSRKLINGIRDKQSGKTILDFLKSDGFANRNFMQLIHDDSLTFKEDIQKAQVSGQGDSLHEHIANLAGSPAIKKGILQTVKVVDELVKVMGRHKPENIVIEMARENQTTQKGQKNSRERMKRIEEGIKELGSQILKEHPVENTQLQNEKLYLYYLQNGRDMYVDQELDINRLSDYDVDHIVPQSFLKDDSIDNKVLTRSDKARGKSDNVPSEEVVKKMKNYWRQLLNAKLITQRKFDNLTKAERGGLSELDKAGFIKRQLVETRQITKHVAQILDSRMNTKYDENDKLIREVKVITLKSKLVSDFRKDFQFYKVREINNYHHAHDAYLNAVVGTALIKKYPKLESEFVYGDYKVYDVRKMIAKSEQEIGKATAKYFFYSNIMNFFKTEITLANGEIRKRPLIETNGETGEIVWDKGRDFATVRKVLSMPQVNIVKKTEVQTGGFSKESILPKRNSDKLIARKKDWDPKKYGGFDSPTVAYSVLVVAKVEKGKSKKLKSVKELLGITIMERSSFEKNPIDFLEAKGYKEVKKDLIIKLPKYSLFELENGRKRMLASAGELQKGNELALPSKYVNFLYLASHYEKLKGSPEDNEQKQLFVEQHKHYLDEIIEQISEFSKRVILADANLDKVLSAYNKHRDKPIREQAENIIHLFTLTNLGAPAAFKYFDTTIDRKRYTSTKEVLDATLIHQSITGLYETRIDLSQLGGDGGGGSGSSEAAAKGGLLGRDLLTKLKAQIQFSTEGPQVTWEDRPAMCLVLNLEEEYRLHEKPVPPSIDPSWLQLFPMVWAEKAGMGLANQVPPVVVELKSDASPVAVRQYPMSKEAREGIRPHIQRFLDLGILVPCQSPWNTPLLPVKKPGTNDYRPVQDLREVNKRVQDIHPTVPNPYNLLSSLPPSHTWYSVLDLKDAFFCLKLHPNSQPLFAFEWRDPEKGNTGQLTWTRLPQGFKNSPTLFNEALHRDLASFRALNPQVVMLQYVDDLLVAAPTYRDCKEGTRRLLQELSKLGYRVSAKKAQLCREEVTYLGYLLKGGKRWLTPARKATVMKIPTPTTPRQVREFLGTAGFCRLWIPGFASLAAPLYPLTRPKVPFTWTEAHQEAFGRIKEALLSAPALALPDLTKPFALYVDEKEGVARGVLTQTLGPWRRPVAYLSKKLDPVASGWPTCLKAIAAVALLLKDADKLTLGQNVLVIAPHNLESIVRQPPDRWMTNARMTHYQSLLLNERVSFAPPAILNPATLLPVESDDTPIHICSEILAEETGTRPDLRDQPLPGVPAWYTDGSSFIMDGRRQAGAAIVDNKRTVWASNLPEGTSAQKAELIALTQALRLAEGKSINIYTDSRYAFATAHVHGAIYKQRGWLTSAGKDIKNKEEILALLEAIHLPKRVAIIHCPGHQRGTDPVATGNRKADEAAKQAAQSTRILTETTKNAGKRTADGSEFEKRTADGSEFESPKKKAKVE

SEQ ID NO: 1645 - protein, 2127 aa, synthetic construct
MPAAKRVKLDGGDKKYSIGLDIGTNSVGWAVITDEYKVPSKKFKVLGNTDRHSIKKNLIGALLFDSGETAEATRLKRTARRRYTRRKNRICYLQEIFSNEMAKVDDSFFHRLEESFLVEEDKKHERHPIFGNIVDEVAYHEKYPTIYHLRKKLVDSTDKADLRLIYLALAHMIKFRGHFLIEGDLNPDNSDVDKLFIQLVQTYNQLFEENPINASGVDAKAILSARLSKSRRLENLIAQLPGEKKNGLFGNLIALSLGLTPNFKSNFDLAEDAKLQLSKDTYDDDLDNLLAQIGDQYADLFLAAKNLSDAILLSDILRVNTEITKAPLSASMIKRYDEHHQDLTLLKALVRQQLPEKYKEIFFDQSKNGYAGYIDGGASQEEFYKFIKPILEKMDGTEELLVKLNREDLLRKQRTFDNGSIPHQIHLGELHAILRRQEDFYPFLKDNREKIEKILTFRIPYYVGPLARGNSRFAWMTRKSEETITPWNFEEVVDKGASAQSFIERMTNFDKNLPNEKVLPKHSLLYEYFTVYNELTKVKYVTEGMRKPAFLSGEQKKAIVDLLFKTNRKVTVKQLKEDYFKKIECFDSVEISGVEDRFNASLGTYHDLLKIIKDKDFLDNEENEDILEDIVLTLTLFEDREMIEERLKTYAHLFDDKVMKQLKRRRYTGWGRLSRKLINGIRDKQSGKTILDFLKSDGFANRNFMQLIHDDSLTFKEDIQKAQVSGQGDSLHEHIANLAGSPAIKKGILQTVKVVDELVKVMGRHKPENIVIEMARENQTTQKGQKNSRERMKRIEEGIKELGSQILKEHPVENTQLQNEKLYLYYLQNGRDMYVDQELDINRLSDYDVDHIVPQSFLKDDSIDNKVLTRSDKARGKSDNVPSEEVVKKMKNYWRQLLNAKLITQRKFDNLTKAERGGLSELDKAGFIKRQLVETRQITKHVAQILDSRMNTKYDENDKLIREVKVITLKSKLVSDFRKDFQFYKVREINNYHHAHDAYLNAVVGTALIKKYPKLESEFVYGDYKVYDVRKMIAKSEQEIGKATAKYFFYSNIMNFFKTEITLANGEIRKRPLIETNGETGEIVWDKGRDFATVRKVLSMPQVNIVKKTEVQTGGFSKESILPKRNSDKLIARKKDWDPKKYGGFDSPTVAYSVLVVAKVEKGKSKKLKSVKELLGITIMERSSFEKNPIDFLEAKGYKEVKKDLIIKLPKYSLFELENGRKRMLASAGELQKGNELALPSKYVNFLYLASHYEKLKGSPEDNEQKQLFVEQHKHYLDEIIEQISEFSKRVILADANLDKVLSAYNKHRDKPIREQAENIIHLFTLTNLGAPAAFKYFDTTIDRKRYTSTKEVLDATLIHQSITGLYETRIDLSQLGGDGGEAAAKGGSGSSGGLLGRDLLTKLKAQIQFSTEGPQVTWEDRPAMCLVLNLEEEYRLHEKPVPPSIDPSWLQLFPMVWAEKAGMGLANQVPPVVVELKSDASPVAVRQYPMSKEAREGIRPHIQRFLDLGILVPCQSPWNTPLLPVKKPGTNDYRPVQDLREVNKRVQDIHPTVPNPYNLLSSLPPSHTWYSVLDLKDAFFCLKLHPNSQPLFAFEWRDPEKGNTGQLTWTRLPQGFKNSPTLFNEALHRDLASFRALNPQVVMLQYVDDLLVAAPTYRDCKEGTRRLLQELSKLGYRVSAKKAQLCREEVTYLGYLLKGGKRWLTPARKATVMKIPTPTTPRQVREFLGTAGFCRLWIPGFASLAAPLYPLTRPKVPFTWTEAHQEAFGRIKEALLSAPALALPDLTKPFALYVDEKEGVARGVLTQTLGPWRRPVAYLSKKLDPVASGWPTCLKAIAAVALLLKDADKLTLGQNVLVIAPHNLESIVRQPPDRWMTNARMTHYQSLLLNERVSFAPPAILNPATLLPVESDDTPIHICSEILAEETGTRPDLRDQPLPGVPAWYTDGSSFIMDGRRQAGAAIVDNKRTVWASNLPEGTSAQKAELIALTQALRLAEGKSINIYTDSRYAFATAHVHGAIYKQRGWLTSAGKDIKNKEEILALLEAIHLPKRVAIIHCPGHQRGTDPVATGNRKADEAAKQAAQSTRILTETTKNAGKRTADGSEFEKRTADGSEFESPKKKAKVE

SEQ ID NO: 1646 - protein, 2127 aa, synthetic construct
MPAAKRVKLDGGDKKYSIGLDIGTNSVGWAVITDEYKVPSKKFKVLGNTDRHSIKKNLIGALLFDSGETAEATRLKRTARRRYTRRKNRICYLQEIFSNEMAKVDDSFFHRLEESFLVEEDKKHERHPIFGNIVDEVAYHEKYPTIYHLRKKLVDSTDKADLRLIYLALAHMIKFRGHFLIEGDLNPDNSDVDKLFIQLVQTYNQLFEENPINASGVDAKAILSARLSKSRRLENLIAQLPGEKKNGLFGNLIALSLGLTPNFKSNFDLAEDAKLQLSKDTYDDDLDNLLAQIGDQYADLFLAAKNLSDAILLSDILRVNTEITKAPLSASMIKRYDEHHQDLTLLKALVRQQLPEKYKEIFFDQSKNGYAGYIDGGASQEEFYKFIKPILEKMDGTEELLVKLNREDLLRKQRTFDNGSIPHQIHLGELHAILRRQEDFYPFLKDNREKIEKILTFRIPYYVGPLARGNSRFAWMTRKSEETITPWNFEEVVDKGASAQSFIERMTNFDKNLPNEKVLPKHSLLYEYFTVYNELTKVKYVTEGMRKPAFLSGEQKKAIVDLLFKTNRKVTVKQLKEDYFKKIECFDSVEISGVEDRFNASLGTYHDLLKIIKDKDFLDNEENEDILEDIVLTLTLFEDREMIEERLKTYAHLFDDKVMKQLKRRRYTGWGRLSRKLINGIRDKQSGKTILDFLKSDGFANRNFMQLIHDDSLTFKEDIQKAQVSGQGDSLHEHIANLAGSPAIKKGILQTVKVVDELVKVMGRHKPENIVIEMARENQTTQKGQKNSRERMKRIEEGIKELGSQILKEHPVENTQLQNEKLYLYYLQNGRDMYVDQELDINRLSDYDVDHIVPQSFLKDDSIDNKVLTRSDKARGKSDNVPSEEVVKKMKNYWRQLLNAKLITQRKFDNLTKAERGGLSELDKAGFIKRQLVETRQITKHVAQILDSRMNTKYDENDKLIREVKVITLKSKLVSDFRKDFQFYKVREINNYHHAHDAYLNAVVGTALIKKYPKLESEFVYGDYKVYDVRKMIAKSEQEIGKATAKYFFYSNIMNFFKTEITLANGEIRKRPLIETNGETGEIVWDKGRDFATVRKVLSMPQVNIVKKTEVQTGGFSKESILPKRNSDKLIARKKDWDPKKYGGFDSPTVAYSVLVVAKVEKGKSKKLKSVKELLGITIMERSSFEKNPIDFLEAKGYKEVKKDLIIKLPKYSLFELENGRKRMLASAGELQKGNELALPSKYVNFLYLASHYEKLKGSPEDNEQKQLFVEQHKHYLDEIIEQISEFSKRVILADANLDKVLSAYNKHRDKPIREQAENIIHLFTLTNLGAPAAFKYFDTTIDRKRYTSTKEVLDATLIHQSITGLYETRIDLSQLGGDGGEAAAKGGGGGSGGLLGRDLLTKLKAQIQFSTEGPQVTWEDRPAMCLVLNLEEEYRLHEKPVPPSIDPSWLQLFPMVWAEKAGMGLANQVPPVVVELKSDASPVAVRQYPMSKEAREGIRPHIQRFLDLGILVPCQSPWNTPLLPVKKPGTNDYRPVQDLREVNKRVQDIHPTVPNPYNLLSSLPPSHTWYSVLDLKDAFFCLKLHPNSQPLFAFEWRDPEKGNTGQLTWTRLPQGFKNSPTLFNEALHRDLASFRALNPQVVMLQYVDDLLVAAPTYRDCKEGTRRLLQELSKLGYRVSAKKAQLCREEVTYLGYLLKGGKRWLTPARKATVMKIPTPTTPRQVREFLGTAGFCRLWIPGFASLAAPLYPLTRPKVPFTWTEAHQEAFGRIKEALLSAPALALPDLTKPFALYVDEKEGVARGVLTQTLGPWRRPVAYLSKKLDPVASGWPTCLKAIAAVALLLKDADKLTLGQNVLVIAPHNLESIVRQPPDRWMTNARMTHYQSLLLNERVSFAPPAILNPATLLPVESDDTPIHICSEILAEETGTRPDLRDQPLPGVPAWYTDGSSFIMDGRRQAGAAIVDNKRTVWASNLPEGTSAQKAELIALTQALRLAEGKSINIYTDSRYAFATAHVHGAIYKQRGWLTSAGKDIKNKEEILALLEAIHLPKRVAIIHCPGHQRGTDPVATGNRKADEAAKQAAQSTRILTETTKNAGKRTADGSEFEKRTADGSEFESPKKKAKVE

SEQ ID NO: 1647 - protein, 2127 aa, synthetic construct
MPAAKRVKLDGGDKKYSIGLDIGTNSVGWAVITDEYKVPSKKFKVLGNTDRHSIKKNLIGALLFDSGETAEATRLKRTARRRYTRRKNRICYLQEIFSNEMAKVDDSFFHRLEESFLVEEDKKHERHPIFGNIVDEVAYHEKYPTIYHLRKKLVDSTDKADLRLIYLALAHMIKFRGHFLIEGDLNPDNSDVDKLFIQLVQTYNQLFEENPINASGVDAKAILSARLSKSRRLENLIAQLPGEKKNGLFGNLIALSLGLTPNFKSNFDLAEDAKLQLSKDTYDDDLDNLLAQIGDQYADLFLAAKNLSDAILLSDILRVNTEITKAPLSASMIKRYDEHHQDLTLLKALVRQQLPEKYKEIFFDQSKNGYAGYIDGGASQEEFYKFIKPILEKMDGTEELLVKLNREDLLRKQRTFDNGSIPHQIHLGELHAILRRQEDFYPFLKDNREKIEKILTFRIPYYVGPLARGNSRFAWMTRKSEETITPWNFEEVVDKGASAQSFIERMTNFDKNLPNEKVLPKHSLLYEYFTVYNELTKVKYVTEGMRKPAFLSGEQKKAIVDLLFKTNRKVTVKQLKEDYFKKIECFDSVEISGVEDRFNASLGTYHDLLKIIKDKDFLDNEENEDILEDIVLTLTLFEDREMIEERLKTYAHLFDDKVMKQLKRRRYTGWGRLSRKLINGIRDKQSGKTILDFLKSDGFANRNFMQLIHDDSLTFKEDIQKAQVSGQGDSLHEHIANLAGSPAIKKGILQTVKVVDELVKVMGRHKPENIVIEMARENQTTQKGQKNSRERMKRIEEGIKELGSQILKEHPVENTQLQNEKLYLYYLQNGRDMYVDQELDINRLSDYDVDHIVPQSFLKDDSIDNKVLTRSDKARGKSDNVPSEEVVKKMKNYWRQLLNAKLITQRKFDNLTKAERGGLSELDKAGFIKRQLVETRQITKHVAQILDSRMNTKYDENDKLIREVKVITLKSKLVSDFRKDFQFYKVREINNYHHAHDAYLNAVVGTALIKKYPKLESEFVYGDYKVYDVRKMIAKSEQEIGKATAKYFFYSNIMNFFKTEITLANGEIRKRPLIETNGETGEIVWDKGRDFATVRKVLSMPQVNIVKKTEVQTGGFSKESILPKRNSDKLIARKKDWDPKKYGGFDSPTVAYSVLVVAKVEKGKSKKLKSVKELLGITIMERSSFEKNPIDFLEAKGYKEVKKDLIIKLPKYSLFELENGRKRMLASAGELQKGNELALPSKYVNFLYLASHYEKLKGSPEDNEQKQLFVEQHKHYLDEIIEQISEFSKRVILADANLDKVLSAYNKHRDKPIREQAENIIHLFTLTNLGAPAAFKYFDTTIDRKRYTSTKEVLDATLIHQSITGLYETRIDLSQLGGDGGGGSEAAAKGGGGGLLGRDLLTKLKAQIQFSTEGPQVTWEDRPAMCLVLNLEEEYRLHEKPVPPSIDPSWLQLFPMVWAEKAGMGLANQVPPVVVELKSDASPVAVRQYPMSKEAREGIRPHIQRFLDLGILVPCQSPWNTPLLPVKKPGTNDYRPVQDLREVNKRVQDIHPTVPNPYNLLSSLPPSHTWYSVLDLKDAFFCLKLHPNSQPLFAFEWRDPEKGNTGQLTWTRLPQGFKNSPTLFNEALHRDLASFRALNPQVVMLQYVDDLLVAAPTYRDCKEGTRRLLQELSKLGYRVSAKKAQLCREEVTYLGYLLKGGKRWLTPARKATVMKIPTPTTPRQVREFLGTAGFCRLWIPGFASLAAPLYPLTRPKVPFTWTEAHQEAFGRIKEALLSAPALALPDLTKPFALYVDEKEGVARGVLTQTLGPWRRPVAYLSKKLDPVASGWPTCLKAIAAVALLLKDADKLTLGQNVLVIAPHNLESIVRQPPDRWMTNARMTHYQSLLLNERVSFAPPAILNPATLLPVESDDTPIHICSEILAEETGTRPDLRDQPLPGVPAWYTDGSSFIMDGRRQAGAAIVDNKRTVWASNLPEGTSAQKAELIALTQALRLAEGKSINIYTDSRYAFATAHVHGAIYKQRGWLTSAGKDIKNKEEILALLEAIHLPKRVAIIHCPGHQRGTDPVATGNRKADEAAKQAAQSTRILTETTKNAGKRTADGSEFEKRTADGSEFESPKKKAKVE

SEQ ID NO: 1648 - protein, 2125 aa, synthetic construct
MPAAKRVKLDGGDKKYSIGLDIGTNSVGWAVITDEYKVPSKKFKVLGNTDRHSIKKNLIGALLFDSGETAEATRLKRTARRRYTRRKNRICYLQEIFSNEMAKVDDSFFHRLEESFLVEEDKKHERHPIFGNIVDEVAYHEKYPTIYHLRKKLVDSTDKADLRLIYLALAHMIKFRGHFLIEGDLNPDNSDVDKLFIQLVQTYNQLFEENPINASGVDAKAILSARLSKSRRLENLIAQLPGEKKNGLFGNLIALSLGLTPNFKSNFDLAEDAKLQLSKDTYDDDLDNLLAQIGDQYADLFLAAKNLSDAILLSDILRVNTEITKAPLSASMIKRYDEHHQDLTLLKALVRQQLPEKYKEIFFDQSKNGYAGYIDGGASQEEFYKFIKPILEKMDGTEELLVKLNREDLLRKQRTFDNGSIPHQIHLGELHAILRRQEDFYPFLKDNREKIEKILTFRIPYYVGPLARGNSRFAWMTRKSEETITPWNFEEVVDKGASAQSFIERMTNFDKNLPNEKVLPKHSLLYEYFTVYNELTKVKYVTEGMRKPAFLSGEQKKAIVDLLFKTNRKVTVKQLKEDYFKKIECFDSVEISGVEDRFNASLGTYHDLLKIIKDKDFLDNEENEDILEDIVLTLTLFEDREMIEERLKTYAHLFDDKVMKQLKRRRYTGWGRLSRKLINGIRDKQSGKTILDFLKSDGFANRNFMQLIHDDSLTFKEDIQKAQVSGQGDSLHEHIANLAGSPAIKKGILQTVKVVDELVKVMGRHKPENIVIEMARENQTTQKGQKNSRERMKRIEEGIKELGSQILKEHPVENTQLQNEKLYLYYLQNGRDMYVDQELDINRLSDYDVDHIVPQSFLKDDSIDNKVLTRSDKARGKSDNVPSEEVVKKMKNYWRQLLNAKLITQRKFDNLTKAERGGLSELDKAGFIKRQLVETRQITKHVAQILDSRMNTKYDENDKLIREVKVITLKSKLVSDFRKDFQFYKVREINNYHHAHDAYLNAVVGTALIKKYPKLESEFVYGDYKVYDVRKMIAKSEQEIGKATAKYFFYSNIMNFFKTEITLANGEIRKRPLIETNGETGEIVWDKGRDFATVRKVLSMPQVNIVKKTEVQTGGFSKESILPKRNSDKLIARKKDWDPKKYGGFDSPTVAYSVLVVAKVEKGKSKKLKSVKELLGITIMERSSFEKNPIDFLEAKGYKEVKKDLIIKLPKYSLFELENGRKRMLASAGELQKGNELALPSKYVNFLYLASHYEKLKGSPEDNEQKQLFVEQHKHYLDEIIEQISEFSKRVILADANLDKVLSAYNKHRDKPIREQAENIIHLFTLTNLGAPAAFKYFDTTIDRKRYTSTKEVLDATLIHQSITGLYETRIDLSQLGGDGGGGSPAPGSSGGLLGRDLLTKLKAQIQFSTEGPQVTWEDRPAMCLVLNLEEEYRLHEKPVPPSIDPSWLQLFPMVWAEKAGMGLANQVPPVVVELKSDASPVAVRQYPMSKEAREGIRPHIQRFLDLGILVPCQSPWNTPLLPVKKPGTNDYRPVQDLREVNKRVQDIHPTVPNPYNLLSSLPPSHTWYSVLDLKDAFFCLKLHPNSQPLFAFEWRDPEKGNTGQLTWTRLPQGFKNSPTLFNEALHRDLASFRALNPQVVMLQYVDDLLVAAPTYRDCKEGTRRLLQELSKLGYRVSAKKAQLCREEVTYLGYLLKGGKRWLTPARKATVMKIPTPTTPRQVREFLGTAGFCRLWIPGFASLAAPLYPLTRPKVPFTWTEAHQEAFGRIKEALLSAPALALPDLTKPFALYVDEKEGVARGVLTQTLGPWRRPVAYLSKKLDPVASGWPTCLKAIAAVALLLKDADKLTLGQNVLVIAPHNLESIVRQPPDRWMTNARMTHYQSLLLNERVSFAPPAILNPATLLPVESDDTPIHICSEILAEETGTRPDLRDQPLPGVPAWYTDGSSFIMDGRRQAGAAIVDNKRTVWASNLPEGTSAQKAELIALTQALRLAEGKSINIYTDSRYAFATAHVHGAIYKQRGWLTSAGKDIKNKEEILALLEAIHLPKRVAIIHCPGHQRGTDPVATGNRKADEAAKQAAQSTRILTETTKNAGKRTADGSEFEKRTADGSEFESPKKKAKVE

SEQ ID NO: 1649 - protein, 2149 aa, synthetic construct
MPAAKRVKLDGGDKKYSIGLDIGTNSVGWAVITDEYKVPSKKFKVLGNTDRHSIKKNLIGALLFDSGETAEATRLKRTARRRYTRRKNRICYLQEIFSNEMAKVDDSFFHRLEESFLVEEDKKHERHPIFGNIVDEVAYHEKYPTIYHLRKKLVDSTDKADLRLIYLALAHMIKFRGHFLIEGDLNPDNSDVDKLFIQLVQTYNQLFEENPINASGVDAKAILSARLSKSRRLENLIAQLPGEKKNGLFGNLIALSLGLTPNFKSNFDLAEDAKLQLSKDTYDDDLDNLLAQIGDQYADLFLAAKNLSDAILLSDILRVNTEITKAPLSASMIKRYDEHHQDLTLLKALVRQQLPEKYKEIFFDQSKNGYAGYIDGGASQEEFYKFIKPILEKMDGTEELLVKLNREDLLRKQRTFDNGSIPHQIHLGELHAILRRQEDFYPFLKDNREKIEKILTFRIPYYVGPLARGNSRFAWMTRKSEETITPWNFEEVVDKGASAQSFIERMTNFDKNLPNEKVLPKHSLLYEYFTVYNELTKVKYVTEGMRKPAFLSGEQKKAIVDLLFKTNRKVTVKQLKEDYFKKIECFDSVEISGVEDRFNASLGTYHDLLKIIKDKDFLDNEENEDILEDIVLTLTLFEDREMIEERLKTYAHLFDDKVMKQLKRRRYTGWGRLSRKLINGIRDKQSGKTILDFLKSDGFANRNFMQLIHDDSLTFKEDIQKAQVSGQGDSLHEHIANLAGSPAIKKGILQTVKVVDELVKVMGRHKPENIVIEMARENQTTQKGQKNSRERMKRIEEGIKELGSQILKEHPVENTQLQNEKLYLYYLQNGRDMYVDQELDINRLSDYDVDHIVPQSFLKDDSIDNKVLTRSDKARGKSDNVPSEEVVKKMKNYWRQLLNAKLITQRKFDNLTKAERGGLSELDKAGFIKRQLVETRQITKHVAQILDSRMNTKYDENDKLIREVKVITLKSKLVSDFRKDFQFYKVREINNYHHAHDAYLNAVVGTALIKKYPKLESEFVYGDYKVYDVRKMIAKSEQEIGKATAKYFFYSNIMNFFKTEITLANGEIRKRPLIETNGETGEIVWDKGRDFATVRKVLSMPQVNIVKKTEVQTGGFSKESILPKRNSDKLIARKKDWDPKKYGGFDSPTVAYSVLVVAKVEKGKSKKLKSVKELLGITIMERSSFEKNPIDFLEAKGYKEVKKDLIIKLPKYSLFELENGRKRMLASAGELQKGNELALPSKYVNFLYLASHYEKLKGSPEDNEQKQLFVEQHKHYLDEIIEQISEFSKRVILADANLDKVLSAYNKHRDKPIREQAENIIHLFTLTNLGAPAAFKYFDTTIDRKRYTSTKEVLDATLIHQSITGLYETRIDLSQLGGDGGSGGSSGGSSGSETPGTSESATPESSGGSSGGSSGGLLGRDLLTKLKAQIQFSTEGPQVTWEDRPAMCLVLNLEEEYRLHEKPVPPSIDPSWLQLFPMVWAEKAGMGLANQVPPVVVELKSDASPVAVRQYPMSKEAREGIRPHIQRFLDLGILVPCQSPWNTPLLPVKKPGTNDYRPVQDLREVNKRVQDIHPTVPNPYNLLSSLPPSHTWYSVLDLKDAFFCLKLHPNSQPLFAFEWRDPEKGNTGQLTWTRLPQGFKNSPTLFNEALHRDLASFRALNPQVVMLQYVDDLLVAAPTYRDCKEGTRRLLQELSKLGYRVSAKKAQLCREEVTYLGYLLKGGKRWLTPARKATVMKIPTPTTPRQVREFLGTAGFCRLWIPGFASLAAPLYPLTRPKVPFTWTEAHQEAFGRIKEALLSAPALALPDLTKPFALYVDEKEGVARGVLTQTLGPWRRPVAYLSKKLDPVASGWPTCLKAIAAVALLLKDADKLTLGQNVLVIAPHNLESIVRQPPDRWMTNARMTHYQSLLLNERVSFAPPAILNPATLLPVESDDTPIHICSEILAEETGTRPDLRDQPLPGVPAWYTDGSSFIMDGRRQAGAAIVDNKRTVWASNLPEGTSAQKAELIALTQALRLAEGKSINIYTDSRYAFATAHVHGAIYKQRGWLTSAGKDIKNKEEILALLEAIHLPKRVAIIHCPGHQRGTDPVATGNRKADEAAKQAAQSTRILTETTKNAGKRTADGSEFEKRTADGSEFESPKKKAKVE

SEQ ID NO: 1650 - protein, 2121 aa, synthetic construct
MPAAKRVKLDGGDKKYSIGLDIGTNSVGWAVITDEYKVPSKKFKVLGNTDRHSIKKNLIGALLFDSGETAEATRLKRTARRRYTRRKNRICYLQEIFSNEMAKVDDSFFHRLEESFLVEEDKKHERHPIFGNIVDEVAYHEKYPTIYHLRKKLVDSTDKADLRLIYLALAHMIKFRGHFLIEGDLNPDNSDVDKLFIQLVQTYNQLFEENPINASGVDAKAILSARLSKSRRLENLIAQLPGEKKNGLFGNLIALSLGLTPNFKSNFDLAEDAKLQLSKDTYDDDLDNLLAQIGDQYADLFLAAKNLSDAILLSDILRVNTEITKAPLSASMIKRYDEHHQDLTLLKALVRQQLPEKYKEIFFDQSKNGYAGYIDGGASQEEFYKFIKPILEKMDGTEELLVKLNREDLLRKQRTFDNGSIPHQIHLGELHAILRRQEDFYPFLKDNREKIEKILTFRIPYYVGPLARGNSRFAWMTRKSEETITPWNFEEVVDKGASAQSFIERMTNFDKNLPNEKVLPKHSLLYEYFTVYNELTKVKYVTEGMRKPAFLSGEQKKAIVDLLFKTNRKVTVKQLKEDYFKKIECFDSVEISGVEDRFNASLGTYHDLLKIIKDKDFLDNEENEDILEDIVLTLTLFEDREMIEERLKTYAHLFDDKVMKQLKRRRYTGWGRLSRKLINGIRDKQSGKTILDFLKSDGFANRNFMQLIHDDSLTFKEDIQKAQVSGQGDSLHEHIANLAGSPAIKKGILQTVKVVDELVKVMGRHKPENIVIEMARENQTTQKGQKNSRERMKRIEEGIKELGSQILKEHPVENTQLQNEKLYLYYLQNGRDMYVDQELDINRLSDYDVDHIVPQSFLKDDSIDNKVLTRSDKARGKSDNVPSEEVVKKMKNYWRQLLNAKLITQRKFDNLTKAERGGLSELDKAGFIKRQLVETRQITKHVAQILDSRMNTKYDENDKLIREVKVITLKSKLVSDFRKDFQFYKVREINNYHHAHDAYLNAVVGTALIKKYPKLESEFVYGDYKVYDVRKMIAKSEQEIGKATAKYFFYSNIMNFFKTEITLANGEIRKRPLIETNGETGEIVWDKGRDFATVRKVLSMPQVNIVKKTEVQTGGFSKESILPKRNSDKLIARKKDWDPKKYGGFDSPTVAYSVLVVAKVEKGKSKKLKSVKELLGITIMERSSFEKNPIDFLEAKGYKEVKKDLIIKLPKYSLFELENGRKRMLASAGELQKGNELALPSKYVNFLYLASHYEKLKGSPEDNEQKQLFVEQHKHYLDEIIEQISEFSKRVILADANLDKVLSAYNKHRDKPIREQAENIIHLFTLTNLGAPAAFKYFDTTIDRKRYTSTKEVLDATLIHQSITGLYETRIDLSQLGGDGGGGGGSGGLLGRDLLTKLKAQIQFSTEGPQVTWEDRPAMCLVLNLEEEYRLHEKPVPPSIDPSWLQLFPMVWAEKAGMGLANQVPPVVVELKSDASPVAVRQYPMSKEAREGIRPHIQRFLDLGILVPCQSPWNTPLLPVKKPGTNDYRPVQDLREVNKRVQDIHPTVPNPYNLLSSLPPSHTWYSVLDLKDAFFCLKLHPNSQPLFAFEWRDPEKGNTGQLTWTRLPQGFKNSPTLFNEALHRDLASFRALNPQVVMLQYVDDLLVAAPTYRDCKEGTRRLLQELSKLGYRVSAKKAQLCREEVTYLGYLLKGGKRWLTPARKATVMKIPTPTTPRQVREFLGTAGFCRLWIPGFASLAAPLYPLTRPKVPFTWTEAHQEAFGRIKEALLSAPALALPDLTKPFALYVDEKEGVARGVLTQTLGPWRRPVAYLSKKLDPVASGWPTCLKAIAAVALLLKDADKLTLGQNVLVIAPHNLESIVRQPPDRWMTNARMTHYQSLLLNERVSFAPPAILNPATLLPVESDDTPIHICSEILAEETGTRPDLRDQPLPGVPAWYTDGSSFIMDGRRQAGAAIVDNKRTVWASNLPEGTSAQKAELIALTQALRLAEGKSINIYTDSRYAFATAHVHGAIYKQRGWLTSAGKDIKNKEEILALLEAIHLPKRVAIIHCPGHQRGTDPVATGNRKADEAAKQAAQSTRILTETTKNAGKRTADGSEFEKRTADGSEFESPKKKAKVE

SEQ ID NO: 1651 - protein, 2125 aa, synthetic construct
MPAAKRVKLDGGDKKYSIGLDIGTNSVGWAVITDEYKVPSKKFKVLGNTDRHSIKKNLIGALLFDSGETAEATRLKRTARRRYTRRKNRICYLQEIFSNEMAKVDDSFFHRLEESFLVEEDKKHERHPIFGNIVDEVAYHEKYPTIYHLRKKLVDSTDKADLRLIYLALAHMIKFRGHFLIEGDLNPDNSDVDKLFIQLVQTYNQLFEENPINASGVDAKAILSARLSKSRRLENLIAQLPGEKKNGLFGNLIALSLGLTPNFKSNFDLAEDAKLQLSKDTYDDDLDNLLAQIGDQYADLFLAAKNLSDAILLSDILRVNTEITKAPLSASMIKRYDEHHQDLTLLKALVRQQLPEKYKEIFFDQSKNGYAGYIDGGASQEEFYKFIKPILEKMDGTEELLVKLNREDLLRKQRTFDNGSIPHQIHLGELHAILRRQEDFYPFLKDNREKIEKILTFRIPYYVGPLARGNSRFAWMTRKSEETITPWNFEEVVDKGASAQSFIERMTNFDKNLPNEKVLPKHSLLYEYFTVYNELTKVKYVTEGMRKPAFLSGEQKKAIVDLLFKTNRKVTVKQLKEDYFKKIECFDSVEISGVEDRFNASLGTYHDLLKIIKDKDFLDNEENEDILEDIVLTLTLFEDREMIEERLKTYAHLFDDKVMKQLKRRRYTGWGRLSRKLINGIRDKQSGKTILDFLKSDGFANRNFMQLIHDDSLTFKEDIQKAQVSGQGDSLHEHIANLAGSPAIKKGILQTVKVVDELVKVMGRHKPENIVIEMARENQTTQKGQKNSRERMKRIEEGIKELGSQILKEHPVENTQLQNEKLYLYYLQNGRDMYVDQELDINRLSDYDVDHIVPQSFLKDDSIDNKVLTRSDKARGKSDNVPSEEVVKKMKNYWRQLLNAKLITQRKFDNLTKAERGGLSELDKAGFIKRQLVETRQITKHVAQILDSRMNTKYDENDKLIREVKVITLKSKLVSDFRKDFQFYKVREINNYHHAHDAYLNAVVGTALIKKYPKLESEFVYGDYKVYDVRKMIAKSEQEIGKATAKYFFYSNIMNFFKTEITLANGEIRKRPLIETNGETGEIVWDKGRDFATVRKVLSMPQVNIVKKTEVQTGGFSKESILPKRNSDKLIARKKDWDPKKYGGFDSPTVAYSVLVVAKVEKGKSKKLKSVKELLGITIMERSSFEKNPIDFLEAKGYKEVKKDLIIKLPKYSLFELENGRKRMLASAGELQKGNELALPSKYVNFLYLASHYEKLKGSPEDNEQKQLFVEQHKHYLDEIIEQISEFSKRVILADANLDKVLSAYNKHRDKPIREQAENIIHLFTLTNLGAPAAFKYFDTTIDRKRYTSTKEVLDATLIHQSITGLYETRIDLSQLGGDGGPAPGSSGGSGGLLGRDLLTKLKAQIQFSTEGPQVTWEDRPAMCLVLNLEEEYRLHEKPVPPSIDPSWLQLFPMVWAEKAGMGLANQVPPVVVELKSDASPVAVRQYPMSKEAREGIRPHIQRFLDLGILVPCQSPWNTPLLPVKKPGTNDYRPVQDLREVNKRVQDIHPTVPNPYNLLSSLPPSHTWYSVLDLKDAFFCLKLHPNSQPLFAFEWRDPEKGNTGQLTWTRLPQGFKNSPTLFNEALHRDLASFRALNPQVVMLQYVDDLLVAAPTYRDCKEGTRRLLQELSKLGYRVSAKKAQLCREEVTYLGYLLKGGKRWLTPARKATVMKIPTPTTPRQVREFLGTAGFCRLWIPGFASLAAPLYPLTRPKVPFTWTEAHQEAFGRIKEALLSAPALALPDLTKPFALYVDEKEGVARGVLTQTLGPWRRPVAYLSKKLDPVASGWPTCLKAIAAVALLLKDADKLTLGQNVLVIAPHNLESIVRQPPDRWMTNARMTHYQSLLLNERVSFAPPAILNPATLLPVESDDTPIHICSEILAEETGTRPDLRDQPLPGVPAWYTDGSSFIMDGRRQAGAAIVDNKRTVWASNLPEGTSAQKAELIALTQALRLAEGKSINIYTDSRYAFATAHVHGAIYKQRGWLTSAGKDIKNKEEILALLEAIHLPKRVAIIHCPGHQRGTDPVATGNRKADEAAKQAAQSTRILTETTKNAGKRTADGSEFEKRTADGSEFESPKKKAKVE

SEQ ID NO: 1652 - protein, 2125 aa, synthetic construct
MPAAKRVKLDGGDKKYSIGLDIGTNSVGWAVITDEYKVPSKKFKVLGNTDRHSIKKNLIGALLFDSGETAEATRLKRTARRRYTRRKNRICYLQEIFSNEMAKVDDSFFHRLEESFLVEEDKKHERHPIFGNIVDEVAYHEKYPTIYHLRKKLVDSTDKADLRLIYLALAHMIKFRGHFLIEGDLNPDNSDVDKLFIQLVQTYNQLFEENPINASGVDAKAILSARLSKSRRLENLIAQLPGEKKNGLFGNLIALSLGLTPNFKSNFDLAEDAKLQLSKDTYDDDLDNLLAQIGDQYADLFLAAKNLSDAILLSDILRVNTEITKAPLSASMIKRYDEHHQDLTLLKALVRQQLPEKYKEIFFDQSKNGYAGYIDGGASQEEFYKFIKPILEKMDGTEELLVKLNREDLLRKQRTFDNGSIPHQIHLGELHAILRRQEDFYPFLKDNREKIEKILTFRIPYYVGPLARGNSRFAWMTRKSEETITPWNFEEVVDKGASAQSFIERMTNFDKNLPNEKVLPKHSLLYEYFTVYNELTKVKYVTEGMRKPAFLSGEQKKAIVDLLFKTNRKVTVKQLKEDYFKKIECFDSVEISGVEDRFNASLGTYHDLLKIIKDKDFLDNEENEDILEDIVLTLTLFEDREMIEERLKTYAHLFDDKVMKQLKRRRYTGWGRLSRKLINGIRDKQSGKTILDFLKSDGFANRNFMQLIHDDSLTFKEDIQKAQVSGQGDSLHEHIANLAGSPAIKKGILQTVKVVDELVKVMGRHKPENIVIEMARENQTTQKGQKNSRERMKRIEEGIKELGSQILKEHPVENTQLQNEKLYLYYLQNGRDMYVDQELDINRLSDYDVDHIVPQSFLKDDSIDNKVLTRSDKARGKSDNVPSEEVVKKMKNYWRQLLNAKLITQRKFDNLTKAERGGLSELDKAGFIKRQLVETRQITKHVAQILDSRMNTKYDENDKLIREVKVITLKSKLVSDFRKDFQFYKVREINNYHHAHDAYLNAVVGTALIKKYPKLESEFVYGDYKVYDVRKMIAKSEQEIGKATAKYFFYSNIMNFFKTEITLANGEIRKRPLIETNGETGEIVWDKGRDFATVRKVLSMPQVNIVKKTEVQTGGFSKESILPKRNSDKLIARKKDWDPKKYGGFDSPTVAYSVLVVAKVEKGKSKKLKSVKELLGITIMERSSFEKNPIDFLEAKGYKEVKKDLIIKLPKYSLFELENGRKRMLASAGELQKGNELALPSKYVNFLYLASHYEKLKGSPEDNEQKQLFVEQHKHYLDEIIEQISEFSKRVILADANLDKVLSAYNKHRDKPIREQAENIIHLFTLTNLGAPAAFKYFDTTIDRKRYTSTKEVLDATLIHQSITGLYETRIDLSQLGGDGGPAPGGSGGGGGLLGRDLLTKLKAQIQFSTEGPQVTWEDRPAMCLVLNLEEEYRLHEKPVPPSIDPSWLQLFPMVWAEKAGMGLANQVPPVVVELKSDASPVAVRQYPMSKEAREGIRPHIQRFLDLGILVPCQSPWNTPLLPVKKPGTNDYRPVQDLREVNKRVQDIHPTVPNPYNLLSSLPPSHTWYSVLDLKDAFFCLKLHPNSQPLFAFEWRDPEKGNTGQLTWTRLPQGFKNSPTLFNEALHRDLASFRALNPQVVMLQYVDDLLVAAPTYRDCKEGTRRLLQELSKLGYRVSAKKAQLCREEVTYLGYLLKGGKRWLTPARKATVMKIPTPTTPRQVREFLGTAGFCRLWIPGFASLAAPLYPLTRPKVPFTWTEAHQEAFGRIKEALLSAPALALPDLTKPFALYVDEKEGVARGVLTQTLGPWRRPVAYLSKKLDPVASGWPTCLKAIAAVALLLKDADKLTLGQNVLVIAPHNLESIVRQPPDRWMTNARMTHYQSLLLNERVSFAPPAILNPATLLPVESDDTPIHICSEILAEETGTRPDLRDQPLPGVPAWYTDGSSFIMDGRRQAGAAIVDNKRTVWASNLPEGTSAQKAELIALTQALRLAEGKSINIYTDSRYAFATAHVHGAIYKQRGWLTSAGKDIKNKEEILALLEAIHLPKRVAIIHCPGHQRGTDPVATGNRKADEAAKQAAQSTRILTETTKNAGKRTADGSEFEKRTADGSEFESPKKKAKVE

SEQ ID NO: 1653 - protein, 2125 aa, synthetic construct
MPAAKRVKLDGGDKKYSIGLDIGTNSVGWAVITDEYKVPSKKFKVLGNTDRHSIKKNLIGALLFDSGETAEATRLKRTARRRYTRRKNRICYLQEIFSNEMAKVDDSFFHRLEESFLVEEDKKHERHPIFGNIVDEVAYHEKYPTIYHLRKKLVDSTDKADLRLIYLALAHMIKFRGHFLIEGDLNPDNSDVDKLFIQLVQTYNQLFEENPINASGVDAKAILSARLSKSRRLENLIAQLPGEKKNGLFGNLIALSLGLTPNFKSNFDLAEDAKLQLSKDTYDDDLDNLLAQIGDQYADLFLAAKNLSDAILLSDILRVNTEITKAPLSASMIKRYDEHHQDLTLLKALVRQQLPEKYKEIFFDQSKNGYAGYIDGGASQEEFYKFIKPILEKMDGTEELLVKLNREDLLRKQRTFDNGSIPHQIHLGELHAILRRQEDFYPFLKDNREKIEKILTFRIPYYVGPLARGNSRFAWMTRKSEETITPWNFEEVVDKGASAQSFIERMTNFDKNLPNEKVLPKHSLLYEYFTVYNELTKVKYVTEGMRKPAFLSGEQKKAIVDLLFKTNRKVTVKQLKEDYFKKIECFDSVEISGVEDRFNASLGTYHDLLKIIKDKDFLDNEENEDILEDIVLTLTLFEDREMIEERLKTYAHLFDDKVMKQLKRRRYTGWGRLSRKLINGIRDKQSGKTILDFLKSDGFANRNFMQLIHDDSLTFKEDIQKAQVSGQGDSLHEHIANLAGSPAIKKGILQTVKVVDELVKVMGRHKPENIVIEMARENQTTQKGQKNSRERMKRIEEGIKELGSQILKEHPVENTQLQNEKLYLYYLQNGRDMYVDQELDINRLSDYDVDHIVPQSFLKDDSIDNKVLTRSDKARGKSDNVPSEEVVKKMKNYWRQLLNAKLITQRKFDNLTKAERGGLSELDKAGFIKRQLVETRQITKHVAQILDSRMNTKYDENDKLIREVKVITLKSKLVSDFRKDFQFYKVREINNYHHAHDAYLNAVVGTALIKKYPKLESEFVYGDYKVYDVRKMIAKSEQEIGKATAKYFFYSNIMNFFKTEITLANGEIRKRPLIETNGETGEIVWDKGRDFATVRKVLSMPQVNIVKKTEVQTGGFSKESILPKRNSDKLIARKKDWDPKKYGGFDSPTVAYSVLVVAKVEKGKSKKLKSVKELLGITIMERSSFEKNPIDFLEAKGYKEVKKDLIIKLPKYSLFELENGRKRMLASAGELQKGNELALPSKYVNFLYLASHYEKLKGSPEDNEQKQLFVEQHKHYLDEIIEQISEFSKRVILADANLDKVLSAYNKHRDKPIREQAENIIHLFTLTNLGAPAAFKYFDTTIDRKRYTSTKEVLDATLIHQSITGLYETRIDLSQLGGDGGGGGGGSPAPGGLLGRDLLTKLKAQIQFSTEGPQVTWEDRPAMCLVLNLEEEYRLHEKPVPPSIDPSWLQLFPMVWAEKAGMGLANQVPPVVVELKSDASPVAVRQYPMSKEAREGIRPHIQRFLDLGILVPCQSPWNTPLLPVKKPGTNDYRPVQDLREVNKRVQDIHPTVPNPYNLLSSLPPSHTWYSVLDLKDAFFCLKLHPNSQPLFAFEWRDPEKGNTGQLTWTRLPQGFKNSPTLFNEALHRDLASFRALNPQVVMLQYVDDLLVAAPTYRDCKEGTRRLLQELSKLGYRVSAKKAQLCREEVTYLGYLLKGGKRWLTPARKATVMKIPTPTTPRQVREFLGTAGFCRLWIPGFASLAAPLYPLTRPKVPFTWTEAHQEAFGRIKEALLSAPALALPDLTKPFALYVDEKEGVARGVLTQTLGPWRRPVAYLSKKLDPVASGWPTCLKAIAAVALLLKDADKLTLGQNVLVIAPHNLESIVRQPPDRWMTNARMTHYQSLLLNERVSFAPPAILNPATLLPVESDDTPIHICSEILAEETGTRPDLRDQPLPGVPAWYTDGSSFIMDGRRQAGAAIVDNKRTVWASNLPEGTSAQKAELIALTQALRLAEGKSINIYTDSRYAFATAHVHGAIYKQRGWLTSAGKDIKNKEEILALLEAIHLPKRVAIIHCPGHQRGTDPVATGNRKADEAAKQAAQSTRILTETTKNAGKRTADGSEFEKRTADGSEFESPKKKAKVE

SEQ ID NO: 1654 - protein, 2127 aa, synthetic construct
MPAAKRVKLDGGDKKYSIGLDIGTNSVGWAVITDEYKVPSKKFKVLGNTDRHSIKKNLIGALLFDSGETAEATRLKRTARRRYTRRKNRICYLQEIFSNEMAKVDDSFFHRLEESFLVEEDKKHERHPIFGNIVDEVAYHEKYPTIYHLRKKLVDSTDKADLRLIYLALAHMIKFRGHFLIEGDLNPDNSDVDKLFIQLVQTYNQLFEENPINASGVDAKAILSARLSKSRRLENLIAQLPGEKKNGLFGNLIALSLGLTPNFKSNFDLAEDAKLQLSKDTYDDDLDNLLAQIGDQYADLFLAAKNLSDAILLSDILRVNTEITKAPLSASMIKRYDEHHQDLTLLKALVRQQLPEKYKEIFFDQSKNGYAGYIDGGASQEEFYKFIKPILEKMDGTEELLVKLNREDLLRKQRTFDNGSIPHQIHLGELHAILRRQEDFYPFLKDNREKIEKILTFRIPYYVGPLARGNSRFAWMTRKSEETITPWNFEEVVDKGASAQSFIERMTNFDKNLPNEKVLPKHSLLYEYFTVYNELTKVKYVTEGMRKPAFLSGEQKKAIVDLLFKTNRKVTVKQLKEDYFKKIECFDSVEISGVEDRFNASLGTYHDLLKIIKDKDFLDNEENEDILEDIVLTLTLFEDREMIEERLKTYAHLFDDKVMKQLKRRRYTGWGRLSRKLINGIRDKQSGKTILDFLKSDGFANRNFMQLIHDDSLTFKEDIQKAQVSGQGDSLHEHIANLAGSPAIKKGILQTVKVVDELVKVMGRHKPENIVIEMARENQTTQKGQKNSRERMKRIEEGIKELGSQILKEHPVENTQLQNEKLYLYYLQNGRDMYVDQELDINRLSDYDVDHIVPQSFLKDDSIDNKVLTRSDKARGKSDNVPSEEVVKKMKNYWRQLLNAKLITQRKFDNLTKAERGGLSELDKAGFIKRQLVETRQITKHVAQILDSRMNTKYDENDKLIREVKVITLKSKLVSDFRKDFQFYKVREINNYHHAHDAYLNAVVGTALIKKYPKLESEFVYGDYKVYDVRKMIAKSEQEIGKATAKYFFYSNIMNFFKTEITLANGEIRKRPLIETNGETGEIVWDKGRDFATVRKVLSMPQVNIVKKTEVQTGGFSKESILPKRNSDKLIARKKDWDPKKYGGFDSPTVAYSVLVVAKVEKGKSKKLKSVKELLGITIMERSSFEKNPIDFLEAKGYKEVKKDLIIKLPKYSLFELENGRKRMLASAGELQKGNELALPSKYVNFLYLASHYEKLKGSPEDNEQKQLFVEQHKHYLDEIIEQISEFSKRVILADANLDKVLSAYNKHRDKPIREQAENIIHLFTLTNLGAPAAFKYFDTTIDRKRYTSTKEVLDATLIHQSITGLYETRIDLSQLGGDGGGGSEAAAKPAPGGLLGRDLLTKLKAQIQFSTEGPQVTWEDRPAMCLVLNLEEEYRLHEKPVPPSIDPSWLQLFPMVWAEKAGMGLANQVPPVVVELKSDASPVAVRQYPMSKEAREGIRPHIQRFLDLGILVPCQSPWNTPLLPVKKPGTNDYRPVQDLREVNKRVQDIHPTVPNPYNLLSSLPPSHTWYSVLDLKDAFFCLKLHPNSQPLFAFEWRDPEKGNTGQLTWTRLPQGFKNSPTLFNEALHRDLASFRALNPQVVMLQYVDDLLVAAPTYRDCKEGTRRLLQELSKLGYRVSAKKAQLCREEVTYLGYLLKGGKRWLTPARKATVMKIPTPTTPRQVREFLGTAGFCRLWIPGFASLAAPLYPLTRPKVPFTWTEAHQEAFGRIKEALLSAPALALPDLTKPFALYVDEKEGVARGVLTQTLGPWRRPVAYLSKKLDPVASGWPTCLKAIAAVALLLKDADKLTLGQNVLVIAPHNLESIVRQPPDRWMTNARMTHYQSLLLNERVSFAPPAILNPATLLPVESDDTPIHICSEILAEETGTRPDLRDQPLPGVPAWYTDGSSFIMDGRRQAGAAIVDNKRTVWASNLPEGTSAQKAELIALTQALRLAEGKSINIYTDSRYAFATAHVHGAIYKQRGWLTSAGKDIKNKEEILALLEAIHLPKRVAIIHCPGHQRGTDPVATGNRKADEAAKQAAQSTRILTETTKNAGKRTADGSEFEKRTADGSEFESPKKKAKVE

SEQ ID NO: 1655 - protein, 2125 aa, synthetic construct
MPAAKRVKLDGGDKKYSIGLDIGTNSVGWAVITDEYKVPSKKFKVLGNTDRHSIKKNLIGALLFDSGETAEATRLKRTARRRYTRRKNRICYLQEIFSNEMAKVDDSFFHRLEESFLVEEDKKHERHPIFGNIVDEVAYHEKYPTIYHLRKKLVDSTDKADLRLIYLALAHMIKFRGHFLIEGDLNPDNSDVDKLFIQLVQTYNQLFEENPINASGVDAKAILSARLSKSRRLENLIAQLPGEKKNGLFGNLIALSLGLTPNFKSNFDLAEDAKLQLSKDTYDDDLDNLLAQIGDQYADLFLAAKNLSDAILLSDILRVNTEITKAPLSASMIKRYDEHHQDLTLLKALVRQQLPEKYKEIFFDQSKNGYAGYIDGGASQEEFYKFIKPILEKMDGTEELLVKLNREDLLRKQRTFDNGSIPHQIHLGELHAILRRQEDFYPFLKDNREKIEKILTFRIPYYVGPLARGNSRFAWMTRKSEETITPWNFEEVVDKGASAQSFIERMTNFDKNLPNEKVLPKHSLLYEYFTVYNELTKVKYVTEGMRKPAFLSGEQKKAIVDLLFKTNRKVTVKQLKEDYFKKIECFDSVEISGVEDRFNASLGTYHDLLKIIKDKDFLDNEENEDILEDIVLTLTLFEDREMIEERLKTYAHLFDDKVMKQLKRRRYTGWGRLSRKLINGIRDKQSGKTILDFLKSDGFANRNFMQLIHDDSLTFKEDIQKAQVSGQGDSLHEHIANLAGSPAIKKGILQTVKVVDELVKVMGRHKPENIVIEMARENQTTQKGQKNSRERMKRIEEGIKELGSQILKEHPVENTQLQNEKLYLYYLQNGRDMYVDQELDINRLSDYDVDHIVPQSFLKDDSIDNKVLTRSDKARGKSDNVPSEEVVKKMKNYWRQLLNAKLITQRKFDNLTKAERGGLSELDKAGFIKRQLVETRQITKHVAQILDSRMNTKYDENDKLIREVKVITLKSKLVSDFRKDFQFYKVREINNYHHAHDAYLNAVVGTALIKKYPKLESEFVYGDYKVYDVRKMIAKSEQEIGKATAKYFFYSNIMNFFKTEITLANGEIRKRPLIETNGETGEIVWDKGRDFATVRKVLSMPQVNIVKKTEVQTGGFSKESILPKRNSDKLIARKKDWDPKKYGGFDSPTVAYSVLVVAKVEKGKSKKLKSVKELLGITIMERSSFEKNPIDFLEAKGYKEVKKDLIIKLPKYSLFELENGRKRMLASAGELQKGNELALPSKYVNFLYLASHYEKLKGSPEDNEQKQLFVEQHKHYLDEIIEQISEFSKRVILADANLDKVLSAYNKHRDKPIREQAENIIHLFTLTNLGAPAAFKYFDTTIDRKRYTSTKEVLDATLIHQSITGLYETRIDLSQLGGDGGGGSGGSGGSGGLLGRDLLTKLKAQIQFSTEGPQVTWEDRPAMCLVLNLEEEYRLHEKPVPPSIDPSWLQLFPMVWAEKAGMGLANQVPPVVVELKSDASPVAVRQYPMSKEAREGIRPHIQRFLDLGILVPCQSPWNTPLLPVKKPGTNDYRPVQDLREVNKRVQDIHPTVPNPYNLLSSLPPSHTWYSVLDLKDAFFCLKLHPNSQPLFAFEWRDPEKGNTGQLTWTRLPQGFKNSPTLFNEALHRDLASFRALNPQVVMLQYVDDLLVAAPTYRDCKEGTRRLLQELSKLGYRVSAKKAQLCREEVTYLGYLLKGGKRWLTPARKATVMKIPTPTTPRQVREFLGTAGFCRLWIPGFASLAAPLYPLTRPKVPFTWTEAHQEAFGRIKEALLSAPALALPDLTKPFALYVDEKEGVARGVLTQTLGPWRRPVAYLSKKLDPVASGWPTCLKAIAAVALLLKDADKLTLGQNVLVIAPHNLESIVRQPPDRWMTNARMTHYQSLLLNERVSFAPPAILNPATLLPVESDDTPIHICSEILAEETGTRPDLRDQPLPGVPAWYTDGSSFIMDGRRQAGAAIVDNKRTVWASNLPEGTSAQKAELIALTQALRLAEGKSINIYTDSRYAFATAHVHGAIYKQRGWLTSAGKDIKNKEEILALLEAIHLPKRVAIIHCPGHQRGTDPVATGNRKADEAAKQAAQSTRILTETTKNAGKRTADGSEFEKRTADGSEFESPKKKAKVE

SEQ ID NO: 1656 - protein, 2127 aa, synthetic construct
MPAAKRVKLDGGDKKYSIGLDIGTNSVGWAVITDEYKVPSKKFKVLGNTDRHSIKKNLIGALLFDSGETAEATRLKRTARRRYTRRKNRICYLQEIFSNEMAKVDDSFFHRLEESFLVEEDKKHERHPIFGNIVDEVAYHEKYPTIYHLRKKLVDSTDKADLRLIYLALAHMIKFRGHFLIEGDLNPDNSDVDKLFIQLVQTYNQLFEENPINASGVDAKAILSARLSKSRRLENLIAQLPGEKKNGLFGNLIALSLGLTPNFKSNFDLAEDAKLQLSKDTYDDDLDNLLAQIGDQYADLFLAAKNLSDAILLSDILRVNTEITKAPLSASMIKRYDEHHQDLTLLKALVRQQLPEKYKEIFFDQSKNGYAGYIDGGASQEEFYKFIKPILEKMDGTEELLVKLNREDLLRKQRTFDNGSIPHQIHLGELHAILRRQEDFYPFLKDNREKIEKILTFRIPYYVGPLARGNSRFAWMTRKSEETITPWNFEEVVDKGASAQSFIERMTNFDKNLPNEKVLPKHSLLYEYFTVYNELTKVKYVTEGMRKPAFLSGEQKKAIVDLLFKTNRKVTVKQLKEDYFKKIECFDSVEISGVEDRFNASLGTYHDLLKIIKDKDFLDNEENEDILEDIVLTLTLFEDREMIEERLKTYAHLFDDKVMKQLKRRRYTGWGRLSRKLINGIRDKQSGKTILDFLKSDGFANRNFMQLIHDDSLTFKEDIQKAQVSGQGDSLHEHIANLAGSPAIKKGILQTVKVVDELVKVMGRHKPENIVIEMARENQTTQKGQKNSRERMKRIEEGIKELGSQILKEHPVENTQLQNEKLYLYYLQNGRDMYVDQELDINRLSDYDVDHIVPQSFLKDDSIDNKVLTRSDKARGKSDNVPSEEVVKKMKNYWRQLLNAKLITQRKFDNLTKAERGGLSELDKAGFIKRQLVETRQITKHVAQILDSRMNTKYDENDKLIREVKVITLKSKLVSDFRKDFQFYKVREINNYHHAHDAYLNAVVGTALIKKYPKLESEFVYGDYKVYDVRKMIAKSEQEIGKATAKYFFYSNIMNFFKTEITLANGEIRKRPLIETNGETGEIVWDKGRDFATVRKVLSMPQVNIVKKTEVQTGGFSKESILPKRNSDKLIARKKDWDPKKYGGFDSPTVAYSVLVVAKVEKGKSKKLKSVKELLGITIMERSSFEKNPIDFLEAKGYKEVKKDLIIKLPKYSLFELENGRKRMLASAGELQKGNELALPSKYVNFLYLASHYEKLKGSPEDNEQKQLFVEQHKHYLDEIIEQISEFSKRVILADANLDKVLSAYNKHRDKPIREQAENIIHLFTLTNLGAPAAFKYFDTTIDRKRYTSTKEVLDATLIHQSITGLYETRIDLSQLGGDGGPAPEAAAKGSSGGLLGRDLLTKLKAQIQFSTEGPQVTWEDRPAMCLVLNLEEEYRLHEKPVPPSIDPSWLQLFPMVWAEKAGMGLANQVPPVVVELKSDASPVAVRQYPMSKEAREGIRPHIQRFLDLGILVPCQSPWNTPLLPVKKPGTNDYRPVQDLREVNKRVQDIHPTVPNPYNLLSSLPPSHTWYSVLDLKDAFFCLKLHPNSQPLFAFEWRDPEKGNTGQLTWTRLPQGFKNSPTLFNEALHRDLASFRALNPQVVMLQYVDDLLVAAPTYRDCKEGTRRLLQELSKLGYRVSAKKAQLCREEVTYLGYLLKGGKRWLTPARKATVMKIPTPTTPRQVREFLGTAGFCRLWIPGFASLAAPLYPLTRPKVPFTWTEAHQEAFGRIKEALLSAPALALPDLTKPFALYVDEKEGVARGVLTQTLGPWRRPVAYLSKKLDPVASGWPTCLKAIAAVALLLKDADKLTLGQNVLVIAPHNLESIVRQPPDRWMTNARMTHYQSLLLNERVSFAPPAILNPATLLPVESDDTPIHICSEILAEETGTRPDLRDQPLPGVPAWYTDGSSFIMDGRRQAGAAIVDNKRTVWASNLPEGTSAQKAELIALTQALRLAEGKSINIYTDSRYAFATAHVHGAIYKQRGWLTSAGKDIKNKEEILALLEAIHLPKRVAIIHCPGHQRGTDPVATGNRKADEAAKQAAQSTRILTETTKNAGKRTADGSEFEKRTADGSEFESPKKKAKVE

SEQ ID NO: 1657 - protein, 2122 aa, synthetic construct
MPAAKRVKLDGGDKKYSIGLDIGTNSVGWAVITDEYKVPSKKFKVLGNTDRHSIKKNLIGALLFDSGETAEATRLKRTARRRYTRRKNRICYLQEIFSNEMAKVDDSFFHRLEESFLVEEDKKHERHPIFGNIVDEVAYHEKYPTIYHLRKKLVDSTDKADLRLIYLALAHMIKFRGHFLIEGDLNPDNSDVDKLFIQLVQTYNQLFEENPINASGVDAKAILSARLSKSRRLENLIAQLPGEKKNGLFGNLIALSLGLTPNFKSNFDLAEDAKLQLSKDTYDDDLDNLLAQIGDQYADLFLAAKNLSDAILLSDILRVNTEITKAPLSASMIKRYDEHHQDLTLLKALVRQQLPEKYKEIFFDQSKNGYAGYIDGGASQEEFYKFIKPILEKMDGTEELLVKLNREDLLRKQRTFDNGSIPHQIHLGELHAILRRQEDFYPFLKDNREKIEKILTFRIPYYVGPLARGNSRFAWMTRKSEETITPWNFEEVVDKGASAQSFIERMTNFDKNLPNEKVLPKHSLLYEYFTVYNELTKVKYVTEGMRKPAFLSGEQKKAIVDLLFKTNRKVTVKQLKEDYFKKIECFDSVEISGVEDRFNASLGTYHDLLKIIKDKDFLDNEENEDILEDIVLTLTLFEDREMIEERLKTYAHLFDDKVMKQLKRRRYTGWGRLSRKLINGIRDKQSGKTILDFLKSDGFANRNFMQLIHDDSLTFKEDIQKAQVSGQGDSLHEHIANLAGSPAIKKGILQTVKVVDELVKVMGRHKPENIVIEMARENQTTQKGQKNSRERMKRIEEGIKELGSQILKEHPVENTQLQNEKLYLYYLQNGRDMYVDQELDINRLSDYDVDHIVPQSFLKDDSIDNKVLTRSDKARGKSDNVPSEEVVKKMKNYWRQLLNAKLITQRKFDNLTKAERGGLSELDKAGFIKRQLVETRQITKHVAQILDSRMNTKYDENDKLIREVKVITLKSKLVSDFRKDFQFYKVREINNYHHAHDAYLNAVVGTALIKKYPKLESEFVYGDYKVYDVRKMIAKSEQEIGKATAKYFFYSNIMNFFKTEITLANGEIRKRPLIETNGETGEIVWDKGRDFATVRKVLSMPQVNIVKKTEVQTGGFSKESILPKRNSDKLIARKKDWDPKKYGGFDSPTVAYSVLVVAKVEKGKSKKLKSVKELLGITIMERSSFEKNPIDFLEAKGYKEVKKDLIIKLPKYSLFELENGRKRMLASAGELQKGNELALPSKYVNFLYLASHYEKLKGSPEDNEQKQLFVEQHKHYLDEIIEQISEFSKRVILADANLDKVLSAYNKHRDKPIREQAENIIHLFTLTNLGAPAAFKYFDTTIDRKRYTSTKEVLDATLIHQSITGLYETRIDLSQLGGDGGGGGGSSGGLLGRDLLTKLKAQIQFSTEGPQVTWEDRPAMCLVLNLEEEYRLHEKPVPPSIDPSWLQLFPMVWAEKAGMGLANQVPPVVVELKSDASPVAVRQYPMSKEAREGIRPHIQRFLDLGILVPCQSPWNTPLLPVKKPGTNDYRPVQDLREVNKRVQDIHPTVPNPYNLLSSLPPSHTWYSVLDLKDAFFCLKLHPNSQPLFAFEWRDPEKGNTGQLTWTRLPQGFKNSPTLFNEALHRDLASFRALNPQVVMLQYVDDLLVAAPTYRDCKEGTRRLLQELSKLGYRVSAKKAQLCREEVTYLGYLLKGGKRWLTPARKATVMKIPTPTTPRQVREFLGTAGFCRLWIPGFASLAAPLYPLTRPKVPFTWTEAHQEAFGRIKEALLSAPALALPDLTKPFALYVDEKEGVARGVLTQTLGPWRRPVAYLSKKLDPVASGWPTCLKAIAAVALLLKDADKLTLGQNVLVIAPHNLESIVRQPPDRWMTNARMTHYQSLLLNERVSFAPPAILNPATLLPVESDDTPIHICSEILAEETGTRPDLRDQPLPGVPAWYTDGSSFIMDGRRQAGAAIVDNKRTVWASNLPEGTSAQKAELIALTQALRLAEGKSINIYTDSRYAFATAHVHGAIYKQRGWLTSAGKDIKNKEEILALLEAIHLPKRVAIIHCPGHQRGTDPVATGNRKADEAAKQAAQSTRILTETTKNAGKRTADGSEFEKRTADGSEFESPKKKAKVE

SEQ ID NO: 1658 - protein, 2125 aa, synthetic construct
MPAAKRVKLDGGDKKYSIGLDIGTNSVGWAVITDEYKVPSKKFKVLGNTDRHSIKKNLIGALLFDSGETAEATRLKRTARRRYTRRKNRICYLQEIFSNEMAKVDDSFFHRLEESFLVEEDKKHERHPIFGNIVDEVAYHEKYPTIYHLRKKLVDSTDKADLRLIYLALAHMIKFRGHFLIEGDLNPDNSDVDKLFIQLVQTYNQLFEENPINASGVDAKAILSARLSKSRRLENLIAQLPGEKKNGLFGNLIALSLGLTPNFKSNFDLAEDAKLQLSKDTYDDDLDNLLAQIGDQYADLFLAAKNLSDAILLSDILRVNTEITKAPLSASMIKRYDEHHQDLTLLKALVRQQLPEKYKEIFFDQSKNGYAGYIDGGASQEEFYKFIKPILEKMDGTEELLVKLNREDLLRKQRTFDNGSIPHQIHLGELHAILRRQEDFYPFLKDNREKIEKILTFRIPYYVGPLARGNSRFAWMTRKSEETITPWNFEEVVDKGASAQSFIERMTNFDKNLPNEKVLPKHSLLYEYFTVYNELTKVKYVTEGMRKPAFLSGEQKKAIVDLLFKTNRKVTVKQLKEDYFKKIECFDSVEISGVEDRFNASLGTYHDLLKIIKDKDFLDNEENEDILEDIVLTLTLFEDREMIEERLKTYAHLFDDKVMKQLKRRRYTGWGRLSRKLINGIRDKQSGKTILDFLKSDGFANRNFMQLIHDDSLTFKEDIQKAQVSGQGDSLHEHIANLAGSPAIKKGILQTVKVVDELVKVMGRHKPENIVIEMARENQTTQKGQKNSRERMKRIEEGIKELGSQILKEHPVENTQLQNEKLYLYYLQNGRDMYVDQELDINRLSDYDVDHIVPQSFLKDDSIDNKVLTRSDKARGKSDNVPSEEVVKKMKNYWRQLLNAKLITQRKFDNLTKAERGGLSELDKAGFIKRQLVETRQITKHVAQILDSRMNTKYDENDKLIREVKVITLKSKLVSDFRKDFQFYKVREINNYHHAHDAYLNAVVGTALIKKYPKLESEFVYGDYKVYDVRKMIAKSEQEIGKATAKYFFYSNIMNFFKTEITLANGEIRKRPLIETNGETGEIVWDKGRDFATVRKVLSMPQVNIVKKTEVQTGGFSKESILPKRNSDKLIARKKDWDPKKYGGFDSPTVAYSVLVVAKVEKGKSKKLKSVKELLGITIMERSSFEKNPIDFLEAKGYKEVKKDLIIKLPKYSLFELENGRKRMLASAGELQKGNELALPSKYVNFLYLASHYEKLKGSPEDNEQKQLFVEQHKHYLDEIIEQISEFSKRVILADANLDKVLSAYNKHRDKPIREQAENIIHLFTLTNLGAPAAFKYFDTTIDRKRYTSTKEVLDATLIHQSITGLYETRIDLSQLGGDGGPAPGGSGSSGGLLGRDLLTKLKAQIQFSTEGPQVTWEDRPAMCLVLNLEEEYRLHEKPVPPSIDPSWLQLFPMVWAEKAGMGLANQVPPVVVELKSDASPVAVRQYPMSKEAREGIRPHIQRFLDLGILVPCQSPWNTPLLPVKKPGTNDYRPVQDLREVNKRVQDIHPTVPNPYNLLSSLPPSHTWYSVLDLKDAFFCLKLHPNSQPLFAFEWRDPEKGNTGQLTWTRLPQGFKNSPTLFNEALHRDLASFRALNPQVVMLQYVDDLLVAAPTYRDCKEGTRRLLQELSKLGYRVSAKKAQLCREEVTYLGYLLKGGKRWLTPARKATVMKIPTPTTPRQVREFLGTAGFCRLWIPGFASLAAPLYPLTRPKVPFTWTEAHQEAFGRIKEALLSAPALALPDLTKPFALYVDEKEGVARGVLTQTLGPWRRPVAYLSKKLDPVASGWPTCLKAIAAVALLLKDADKLTLGQNVLVIAPHNLESIVRQPPDRWMTNARMTHYQSLLLNERVSFAPPAILNPATLLPVESDDTPIHICSEILAEETGTRPDLRDQPLPGVPAWYTDGSSFIMDGRRQAGAAIVDNKRTVWASNLPEGTSAQKAELIALTQALRLAEGKSINIYTDSRYAFATAHVHGAIYKQRGWLTSAGKDIKNKEEILALLEAIHLPKRVAIIHCPGHQRGTDPVATGNRKADEAAKQAAQSTRILTETTKNAGKRTADGSEFEKRTADGSEFESPKKKAKVE

SEQ ID NO: 1659 - protein, 2127 aa, synthetic construct
MPAAKRVKLDGGDKKYSIGLDIGTNSVGWAVITDEYKVPSKKFKVLGNTDRHSIKKNLIGALLFDSGETAEATRLKRTARRRYTRRKNRICYLQEIFSNEMAKVDDSFFHRLEESFLVEEDKKHERHPIFGNIVDEVAYHEKYPTIYHLRKKLVDSTDKADLRLIYLALAHMIKFRGHFLIEGDLNPDNSDVDKLFIQLVQTYNQLFEENPINASGVDAKAILSARLSKSRRLENLIAQLPGEKKNGLFGNLIALSLGLTPNFKSNFDLAEDAKLQLSKDTYDDDLDNLLAQIGDQYADLFLAAKNLSDAILLSDILRVNTEITKAPLSASMIKRYDEHHQDLTLLKALVRQQLPEKYKEIFFDQSKNGYAGYIDGGASQEEFYKFIKPILEKMDGTEELLVKLNREDLLRKQRTFDNGSIPHQIHLGELHAILRRQEDFYPFLKDNREKIEKILTFRIPYYVGPLARGNSRFAWMTRKSEETITPWNFEEVVDKGASAQSFIERMTNFDKNLPNEKVLPKHSLLYEYFTVYNELTKVKYVTEGMRKPAFLSGEQKKAIVDLLFKTNRKVTVKQLKEDYFKKIECFDSVEISGVEDRFNASLGTYHDLLKIIKDKDFLDNEENEDILEDIVLTLTLFEDREMIEERLKTYAHLFDDKVMKQLKRRRYTGWGRLSRKLINGIRDKQSGKTILDFLKSDGFANRNFMQLIHDDSLTFKEDIQKAQVSGQGDSLHEHIANLAGSPAIKKGILQTVKVVDELVKVMGRHKPENIVIEMARENQTTQKGQKNSRERMKRIEEGIKELGSQILKEHPVENTQLQNEKLYLYYLQNGRDMYVDQELDINRLSDYDVDHIVPQSFLKDDSIDNKVLTRSDKARGKSDNVPSEEVVKKMKNYWRQLLNAKLITQRKFDNLTKAERGGLSELDKAGFIKRQLVETRQITKHVAQILDSRMNTKYDENDKLIREVKVITLKSKLVSDFRKDFQFYKVREINNYHHAHDAYLNAVVGTALIKKYPKLESEFVYGDYKVYDVRKMIAKSEQEIGKATAKYFFYSNIMNFFKTEITLANGEIRKRPLIETNGETGEIVWDKGRDFATVRKVLSMPQVNIVKKTEVQTGGFSKESILPKRNSDKLIARKKDWDPKKYGGFDSPTVAYSVLVVAKVEKGKSKKLKSVKELLGITIMERSSFEKNPIDFLEAKGYKEVKKDLIIKLPKYSLFELENGRKRMLASAGELQKGNELALPSKYVNFLYLASHYEKLKGSPEDNEQKQLFVEQHKHYLDEIIEQISEFSKRVILADANLDKVLSAYNKHRDKPIREQAENIIHLFTLTNLGAPAAFKYFDTTIDRKRYTSTKEVLDATLIHQSITGLYETRIDLSQLGGDGGGGSGGGEAAAKGGLLGRDLLTKLKAQIQFSTEGPQVTWEDRPAMCLVLNLEEEYRLHEKPVPPSIDPSWLQLFPMVWAEKAGMGLANQVPPVVVELKSDASPVAVRQYPMSKEAREGIRPHIQRFLDLGILVPCQSPWNTPLLPVKKPGTNDYRPVQDLREVNKRVQDIHPTVPNPYNLLSSLPPSHTWYSVLDLKDAFFCLKLHPNSQPLFAFEWRDPEKGNTGQLTWTRLPQGFKNSPTLFNEALHRDLASFRALNPQVVMLQYVDDLLVAAPTYRDCKEGTRRLLQELSKLGYRVSAKKAQLCREEVTYLGYLLKGGKRWLTPARKATVMKIPTPTTPRQVREFLGTAGFCRLWIPGFASLAAPLYPLTRPKVPFTWTEAHQEAFGRIKEALLSAPALALPDLTKPFALYVDEKEGVARGVLTQTLGPWRRPVAYLSKKLDPVASGWPTCLKAIAAVALLLKDADKLTLGQNVLVIAPHNLESIVRQPPDRWMTNARMTHYQSLLLNERVSFAPPAILNPATLLPVESDDTPIHICSEILAEETGTRPDLRDQPLPGVPAWYTDGSSFIMDGRRQAGAAIVDNKRTVWASNLPEGTSAQKAELIALTQALRLAEGKSINIYTDSRYAFATAHVHGAIYKQRGWLTSAGKDIKNKEEILALLEAIHLPKRVAIIHCPGHQRGTDPVATGNRKADEAAKQAAQSTRILTETTKNAGKRTADGSEFEKRTADGSEFESPKKKAKVE

SEQ ID NO: 1660 - protein, 2132 aa, synthetic construct
MPAAKRVKLDGGDKKYSIGLDIGTNSVGWAVITDEYKVPSKKFKVLGNTDRHSIKKNLIGALLFDSGETAEATRLKRTARRRYTRRKNRICYLQEIFSNEMAKVDDSFFHRLEESFLVEEDKKHERHPIFGNIVDEVAYHEKYPTIYHLRKKLVDSTDKADLRLIYLALAHMIKFRGHFLIEGDLNPDNSDVDKLFIQLVQTYNQLFEENPINASGVDAKAILSARLSKSRRLENLIAQLPGEKKNGLFGNLIALSLGLTPNFKSNFDLAEDAKLQLSKDTYDDDLDNLLAQIGDQYADLFLAAKNLSDAILLSDILRVNTEITKAPLSASMIKRYDEHHQDLTLLKALVRQQLPEKYKEIFFDQSKNGYAGYIDGGASQEEFYKFIKPILEKMDGTEELLVKLNREDLLRKQRTFDNGSIPHQIHLGELHAILRRQEDFYPFLKDNREKIEKILTFRIPYYVGPLARGNSRFAWMTRKSEETITPWNFEEVVDKGASAQSFIERMTNFDKNLPNEKVLPKHSLLYEYFTVYNELTKVKYVTEGMRKPAFLSGEQKKAIVDLLFKTNRKVTVKQLKEDYFKKIECFDSVEISGVEDRFNASLGTYHDLLKIIKDKDFLDNEENEDILEDIVLTLTLFEDREMIEERLKTYAHLFDDKVMKQLKRRRYTGWGRLSRKLINGIRDKQSGKTILDFLKSDGFANRNFMQLIHDDSLTFKEDIQKAQVSGQGDSLHEHIANLAGSPAIKKGILQTVKVVDELVKVMGRHKPENIVIEMARENQTTQKGQKNSRERMKRIEEGIKELGSQILKEHPVENTQLQNEKLYLYYLQNGRDMYVDQELDINRLSDYDVDHIVPQSFLKDDSIDNKVLTRSDKARGKSDNVPSEEVVKKMKNYWRQLLNAKLITQRKFDNLTKAERGGLSELDKAGFIKRQLVETRQITKHVAQILDSRMNTKYDENDKLIREVKVITLKSKLVSDFRKDFQFYKVREINNYHHAHDAYLNAVVGTALIKKYPKLESEFVYGDYKVYDVRKMIAKSEQEIGKATAKYFFYSNIMNFFKTEITLANGEIRKRPLIETNGETGEIVWDKGRDFATVRKVLSMPQVNIVKKTEVQTGGFSKESILPKRNSDKLIARKKDWDPKKYGGFDSPTVAYSVLVVAKVEKGKSKKLKSVKELLGITIMERSSFEKNPIDFLEAKGYKEVKKDLIIKLPKYSLFELENGRKRMLASAGELQKGNELALPSKYVNFLYLASHYEKLKGSPEDNEQKQLFVEQHKHYLDEIIEQISEFSKRVILADANLDKVLSAYNKHRDKPIREQAENIIHLFTLTNLGAPAAFKYFDTTIDRKRYTSTKEVLDATLIHQSITGLYETRIDLSQLGGDGGSGSETPGTSESATPESGGLLGRDLLTKLKAQIQFSTEGPQVTWEDRPAMCLVLNLEEEYRLHEKPVPPSIDPSWLQLFPMVWAEKAGMGLANQVPPVVVELKSDASPVAVRQYPMSKEAREGIRPHIQRFLDLGILVPCQSPWNTPLLPVKKPGTNDYRPVQDLREVNKRVQDIHPTVPNPYNLLSSLPPSHTWYSVLDLKDAFFCLKLHPNSQPLFAFEWRDPEKGNTGQLTWTRLPQGFKNSPTLFNEALHRDLASFRALNPQVVMLQYVDDLLVAAPTYRDCKEGTRRLLQELSKLGYRVSAKKAQLCREEVTYLGYLLKGGKRWLTPARKATVMKIPTPTTPRQVREFLGTAGFCRLWIPGFASLAAPLYPLTRPKVPFTWTEAHQEAFGRIKEALLSAPALALPDLTKPFALYVDEKEGVARGVLTQTLGPWRRPVAYLSKKLDPVASGWPTCLKAIAAVALLLKDADKLTLGQNVLVIAPHNLESIVRQPPDRWMTNARMTHYQSLLLNERVSFAPPAILNPATLLPVESDDTPIHICSEILAEETGTRPDLRDQPLPGVPAWYTDGSSFIMDGRRQAGAAIVDNKRTVWASNLPEGTSAQKAELIALTQALRLAEGKSINIYTDSRYAFATAHVHGAIYKQRGWLTSAGKDIKNKEEILALLEAIHLPKRVAIIHCPGHQRGTDPVATGNRKADEAAKQAAQSTRILTETTKNAGKRTADGSEFEKRTADGSEFESPKKKAKVE

SEQ ID NO: 1661 - protein, 2125 aa, synthetic construct
MPAAKRVKLDGGDKKYSIGLDIGTNSVGWAVITDEYKVPSKKFKVLGNTDRHSIKKNLIGALLFDSGETAEATRLKRTARRRYTRRKNRICYLQEIFSNEMAKVDDSFFHRLEESFLVEEDKKHERHPIFGNIVDEVAYHEKYPTIYHLRKKLVDSTDKADLRLIYLALAHMIKFRGHFLIEGDLNPDNSDVDKLFIQLVQTYNQLFEENPINASGVDAKAILSARLSKSRRLENLIAQLPGEKKNGLFGNLIALSLGLTPNFKSNFDLAEDAKLQLSKDTYDDDLDNLLAQIGDQYADLFLAAKNLSDAILLSDILRVNTEITKAPLSASMIKRYDEHHQDLTLLKALVRQQLPEKYKEIFFDQSKNGYAGYIDGGASQEEFYKFIKPILEKMDGTEELLVKLNREDLLRKQRTFDNGSIPHQIHLGELHAILRRQEDFYPFLKDNREKIEKILTFRIPYYVGPLARGNSRFAWMTRKSEETITPWNFEEVVDKGASAQSFIERMTNFDKNLPNEKVLPKHSLLYEYFTVYNELTKVKYVTEGMRKPAFLSGEQKKAIVDLLFKTNRKVTVKQLKEDYFKKIECFDSVEISGVEDRFNASLGTYHDLLKIIKDKDFLDNEENEDILEDIVLTLTLFEDREMIEERLKTYAHLFDDKVMKQLKRRRYTGWGRLSRKLINGIRDKQSGKTILDFLKSDGFANRNFMQLIHDDSLTFKEDIQKAQVSGQGDSLHEHIANLAGSPAIKKGILQTVKVVDELVKVMGRHKPENIVIEMARENQTTQKGQKNSRERMKRIEEGIKELGSQILKEHPVENTQLQNEKLYLYYLQNGRDMYVDQELDINRLSDYDVDHIVPQSFLKDDSIDNKVLTRSDKARGKSDNVPSEEVVKKMKNYWRQLLNAKLITQRKFDNLTKAERGGLSELDKAGFIKRQLVETRQITKHVAQILDSRMNTKYDENDKLIREVKVITLKSKLVSDFRKDFQFYKVREINNYHHAHDAYLNAVVGTALIKKYPKLESEFVYGDYKVYDVRKMIAKSEQEIGKATAKYFFYSNIMNFFKTEITLANGEIRKRPLIETNGETGEIVWDKGRDFATVRKVLSMPQVNIVKKTEVQTGGFSKESILPKRNSDKLIARKKDWDPKKYGGFDSPTVAYSVLVVAKVEKGKSKKLKSVKELLGITIMERSSFEKNPIDFLEAKGYKEVKKDLIIKLPKYSLFELENGRKRMLASAGELQKGNELALPSKYVNFLYLASHYEKLKGSPEDNEQKQLFVEQHKHYLDEIIEQISEFSKRVILADANLDKVLSAYNKHRDKPIREQAENIIHLFTLTNLGAPAAFKYFDTTIDRKRYTSTKEVLDATLIHQSITGLYETRIDLSQLGGDGGGSSGGSPAPGGLLGRDLLTKLKAQIQFSTEGPQVTWEDRPAMCLVLNLEEEYRLHEKPVPPSIDPSWLQLFPMVWAEKAGMGLANQVPPVVVELKSDASPVAVRQYPMSKEAREGIRPHIQRFLDLGILVPCQSPWNTPLLPVKKPGTNDYRPVQDLREVNKRVQDIHPTVPNPYNLLSSLPPSHTWYSVLDLKDAFFCLKLHPNSQPLFAFEWRDPEKGNTGQLTWTRLPQGFKNSPTLFNEALHRDLASFRALNPQVVMLQYVDDLLVAAPTYRDCKEGTRRLLQELSKLGYRVSAKKAQLCREEVTYLGYLLKGGKRWLTPARKATVMKIPTPTTPRQVREFLGTAGFCRLWIPGFASLAAPLYPLTRPKVPFTWTEAHQEAFGRIKEALLSAPALALPDLTKPFALYVDEKEGVARGVLTQTLGPWRRPVAYLSKKLDPVASGWPTCLKAIAAVALLLKDADKLTLGQNVLVIAPHNLESIVRQPPDRWMTNARMTHYQSLLLNERVSFAPPAILNPATLLPVESDDTPIHICSEILAEETGTRPDLRDQPLPGVPAWYTDGSSFIMDGRRQAGAAIVDNKRTVWASNLPEGTSAQKAELIALTQALRLAEGKSINIYTDSRYAFATAHVHGAIYKQRGWLTSAGKDIKNKEEILALLEAIHLPKRVAIIHCPGHQRGTDPVATGNRKADEAAKQAAQSTRILTETTKNAGKRTADGSEFEKRTADGSEFESPKKKAKVE

SEQ ID NO: 1662 - protein, 2146 aa, synthetic construct
MPAAKRVKLDGGDKKYSIGLDIGTNSVGWAVITDEYKVPSKKFKVLGNTDRHSIKKNLIGALLFDSGETAEATRLKRTARRRYTRRKNRICYLQEIFSNEMAKVDDSFFHRLEESFLVEEDKKHERHPIFGNIVDEVAYHEKYPTIYHLRKKLVDSTDKADLRLIYLALAHMIKFRGHFLIEGDLNPDNSDVDKLFIQLVQTYNQLFEENPINASGVDAKAILSARLSKSRRLENLIAQLPGEKKNGLFGNLIALSLGLTPNFKSNFDLAEDAKLQLSKDTYDDDLDNLLAQIGDQYADLFLAAKNLSDAILLSDILRVNTEITKAPLSASMIKRYDEHHQDLTLLKALVRQQLPEKYKEIFFDQSKNGYAGYIDGGASQEEFYKFIKPILEKMDGTEELLVKLNREDLLRKQRTFDNGSIPHQIHLGELHAILRRQEDFYPFLKDNREKIEKILTFRIPYYVGPLARGNSRFAWMTRKSEETITPWNFEEVVDKGASAQSFIERMTNFDKNLPNEKVLPKHSLLYEYFTVYNELTKVKYVTEGMRKPAFLSGEQKKAIVDLLFKTNRKVTVKQLKEDYFKKIECFDSVEISGVEDRFNASLGTYHDLLKIIKDKDFLDNEENEDILEDIVLTLTLFEDREMIEERLKTYAHLFDDKVMKQLKRRRYTGWGRLSRKLINGIRDKQSGKTILDFLKSDGFANRNFMQLIHDDSLTFKEDIQKAQVSGQGDSLHEHIANLAGSPAIKKGILQTVKVVDELVKVMGRHKPENIVIEMARENQTTQKGQKNSRERMKRIEEGIKELGSQILKEHPVENTQLQNEKLYLYYLQNGRDMYVDQELDINRLSDYDVDHIVPQSFLKDDSIDNKVLTRSDKARGKSDNVPSEEVVKKMKNYWRQLLNAKLITQRKFDNLTKAERGGLSELDKAGFIKRQLVETRQITKHVAQILDSRMNTKYDENDKLIREVKVITLKSKLVSDFRKDFQFYKVREINNYHHAHDAYLNAVVGTALIKKYPKLESEFVYGDYKVYDVRKMIAKSEQEIGKATAKYFFYSNIMNFFKTEITLANGEIRKRPLIETNGETGEIVWDKGRDFATVRKVLSMPQVNIVKKTEVQTGGFSKESILPKRNSDKLIARKKDWDPKKYGGFDSPTVAYSVLVVAKVEKGKSKKLKSVKELLGITIMERSSFEKNPIDFLEAKGYKEVKKDLIIKLPKYSLFELENGRKRMLASAGELQKGNELALPSKYVNFLYLASHYEKLKGSPEDNEQKQLFVEQHKHYLDEIIEQISEFSKRVILADANLDKVLSAYNKHRDKPIREQAENIIHLFTLTNLGAPAAFKYFDTTIDRKRYTSTKEVLDATLIHQSITGLYETRIDLSQLGGDGGGGGGSGGGGSGGGGSGGGGSGGGGSGGGGSGGLLGRDLLTKLKAQIQFSTEGPQVTWEDRPAMCLVLNLEEEYRLHEKPVPPSIDPSWLQLFPMVWAEKAGMGLANQVPPVVVELKSDASPVAVRQYPMSKEAREGIRPHIQRFLDLGILVPCQSPWNTPLLPVKKPGTNDYRPVQDLREVNKRVQDIHPTVPNPYNLLSSLPPSHTWYSVLDLKDAFFCLKLHPNSQPLFAFEWRDPEKGNTGQLTWTRLPQGFKNSPTLFNEALHRDLASFRALNPQVVMLQYVDDLLVAAPTYRDCKEGTRRLLQELSKLGYRVSAKKAQLCREEVTYLGYLLKGGKRWLTPARKATVMKIPTPTTPRQVREFLGKAGFCRLFIPGFASLAAPLYPLTRPKVPFTWTEAHQEAFGRIKEALLSAPALALPDLTKPFALYVDEKEGVARGVLTQTLGPWRRPVAYLSKKLDPVASGWPTCLKAIAAVALLLKDADKLTLGQNVLVIAPHNLESIVRQPPDRWMTNARMTHYQSLLLNERVSFAPPAILNPATLLPVESDDTPIHICSEILAEETGTRPDLRDQPLPGVPAWYTDGSSFIMDGRRQAGAAIVDNKRTVWASNLPEGTSAQKAELIALTQALRLAEGKSINIYTDSRYAFATAHVHGAIYKQRGWLTSAGKDIKNKEEILALLEAIHLPKRVAIIHCPGHQRGTDPVATGNRKADEAAKQAAQSTRILTETTKNAGKRTADGSEFEKRTADGSEFESPKKKAKVE

SEQ ID NO: 1663 - protein, 2127 aa, synthetic construct
MPAAKRVKLDGGDKKYSIGLDIGTNSVGWAVITDEYKVPSKKFKVLGNTDRHSIKKNLIGALLFDSGETAEATRLKRTARRRYTRRKNRICYLQEIFSNEMAKVDDSFFHRLEESFLVEEDKKHERHPIFGNIVDEVAYHEKYPTIYHLRKKLVDSTDKADLRLIYLALAHMIKFRGHFLIEGDLNPDNSDVDKLFIQLVQTYNQLFEENPINASGVDAKAILSARLSKSRRLENLIAQLPGEKKNGLFGNLIALSLGLTPNFKSNFDLAEDAKLQLSKDTYDDDLDNLLAQIGDQYADLFLAAKNLSDAILLSDILRVNTEITKAPLSASMIKRYDEHHQDLTLLKALVRQQLPEKYKEIFFDQSKNGYAGYIDGGASQEEFYKFIKPILEKMDGTEELLVKLNREDLLRKQRTFDNGSIPHQIHLGELHAILRRQEDFYPFLKDNREKIEKILTFRIPYYVGPLARGNSRFAWMTRKSEETITPWNFEEVVDKGASAQSFIERMTNFDKNLPNEKVLPKHSLLYEYFTVYNELTKVKYVTEGMRKPAFLSGEQKKAIVDLLFKTNRKVTVKQLKEDYFKKIECFDSVEISGVEDRFNASLGTYHDLLKIIKDKDFLDNEENEDILEDIVLTLTLFEDREMIEERLKTYAHLFDDKVMKQLKRRRYTGWGRLSRKLINGIRDKQSGKTILDFLKSDGFANRNFMQLIHDDSLTFKEDIQKAQVSGQGDSLHEHIANLAGSPAIKKGILQTVKVVDELVKVMGRHKPENIVIEMARENQTTQKGQKNSRERMKRIEEGIKELGSQILKEHPVENTQLQNEKLYLYYLQNGRDMYVDQELDINRLSDYDVDHIVPQSFLKDDSIDNKVLTRSDKARGKSDNVPSEEVVKKMKNYWRQLLNAKLITQRKFDNLTKAERGGLSELDKAGFIKRQLVETRQITKHVAQILDSRMNTKYDENDKLIREVKVITLKSKLVSDFRKDFQFYKVREINNYHHAHDAYLNAVVGTALIKKYPKLESEFVYGDYKVYDVRKMIAKSEQEIGKATAKYFFYSNIMNFFKTEITLANGEIRKRPLIETNGETGEIVWDKGRDFATVRKVLSMPQVNIVKKTEVQTGGFSKESILPKRNSDKLIARKKDWDPKKYGGFDSPTVAYSVLVVAKVEKGKSKKLKSVKELLGITIMERSSFEKNPIDFLEAKGYKEVKKDLIIKLPKYSLFELENGRKRMLASAGELQKGNELALPSKYVNFLYLASHYEKLKGSPEDNEQKQLFVEQHKHYLDEIIEQISEFSKRVILADANLDKVLSAYNKHRDKPIREQAENIIHLFTLTNLGAPAAFKYFDTTIDRKRYTSTKEVLDATLIHQSITGLYETRIDLSQLGGDGGPAPEAAAKGGGGGLLGRDLLTKLKAQIQFSTEGPQVTWEDRPAMCLVLNLEEEYRLHEKPVPPSIDPSWLQLFPMVWAEKAGMGLANQVPPVVVELKSDASPVAVRQYPMSKEAREGIRPHIQRFLDLGILVPCQSPWNTPLLPVKKPGTNDYRPVQDLREVNKRVQDIHPTVPNPYNLLSSLPPSHTWYSVLDLKDAFFCLKLHPNSQPLFAFEWRDPEKGNTGQLTWTRLPQGFKNSPTLFNEALHRDLASFRALNPQVVMLQYVDDLLVAAPTYRDCKEGTRRLLQELSKLGYRVSAKKAQLCREEVTYLGYLLKGGKRWLTPARKATVMKIPTPTTPRQVREFLGKAGFCRLFIPGFASLAAPLYPLTRPKVPFTWTEAHQEAFGRIKEALLSAPALALPDLTKPFALYVDEKEGVARGVLTQTLGPWRRPVAYLSKKLDPVASGWPTCLKAIAAVALLLKDADKLTLGQNVLVIAPHNLESIVRQPPDRWMTNARMTHYQSLLLNERVSFAPPAILNPATLLPVESDDTPIHICSEILAEETGTRPDLRDQPLPGVPAWYTDGSSFIMDGRRQAGAAIVDNKRTVWASNLPEGTSAQKAELIALTQALRLAEGKSINIYTDSRYAFATAHVHGAIYKQRGWLTSAGKDIKNKEEILALLEAIHLPKRVAIIHCPGHQRGTDPVATGNRKADEAAKQAAQSTRILTETTKNAGKRTADGSEFEKRTADGSEFESPKKKAKVE

SEQ ID NO: 1664 - protein, 2127 aa, synthetic construct
MPAAKRVKLDGGDKKYSIGLDIGTNSVGWAVITDEYKVPSKKFKVLGNTDRHSIKKNLIGALLFDSGETAEATRLKRTARRRYTRRKNRICYLQEIFSNEMAKVDDSFFHRLEESFLVEEDKKHERHPIFGNIVDEVAYHEKYPTIYHLRKKLVDSTDKADLRLIYLALAHMIKFRGHFLIEGDLNPDNSDVDKLFIQLVQTYNQLFEENPINASGVDAKAILSARLSKSRRLENLIAQLPGEKKNGLFGNLIALSLGLTPNFKSNFDLAEDAKLQLSKDTYDDDLDNLLAQIGDQYADLFLAAKNLSDAILLSDILRVNTEITKAPLSASMIKRYDEHHQDLTLLKALVRQQLPEKYKEIFFDQSKNGYAGYIDGGASQEEFYKFIKPILEKMDGTEELLVKLNREDLLRKQRTFDNGSIPHQIHLGELHAILRRQEDFYPFLKDNREKIEKILTFRIPYYVGPLARGNSRFAWMTRKSEETITPWNFEEVVDKGASAQSFIERMTNFDKNLPNEKVLPKHSLLYEYFTVYNELTKVKYVTEGMRKPAFLSGEQKKAIVDLLFKTNRKVTVKQLKEDYFKKIECFDSVEISGVEDRFNASLGTYHDLLKIIKDKDFLDNEENEDILEDIVLTLTLFEDREMIEERLKTYAHLFDDKVMKQLKRRRYTGWGRLSRKLINGIRDKQSGKTILDFLKSDGFANRNFMQLIHDDSLTFKEDIQKAQVSGQGDSLHEHIANLAGSPAIKKGILQTVKVVDELVKVMGRHKPENIVIEMARENQTTQKGQKNSRERMKRIEEGIKELGSQILKEHPVENTQLQNEKLYLYYLQNGRDMYVDQELDINRLSDYDVDHIVPQSFLKDDSIDNKVLTRSDKARGKSDNVPSEEVVKKMKNYWRQLLNAKLITQRKFDNLTKAERGGLSELDKAGFIKRQLVETRQITKHVAQILDSRMNTKYDENDKLIREVKVITLKSKLVSDFRKDFQFYKVREINNYHHAHDAYLNAVVGTALIKKYPKLESEFVYGDYKVYDVRKMIAKSEQEIGKATAKYFFYSNIMNFFKTEITLANGEIRKRPLIETNGETGEIVWDKGRDFATVRKVLSMPQVNIVKKTEVQTGGFSKESILPKRNSDKLIARKKDWDPKKYGGFDSPTVAYSVLVVAKVEKGKSKKLKSVKELLGITIMERSSFEKNPIDFLEAKGYKEVKKDLIIKLPKYSLFELENGRKRMLASAGELQKGNELALPSKYVNFLYLASHYEKLKGSPEDNEQKQLFVEQHKHYLDEIIEQISEFSKRVILADANLDKVLSAYNKHRDKPIREQAENIIHLFTLTNLGAPAAFKYFDTTIDRKRYTSTKEVLDATLIHQSITGLYETRIDLSQLGGDGGEAAAKGSSPAPGGLLGRDLLTKLKAQIQFSTEGPQVTWEDRPAMCLVLNLEEEYRLHEKPVPPSIDPSWLQLFPMVWAEKAGMGLANQVPPVVVELKSDASPVAVRQYPMSKEAREGIRPHIQRFLDLGILVPCQSPWNTPLLPVKKPGTNDYRPVQDLREVNKRVQDIHPTVPNPYNLLSSLPPSHTWYSVLDLKDAFFCLKLHPNSQPLFAFEWRDPEKGNTGQLTWTRLPQGFKNSPTLFNEALHRDLASFRALNPQVVMLQYVDDLLVAAPTYRDCKEGTRRLLQELSKLGYRVSAKKAQLCREEVTYLGYLLKGGKRWLTPARKATVMKIPTPTTPRQVREFLGKAGFCRLFIPGFASLAAPLYPLTRPKVPFTWTEAHQEAFGRIKEALLSAPALALPDLTKPFALYVDEKEGVARGVLTQTLGPWRRPVAYLSKKLDPVASGWPTCLKAIAAVALLLKDADKLTLGQNVLVIAPHNLESIVRQPPDRWMTNARMTHYQSLLLNERVSFAPPAILNPATLLPVESDDTPIHICSEILAEETGTRPDLRDQPLPGVPAWYTDGSSFIMDGRRQAGAAIVDNKRTVWASNLPEGTSAQKAELIALTQALRLAEGKSINIYTDSRYAFATAHVHGAIYKQRGWLTSAGKDIKNKEEILALLEAIHLPKRVAIIHCPGHQRGTDPVATGNRKADEAAKQAAQSTRILTETTKNAGKRTADGSEFEKRTADGSEFESPKKKAKVE

SEQ ID NO: 1665 - protein, 2131 aa, synthetic construct
MPAAKRVKLDGGDKKYSIGLDIGTNSVGWAVITDEYKVPSKKFKVLGNTDRHSIKKNLIGALLFDSGETAEATRLKRTARRRYTRRKNRICYLQEIFSNEMAKVDDSFFHRLEESFLVEEDKKHERHPIFGNIVDEVAYHEKYPTIYHLRKKLVDSTDKADLRLIYLALAHMIKFRGHFLIEGDLNPDNSDVDKLFIQLVQTYNQLFEENPINASGVDAKAILSARLSKSRRLENLIAQLPGEKKNGLFGNLIALSLGLTPNFKSNFDLAEDAKLQLSKDTYDDDLDNLLAQIGDQYADLFLAAKNLSDAILLSDILRVNTEITKAPLSASMIKRYDEHHQDLTLLKALVRQQLPEKYKEIFFDQSKNGYAGYIDGGASQEEFYKFIKPILEKMDGTEELLVKLNREDLLRKQRTFDNGSIPHQIHLGELHAILRRQEDFYPFLKDNREKIEKILTFRIPYYVGPLARGNSRFAWMTRKSEETITPWNFEEVVDKGASAQSFIERMTNFDKNLPNEKVLPKHSLLYEYFTVYNELTKVKYVTEGMRKPAFLSGEQKKAIVDLLFKTNRKVTVKQLKEDYFKKIECFDSVEISGVEDRFNASLGTYHDLLKIIKDKDFLDNEENEDILEDIVLTLTLFEDREMIEERLKTYAHLFDDKVMKQLKRRRYTGWGRLSRKLINGIRDKQSGKTILDFLKSDGFANRNFMQLIHDDSLTFKEDIQKAQVSGQGDSLHEHIANLAGSPAIKKGILQTVKVVDELVKVMGRHKPENIVIEMARENQTTQKGQKNSRERMKRIEEGIKELGSQILKEHPVENTQLQNEKLYLYYLQNGRDMYVDQELDINRLSDYDVDHIVPQSFLKDDSIDNKVLTRSDKARGKSDNVPSEEVVKKMKNYWRQLLNAKLITQRKFDNLTKAERGGLSELDKAGFIKRQLVETRQITKHVAQILDSRMNTKYDENDKLIREVKVITLKSKLVSDFRKDFQFYKVREINNYHHAHDAYLNAVVGTALIKKYPKLESEFVYGDYKVYDVRKMIAKSEQEIGKATAKYFFYSNIMNFFKTEITLANGEIRKRPLIETNGETGEIVWDKGRDFATVRKVLSMPQVNIVKKTEVQTGGFSKESILPKRNSDKLIARKKDWDPKKYGGFDSPTVAYSVLVVAKVEKGKSKKLKSVKELLGITIMERSSFEKNPIDFLEAKGYKEVKKDLIIKLPKYSLFELENGRKRMLASAGELQKGNELALPSKYVNFLYLASHYEKLKGSPEDNEQKQLFVEQHKHYLDEIIEQISEFSKRVILADANLDKVLSAYNKHRDKPIREQAENIIHLFTLTNLGAPAAFKYFDTTIDRKRYTSTKEVLDATLIHQSITGLYETRIDLSQLGGDGGGGSGGSGGSGGSGGSGGLLGRDLLTKLKAQIQFSTEGPQVTWEDRPAMCLVLNLEEEYRLHEKPVPPSIDPSWLQLFPMVWAEKAGMGLANQVPPVVVELKSDASPVAVRQYPMSKEAREGIRPHIQRFLDLGILVPCQSPWNTPLLPVKKPGTNDYRPVQDLREVNKRVQDIHPTVPNPYNLLSSLPPSHTWYSVLDLKDAFFCLKLHPNSQPLFAFEWRDPEKGNTGQLTWTRLPQGFKNSPTLFNEALHRDLASFRALNPQVVMLQYVDDLLVAAPTYRDCKEGTRRLLQELSKLGYRVSAKKAQLCREEVTYLGYLLKGGKRWLTPARKATVMKIPTPTTPRQVREFLGKAGFCRLFIPGFASLAAPLYPLTRPKVPFTWTEAHQEAFGRIKEALLSAPALALPDLTKPFALYVDEKEGVARGVLTQTLGPWRRPVAYLSKKLDPVASGWPTCLKAIAAVALLLKDADKLTLGQNVLVIAPHNLESIVRQPPDRWMTNARMTHYQSLLLNERVSFAPPAILNPATLLPVESDDTPIHICSEILAEETGTRPDLRDQPLPGVPAWYTDGSSFIMDGRRQAGAAIVDNKRTVWASNLPEGTSAQKAELIALTQALRLAEGKSINIYTDSRYAFATAHVHGAIYKQRGWLTSAGKDIKNKEEILALLEAIHLPKRVAIIHCPGHQRGTDPVATGNRKADEAAKQAAQSTRILTETTKNAGKRTADGSEFEKRTADGSEFESPKKKAKVE

SEQ ID NO: 1666 - protein, 2127 aa, synthetic construct
MPAAKRVKLDGGDKKYSIGLDIGTNSVGWAVITDEYKVPSKKFKVLGNTDRHSIKKNLIGALLFDSGETAEATRLKRTARRRYTRRKNRICYLQEIFSNEMAKVDDSFFHRLEESFLVEEDKKHERHPIFGNIVDEVAYHEKYPTIYHLRKKLVDSTDKADLRLIYLALAHMIKFRGHFLIEGDLNPDNSDVDKLFIQLVQTYNQLFEENPINASGVDAKAILSARLSKSRRLENLIAQLPGEKKNGLFGNLIALSLGLTPNFKSNFDLAEDAKLQLSKDTYDDDLDNLLAQIGDQYADLFLAAKNLSDAILLSDILRVNTEITKAPLSASMIKRYDEHHQDLTLLKALVRQQLPEKYKEIFFDQSKNGYAGYIDGGASQEEFYKFIKPILEKMDGTEELLVKLNREDLLRKQRTFDNGSIPHQIHLGELHAILRRQEDFYPFLKDNREKIEKILTFRIPYYVGPLARGNSRFAWMTRKSEETITPWNFEEVVDKGASAQSFIERMTNFDKNLPNEKVLPKHSLLYEYFTVYNELTKVKYVTEGMRKPAFLSGEQKKAIVDLLFKTNRKVTVKQLKEDYFKKIECFDSVEISGVEDRFNASLGTYHDLLKIIKDKDFLDNEENEDILEDIVLTLTLFEDREMIEERLKTYAHLFDDKVMKQLKRRRYTGWGRLSRKLINGIRDKQSGKTILDFLKSDGFANRNFMQLIHDDSLTFKEDIQKAQVSGQGDSLHEHIANLAGSPAIKKGILQTVKVVDELVKVMGRHKPENIVIEMARENQTTQKGQKNSRERMKRIEEGIKELGSQILKEHPVENTQLQNEKLYLYYLQNGRDMYVDQELDINRLSDYDVDHIVPQSFLKDDSIDNKVLTRSDKARGKSDNVPSEEVVKKMKNYWRQLLNAKLITQRKFDNLTKAERGGLSELDKAGFIKRQLVETRQITKHVAQILDSRMNTKYDENDKLIREVKVITLKSKLVSDFRKDFQFYKVREINNYHHAHDAYLNAVVGTALIKKYPKLESEFVYGDYKVYDVRKMIAKSEQEIGKATAKYFFYSNIMNFFKTEITLANGEIRKRPLIETNGETGEIVWDKGRDFATVRKVLSMPQVNIVKKTEVQTGGFSKESILPKRNSDKLIARKKDWDPKKYGGFDSPTVAYSVLVVAKVEKGKSKKLKSVKELLGITIMERSSFEKNPIDFLEAKGYKEVKKDLIIKLPKYSLFELENGRKRMLASAGELQKGNELALPSKYVNFLYLASHYEKLKGSPEDNEQKQLFVEQHKHYLDEIIEQISEFSKRVILADANLDKVLSAYNKHRDKPIREQAENIIHLFTLTNLGAPAAFKYFDTTIDRKRYTSTKEVLDATLIHQSITGLYETRIDLSQLGGDGGGGSPAPEAAAKGGLLGRDLLTKLKAQIQFSTEGPQVTWEDRPAMCLVLNLEEEYRLHEKPVPPSIDPSWLQLFPMVWAEKAGMGLANQVPPVVVELKSDASPVAVRQYPMSKEAREGIRPHIQRFLDLGILVPCQSPWNTPLLPVKKPGTNDYRPVQDLREVNKRVQDIHPTVPNPYNLLSSLPPSHTWYSVLDLKDAFFCLKLHPNSQPLFAFEWRDPEKGNTGQLTWTRLPQGFKNSPTLFNEALHRDLASFRALNPQVVMLQYVDDLLVAAPTYRDCKEGTRRLLQELSKLGYRVSAKKAQLCREEVTYLGYLLKGGKRWLTPARKATVMKIPTPTTPRQVREFLGKAGFCRLFIPGFASLAAPLYPLTRPKVPFTWTEAHQEAFGRIKEALLSAPALALPDLTKPFALYVDEKEGVARGVLTQTLGPWRRPVAYLSKKLDPVASGWPTCLKAIAAVALLLKDADKLTLGQNVLVIAPHNLESIVRQPPDRWMTNARMTHYQSLLLNERVSFAPPAILNPATLLPVESDDTPIHICSEILAEETGTRPDLRDQPLPGVPAWYTDGSSFIMDGRRQAGAAIVDNKRTVWASNLPEGTSAQKAELIALTQALRLAEGKSINIYTDSRYAFATAHVHGAIYKQRGWLTSAGKDIKNKEEILALLEAIHLPKRVAIIHCPGHQRGTDPVATGNRKADEAAKQAAQSTRILTETTKNAGKRTADGSEFEKRTADGSEFESPKKKAKVE

SEQ ID NO: 1667 - protein, 2134 aa, synthetic construct
MPAAKRVKLDGGDKKYSIGLDIGTNSVGWAVITDEYKVPSKKFKVLGNTDRHSIKKNLIGALLFDSGETAEATRLKRTARRRYTRRKNRICYLQEIFSNEMAKVDDSFFHRLEESFLVEEDKKHERHPIFGNIVDEVAYHEKYPTIYHLRKKLVDSTDKADLRLIYLALAHMIKFRGHFLIEGDLNPDNSDVDKLFIQLVQTYNQLFEENPINASGVDAKAILSARLSKSRRLENLIAQLPGEKKNGLFGNLIALSLGLTPNFKSNFDLAEDAKLQLSKDTYDDDLDNLLAQIGDQYADLFLAAKNLSDAILLSDILRVNTEITKAPLSASMIKRYDEHHQDLTLLKALVRQQLPEKYKEIFFDQSKNGYAGYIDGGASQEEFYKFIKPILEKMDGTEELLVKLNREDLLRKQRTFDNGSIPHQIHLGELHAILRRQEDFYPFLKDNREKIEKILTFRIPYYVGPLARGNSRFAWMTRKSEETITPWNFEEVVDKGASAQSFIERMTNFDKNLPNEKVLPKHSLLYEYFTVYNELTKVKYVTEGMRKPAFLSGEQKKAIVDLLFKTNRKVTVKQLKEDYFKKIECFDSVEISGVEDRFNASLGTYHDLLKIIKDKDFLDNEENEDILEDIVLTLTLFEDREMIEERLKTYAHLFDDKVMKQLKRRRYTGWGRLSRKLINGIRDKQSGKTILDFLKSDGFANRNFMQLIHDDSLTFKEDIQKAQVSGQGDSLHEHIANLAGSPAIKKGILQTVKVVDELVKVMGRHKPENIVIEMARENQTTQKGQKNSRERMKRIEEGIKELGSQILKEHPVENTQLQNEKLYLYYLQNGRDMYVDQELDINRLSDYDVDHIVPQSFLKDDSIDNKVLTRSDKARGKSDNVPSEEVVKKMKNYWRQLLNAKLITQRKFDNLTKAERGGLSELDKAGFIKRQLVETRQITKHVAQILDSRMNTKYDENDKLIREVKVITLKSKLVSDFRKDFQFYKVREINNYHHAHDAYLNAVVGTALIKKYPKLESEFVYGDYKVYDVRKMIAKSEQEIGKATAKYFFYSNIMNFFKTEITLANGEIRKRPLIETNGETGEIVWDKGRDFATVRKVLSMPQVNIVKKTEVQTGGFSKESILPKRNSDKLIARKKDWDPKKYGGFDSPTVAYSVLVVAKVEKGKSKKLKSVKELLGITIMERSSFEKNPIDFLEAKGYKEVKKDLIIKLPKYSLFELENGRKRMLASAGELQKGNELALPSKYVNFLYLASHYEKLKGSPEDNEQKQLFVEQHKHYLDEIIEQISEFSKRVILADANLDKVLSAYNKHRDKPIREQAENIIHLFTLTNLGAPAAFKYFDTTIDRKRYTSTKEVLDATLIHQSITGLYETRIDLSQLGGDGGGSSGSSGSSGSSGSSGSSGGLLGRDLLTKLKAQIQFSTEGPQVTWEDRPAMCLVLNLEEEYRLHEKPVPPSIDPSWLQLFPMVWAEKAGMGLANQVPPVVVELKSDASPVAVRQYPMSKEAREGIRPHIQRFLDLGILVPCQSPWNTPLLPVKKPGTNDYRPVQDLREVNKRVQDIHPTVPNPYNLLSSLPPSHTWYSVLDLKDAFFCLKLHPNSQPLFAFEWRDPEKGNTGQLTWTRLPQGFKNSPTLFNEALHRDLASFRALNPQVVMLQYVDDLLVAAPTYRDCKEGTRRLLQELSKLGYRVSAKKAQLCREEVTYLGYLLKGGKRWLTPARKATVMKIPTPTTPRQVREFLGKAGFCRLFIPGFASLAAPLYPLTRPKVPFTWTEAHQEAFGRIKEALLSAPALALPDLTKPFALYVDEKEGVARGVLTQTLGPWRRPVAYLSKKLDPVASGWPTCLKAIAAVALLLKDADKLTLGQNVLVIAPHNLESIVRQPPDRWMTNARMTHYQSLLLNERVSFAPPAILNPATLLPVESDDTPIHICSEILAEETGTRPDLRDQPLPGVPAWYTDGSSFIMDGRRQAGAAIVDNKRTVWASNLPEGTSAQKAELIALTQALRLAEGKSINIYTDSRYAFATAHVHGAIYKQRGWLTSAGKDIKNKEEILALLEAIHLPKRVAIIHCPGHQRGTDPVATGNRKADEAAKQAAQSTRILTETTKNAGKRTADGSEFEKRTADGSEFESPKKKAKVE

SEQ ID NO: 1668 - protein, 2122 aa, synthetic construct
MPAAKRVKLDGGDKKYSIGLDIGTNSVGWAVITDEYKVPSKKFKVLGNTDRHSIKKNLIGALLFDSGETAEATRLKRTARRRYTRRKNRICYLQEIFSNEMAKVDDSFFHRLEESFLVEEDKKHERHPIFGNIVDEVAYHEKYPTIYHLRKKLVDSTDKADLRLIYLALAHMIKFRGHFLIEGDLNPDNSDVDKLFIQLVQTYNQLFEENPINASGVDAKAILSARLSKSRRLENLIAQLPGEKKNGLFGNLIALSLGLTPNFKSNFDLAEDAKLQLSKDTYDDDLDNLLAQIGDQYADLFLAAKNLSDAILLSDILRVNTEITKAPLSASMIKRYDEHHQDLTLLKALVRQQLPEKYKEIFFDQSKNGYAGYIDGGASQEEFYKFIKPILEKMDGTEELLVKLNREDLLRKQRTFDNGSIPHQIHLGELHAILRRQEDFYPFLKDNREKIEKILTFRIPYYVGPLARGNSRFAWMTRKSEETITPWNFEEVVDKGASAQSFIERMTNFDKNLPNEKVLPKHSLLYEYFTVYNELTKVKYVTEGMRKPAFLSGEQKKAIVDLLFKTNRKVTVKQLKEDYFKKIECFDSVEISGVEDRFNASLGTYHDLLKIIKDKDFLDNEENEDILEDIVLTLTLFEDREMIEERLKTYAHLFDDKVMKQLKRRRYTGWGRLSRKLINGIRDKQSGKTILDFLKSDGFANRNFMQLIHDDSLTFKEDIQKAQVSGQGDSLHEHIANLAGSPAIKKGILQTVKVVDELVKVMGRHKPENIVIEMARENQTTQKGQKNSRERMKRIEEGIKELGSQILKEHPVENTQLQNEKLYLYYLQNGRDMYVDQELDINRLSDYDVDHIVPQSFLKDDSIDNKVLTRSDKARGKSDNVPSEEVVKKMKNYWRQLLNAKLITQRKFDNLTKAERGGLSELDKAGFIKRQLVETRQITKHVAQILDSRMNTKYDENDKLIREVKVITLKSKLVSDFRKDFQFYKVREINNYHHAHDAYLNAVVGTALIKKYPKLESEFVYGDYKVYDVRKMIAKSEQEIGKATAKYFFYSNIMNFFKTEITLANGEIRKRPLIETNGETGEIVWDKGRDFATVRKVLSMPQVNIVKKTEVQTGGFSKESILPKRNSDKLIARKKDWDPKKYGGFDSPTVAYSVLVVAKVEKGKSKKLKSVKELLGITIMERSSFEKNPIDFLEAKGYKEVKKDLIIKLPKYSLFELENGRKRMLASAGELQKGNELALPSKYVNFLYLASHYEKLKGSPEDNEQKQLFVEQHKHYLDEIIEQISEFSKRVILADANLDKVLSAYNKHRDKPIREQAENIIHLFTLTNLGAPAAFKYFDTTIDRKRYTSTKEVLDATLIHQSITGLYETRIDLSQLGGDGGGGSGGGGGLLGRDLLTKLKAQIQFSTEGPQVTWEDRPAMCLVLNLEEEYRLHEKPVPPSIDPSWLQLFPMVWAEKAGMGLANQVPPVVVELKSDASPVAVRQYPMSKEAREGIRPHIQRFLDLGILVPCQSPWNTPLLPVKKPGTNDYRPVQDLREVNKRVQDIHPTVPNPYNLLSSLPPSHTWYSVLDLKDAFFCLKLHPNSQPLFAFEWRDPEKGNTGQLTWTRLPQGFKNSPTLFNEALHRDLASFRALNPQVVMLQYVDDLLVAAPTYRDCKEGTRRLLQELSKLGYRVSAKKAQLCREEVTYLGYLLKGGKRWLTPARKATVMKIPTPTTPRQVREFLGKAGFCRLFIPGFASLAAPLYPLTRPKVPFTWTEAHQEAFGRIKEALLSAPALALPDLTKPFALYVDEKEGVARGVLTQTLGPWRRPVAYLSKKLDPVASGWPTCLKAIAAVALLLKDADKLTLGQNVLVIAPHNLESIVRQPPDRWMTNARMTHYQSLLLNERVSFAPPAILNPATLLPVESDDTPIHICSEILAEETGTRPDLRDQPLPGVPAWYTDGSSFIMDGRRQAGAAIVDNKRTVWASNLPEGTSAQKAELIALTQALRLAEGKSINIYTDSRYAFATAHVHGAIYKQRGWLTSAGKDIKNKEEILALLEAIHLPKRVAIIHCPGHQRGTDPVATGNRKADEAAKQAAQSTRILTETTKNAGKRTADGSEFEKRTADGSEFESPKKKAKVE

SEQ ID NO: 1669 - protein, 2124 aa, synthetic construct
MPAAKRVKLDGGDKKYSIGLDIGTNSVGWAVITDEYKVPSKKFKVLGNTDRHSIKKNLIGALLFDSGETAEATRLKRTARRRYTRRKNRICYLQEIFSNEMAKVDDSFFHRLEESFLVEEDKKHERHPIFGNIVDEVAYHEKYPTIYHLRKKLVDSTDKADLRLIYLALAHMIKFRGHFLIEGDLNPDNSDVDKLFIQLVQTYNQLFEENPINASGVDAKAILSARLSKSRRLENLIAQLPGEKKNGLFGNLIALSLGLTPNFKSNFDLAEDAKLQLSKDTYDDDLDNLLAQIGDQYADLFLAAKNLSDAILLSDILRVNTEITKAPLSASMIKRYDEHHQDLTLLKALVRQQLPEKYKEIFFDQSKNGYAGYIDGGASQEEFYKFIKPILEKMDGTEELLVKLNREDLLRKQRTFDNGSIPHQIHLGELHAILRRQEDFYPFLKDNREKIEKILTFRIPYYVGPLARGNSRFAWMTRKSEETITPWNFEEVVDKGASAQSFIERMTNFDKNLPNEKVLPKHSLLYEYFTVYNELTKVKYVTEGMRKPAFLSGEQKKAIVDLLFKTNRKVTVKQLKEDYFKKIECFDSVEISGVEDRFNASLGTYHDLLKIIKDKDFLDNEENEDILEDIVLTLTLFEDREMIEERLKTYAHLFDDKVMKQLKRRRYTGWGRLSRKLINGIRDKQSGKTILDFLKSDGFANRNFMQLIHDDSLTFKEDIQKAQVSGQGDSLHEHIANLAGSPAIKKGILQTVKVVDELVKVMGRHKPENIVIEMARENQTTQKGQKNSRERMKRIEEGIKELGSQILKEHPVENTQLQNEKLYLYYLQNGRDMYVDQELDINRLSDYDVDHIVPQSFLKDDSIDNKVLTRSDKARGKSDNVPSEEVVKKMKNYWRQLLNAKLITQRKFDNLTKAERGGLSELDKAGFIKRQLVETRQITKHVAQILDSRMNTKYDENDKLIREVKVITLKSKLVSDFRKDFQFYKVREINNYHHAHDAYLNAVVGTALIKKYPKLESEFVYGDYKVYDVRKMIAKSEQEIGKATAKYFFYSNIMNFFKTEITLANGEIRKRPLIETNGETGEIVWDKGRDFATVRKVLSMPQVNIVKKTEVQTGGFSKESILPKRNSDKLIARKKDWDPKKYGGFDSPTVAYSVLVVAKVEKGKSKKLKSVKELLGITIMERSSFEKNPIDFLEAKGYKEVKKDLIIKLPKYSLFELENGRKRMLASAGELQKGNELALPSKYVNFLYLASHYEKLKGSPEDNEQKQLFVEQHKHYLDEIIEQISEFSKRVILADANLDKVLSAYNKHRDKPIREQAENIIHLFTLTNLGAPAAFKYFDTTIDRKRYTSTKEVLDATLIHQSITGLYETRIDLSQLGGDGGPAPEAAAKGGLLGRDLLTKLKAQIQFSTEGPQVTWEDRPAMCLVLNLEEEYRLHEKPVPPSIDPSWLQLFPMVWAEKAGMGLANQVPPVVVELKSDASPVAVRQYPMSKEAREGIRPHIQRFLDLGILVPCQSPWNTPLLPVKKPGTNDYRPVQDLREVNKRVQDIHPTVPNPYNLLSSLPPSHTWYSVLDLKDAFFCLKLHPNSQPLFAFEWRDPEKGNTGQLTWTRLPQGFKNSPTLFNEALHRDLASFRALNPQVVMLQYVDDLLVAAPTYRDCKEGTRRLLQELSKLGYRVSAKKAQLCREEVTYLGYLLKGGKRWLTPARKATVMKIPTPTTPRQVREFLGKAGFCRLFIPGFASLAAPLYPLTRPKVPFTWTEAHQEAFGRIKEALLSAPALALPDLTKPFALYVDEKEGVARGVLTQTLGPWRRPVAYLSKKLDPVASGWPTCLKAIAAVALLLKDADKLTLGQNVLVIAPHNLESIVRQPPDRWMTNARMTHYQSLLLNERVSFAPPAILNPATLLPVESDDTPIHICSEILAEETGTRPDLRDQPLPGVPAWYTDGSSFIMDGRRQAGAAIVDNKRTVWASNLPEGTSAQKAELIALTQALRLAEGKSINIYTDSRYAFATAHVHGAIYKQRGWLTSAGKDIKNKEEILALLEAIHLPKRVAIIHCPGHQRGTDPVATGNRKADEAAKQAAQSTRILTETTKNAGKRTADGSEFEKRTADGSEFESPKKKAKVE

SEQ ID NO: 1670 - protein, 2162 aa, synthetic construct
MPAAKRVKLDGGDKKYSIGLDIGTNSVGWAVITDEYKVPSKKFKVLGNTDRHSIKKNLIGALLFDSGETAEATRLKRTARRRYTRRKNRICYLQEIFSNEMAKVDDSFFHRLEESFLVEEDKKHERHPIFGNIVDEVAYHEKYPTIYHLRKKLVDSTDKADLRLIYLALAHMIKFRGHFLIEGDLNPDNSDVDKLFIQLVQTYNQLFEENPINASGVDAKAILSARLSKSRRLENLIAQLPGEKKNGLFGNLIALSLGLTPNFKSNFDLAEDAKLQLSKDTYDDDLDNLLAQIGDQYADLFLAAKNLSDAILLSDILRVNTEITKAPLSASMIKRYDEHHQDLTLLKALVRQQLPEKYKEIFFDQSKNGYAGYIDGGASQEEFYKFIKPILEKMDGTEELLVKLNREDLLRKQRTFDNGSIPHQIHLGELHAILRRQEDFYPFLKDNREKIEKILTFRIPYYVGPLARGNSRFAWMTRKSEETITPWNFEEVVDKGASAQSFIERMTNFDKNLPNEKVLPKHSLLYEYFTVYNELTKVKYVTEGMRKPAFLSGEQKKAIVDLLFKTNRKVTVKQLKEDYFKKIECFDSVEISGVEDRFNASLGTYHDLLKIIKDKDFLDNEENEDILEDIVLTLTLFEDREMIEERLKTYAHLFDDKVMKQLKRRRYTGWGRLSRKLINGIRDKQSGKTILDFLKSDGFANRNFMQLIHDDSLTFKEDIQKAQVSGQGDSLHEHIANLAGSPAIKKGILQTVKVVDELVKVMGRHKPENIVIEMARENQTTQKGQKNSRERMKRIEEGIKELGSQILKEHPVENTQLQNEKLYLYYLQNGRDMYVDQELDINRLSDYDVDHIVPQSFLKDDSIDNKVLTRSDKARGKSDNVPSEEVVKKMKNYWRQLLNAKLITQRKFDNLTKAERGGLSELDKAGFIKRQLVETRQITKHVAQILDSRMNTKYDENDKLIREVKVITLKSKLVSDFRKDFQFYKVREINNYHHAHDAYLNAVVGTALIKKYPKLESEFVYGDYKVYDVRKMIAKSEQEIGKATAKYFFYSNIMNFFKTEITLANGEIRKRPLIETNGETGEIVWDKGRDFATVRKVLSMPQVNIVKKTEVQTGGFSKESILPKRNSDKLIARKKDWDPKKYGGFDSPTVAYSVLVVAKVEKGKSKKLKSVKELLGITIMERSSFEKNPIDFLEAKGYKEVKKDLIIKLPKYSLFELENGRKRMLASAGELQKGNELALPSKYVNFLYLASHYEKLKGSPEDNEQKQLFVEQHKHYLDEIIEQISEFSKRVILADANLDKVLSAYNKHRDKPIREQAENIIHLFTLTNLGAPAAFKYFDTTIDRKRYTSTKEVLDATLIHQSITGLYETRIDLSQLGGDGGAEAAAKEAAAKEAAAKEAAAKALEAEAAAKEAAAKEAAAKEAAAKAGGLLGRDLLTKLKAQIQFSTEGPQVTWEDRPAMCLVLNLEEEYRLHEKPVPPSIDPSWLQLFPMVWAEKAGMGLANQVPPVVVELKSDASPVAVRQYPMSKEAREGIRPHIQRFLDLGILVPCQSPWNTPLLPVKKPGTNDYRPVQDLREVNKRVQDIHPTVPNPYNLLSSLPPSHTWYSVLDLKDAFFCLKLHPNSQPLFAFEWRDPEKGNTGQLTWTRLPQGFKNSPTLFNEALHRDLASFRALNPQVVMLQYVDDLLVAAPTYRDCKEGTRRLLQELSKLGYRVSAKKAQLCREEVTYLGYLLKGGKRWLTPARKATVMKIPTPTTPRQVREFLGKAGFCRLFIPGFASLAAPLYPLTRPKVPFTWTEAHQEAFGRIKEALLSAPALALPDLTKPFALYVDEKEGVARGVLTQTLGPWRRPVAYLSKKLDPVASGWPTCLKAIAAVALLLKDADKLTLGQNVLVIAPHNLESIVRQPPDRWMTNARMTHYQSLLLNERVSFAPPAILNPATLLPVESDDTPIHICSEILAEETGTRPDLRDQPLPGVPAWYTDGSSFIMDGRRQAGAAIVDNKRTVWASNLPEGTSAQKAELIALTQALRLAEGKSINIYTDSRYAFATAHVHGAIYKQRGWLTSAGKDIKNKEEILALLEAIHLPKRVAIIHCPGHQRGTDPVATGNRKADEAAKQAAQSTRILTETTKNAGKRTADGSEFEKRTADGSEFESPKKKAKVE

SEQ ID NO: 1671 - protein, 2124 aa, synthetic construct
MPAAKRVKLDGGDKKYSIGLDIGTNSVGWAVITDEYKVPSKKFKVLGNTDRHSIKKNLIGALLFDSGETAEATRLKRTARRRYTRRKNRICYLQEIFSNEMAKVDDSFFHRLEESFLVEEDKKHERHPIFGNIVDEVAYHEKYPTIYHLRKKLVDSTDKADLRLIYLALAHMIKFRGHFLIEGDLNPDNSDVDKLFIQLVQTYNQLFEENPINASGVDAKAILSARLSKSRRLENLIAQLPGEKKNGLFGNLIALSLGLTPNFKSNFDLAEDAKLQLSKDTYDDDLDNLLAQIGDQYADLFLAAKNLSDAILLSDILRVNTEITKAPLSASMIKRYDEHHQDLTLLKALVRQQLPEKYKEIFFDQSKNGYAGYIDGGASQEEFYKFIKPILEKMDGTEELLVKLNREDLLRKQRTFDNGSIPHQIHLGELHAILRRQEDFYPFLKDNREKIEKILTFRIPYYVGPLARGNSRFAWMTRKSEETITPWNFEEVVDKGASAQSFIERMTNFDKNLPNEKVLPKHSLLYEYFTVYNELTKVKYVTEGMRKPAFLSGEQKKAIVDLLFKTNRKVTVKQLKEDYFKKIECFDSVEISGVEDRFNASLGTYHDLLKIIKDKDFLDNEENEDILEDIVLTLTLFEDREMIEERLKTYAHLFDDKVMKQLKRRRYTGWGRLSRKLINGIRDKQSGKTILDFLKSDGFANRNFMQLIHDDSLTFKEDIQKAQVSGQGDSLHEHIANLAGSPAIKKGILQTVKVVDELVKVMGRHKPENIVIEMARENQTTQKGQKNSRERMKRIEEGIKELGSQILKEHPVENTQLQNEKLYLYYLQNGRDMYVDQELDINRLSDYDVDHIVPQSFLKDDSIDNKVLTRSDKARGKSDNVPSEEVVKKMKNYWRQLLNAKLITQRKFDNLTKAERGGLSELDKAGFIKRQLVETRQITKHVAQILDSRMNTKYDENDKLIREVKVITLKSKLVSDFRKDFQFYKVREINNYHHAHDAYLNAVVGTALIKKYPKLESEFVYGDYKVYDVRKMIAKSEQEIGKATAKYFFYSNIMNFFKTEITLANGEIRKRPLIETNGETGEIVWDKGRDFATVRKVLSMPQVNIVKKTEVQTGGFSKESILPKRNSDKLIARKKDWDPKKYGGFDSPTVAYSVLVVAKVEKGKSKKLKSVKELLGITIMERSSFEKNPIDFLEAKGYKEVKKDLIIKLPKYSLFELENGRKRMLASAGELQKGNELALPSKYVNFLYLASHYEKLKGSPEDNEQKQLFVEQHKHYLDEIIEQISEFSKRVILADANLDKVLSAYNKHRDKPIREQAENIIHLFTLTNLGAPAAFKYFDTTIDRKRYTSTKEVLDATLIHQSITGLYETRIDLSQLGGDGGEAAAKGSSGGLLGRDLLTKLKAQIQFSTEGPQVTWEDRPAMCLVLNLEEEYRLHEKPVPPSIDPSWLQLFPMVWAEKAGMGLANQVPPVVVELKSDASPVAVRQYPMSKEAREGIRPHIQRFLDLGILVPCQSPWNTPLLPVKKPGTNDYRPVQDLREVNKRVQDIHPTVPNPYNLLSSLPPSHTWYSVLDLKDAFFCLKLHPNSQPLFAFEWRDPEKGNTGQLTWTRLPQGFKNSPTLFNEALHRDLASFRALNPQVVMLQYVDDLLVAAPTYRDCKEGTRRLLQELSKLGYRVSAKKAQLCREEVTYLGYLLKGGKRWLTPARKATVMKIPTPTTPRQVREFLGKAGFCRLFIPGFASLAAPLYPLTRPKVPFTWTEAHQEAFGRIKEALLSAPALALPDLTKPFALYVDEKEGVARGVLTQTLGPWRRPVAYLSKKLDPVASGWPTCLKAIAAVALLLKDADKLTLGQNVLVIAPHNLESIVRQPPDRWMTNARMTHYQSLLLNERVSFAPPAILNPATLLPVESDDTPIHICSEILAEETGTRPDLRDQPLPGVPAWYTDGSSFIMDGRRQAGAAIVDNKRTVWASNLPEGTSAQKAELIALTQALRLAEGKSINIYTDSRYAFATAHVHGAIYKQRGWLTSAGKDIKNKEEILALLEAIHLPKRVAIIHCPGHQRGTDPVATGNRKADEAAKQAAQSTRILTETTKNAGKRTADGSEFEKRTADGSEFESPKKKAKVE

SEQ ID NO: 1672 - protein, 2127 aa, synthetic construct
MPAAKRVKLDGGDKKYSIGLDIGTNSVGWAVITDEYKVPSKKFKVLGNTDRHSIKKNLIGALLFDSGETAEATRLKRTARRRYTRRKNRICYLQEIFSNEMAKVDDSFFHRLEESFLVEEDKKHERHPIFGNIVDEVAYHEKYPTIYHLRKKLVDSTDKADLRLIYLALAHMIKFRGHFLIEGDLNPDNSDVDKLFIQLVQTYNQLFEENPINASGVDAKAILSARLSKSRRLENLIAQLPGEKKNGLFGNLIALSLGLTPNFKSNFDLAEDAKLQLSKDTYDDDLDNLLAQIGDQYADLFLAAKNLSDAILLSDILRVNTEITKAPLSASMIKRYDEHHQDLTLLKALVRQQLPEKYKEIFFDQSKNGYAGYIDGGASQEEFYKFIKPILEKMDGTEELLVKLNREDLLRKQRTFDNGSIPHQIHLGELHAILRRQEDFYPFLKDNREKIEKILTFRIPYYVGPLARGNSRFAWMTRKSEETITPWNFEEVVDKGASAQSFIERMTNFDKNLPNEKVLPKHSLLYEYFTVYNELTKVKYVTEGMRKPAFLSGEQKKAIVDLLFKTNRKVTVKQLKEDYFKKIECFDSVEISGVEDRFNASLGTYHDLLKIIKDKDFLDNEENEDILEDIVLTLTLFEDREMIEERLKTYAHLFDDKVMKQLKRRRYTGWGRLSRKLINGIRDKQSGKTILDFLKSDGFANRNFMQLIHDDSLTFKEDIQKAQVSGQGDSLHEHIANLAGSPAIKKGILQTVKVVDELVKVMGRHKPENIVIEMARENQTTQKGQKNSRERMKRIEEGIKELGSQILKEHPVENTQLQNEKLYLYYLQNGRDMYVDQELDINRLSDYDVDHIVPQSFLKDDSIDNKVLTRSDKARGKSDNVPSEEVVKKMKNYWRQLLNAKLITQRKFDNLTKAERGGLSELDKAGFIKRQLVETRQITKHVAQILDSRMNTKYDENDKLIREVKVITLKSKLVSDFRKDFQFYKVREINNYHHAHDAYLNAVVGTALIKKYPKLESEFVYGDYKVYDVRKMIAKSEQEIGKATAKYFFYSNIMNFFKTEITLANGEIRKRPLIETNGETGEIVWDKGRDFATVRKVLSMPQVNIVKKTEVQTGGFSKESILPKRNSDKLIARKKDWDPKKYGGFDSPTVAYSVLVVAKVEKGKSKKLKSVKELLGITIMERSSFEKNPIDFLEAKGYKEVKKDLIIKLPKYSLFELENGRKRMLASAGELQKGNELALPSKYVNFLYLASHYEKLKGSPEDNEQKQLFVEQHKHYLDEIIEQISEFSKRVILADANLDKVLSAYNKHRDKPIREQAENIIHLFTLTNLGAPAAFKYFDTTIDRKRYTSTKEVLDATLIHQSITGLYETRIDLSQLGGDGGGGGEAAAKPAPGGLLGRDLLTKLKAQIQFSTEGPQVTWEDRPAMCLVLNLEEEYRLHEKPVPPSIDPSWLQLFPMVWAEKAGMGLANQVPPVVVELKSDASPVAVRQYPMSKEAREGIRPHIQRFLDLGILVPCQSPWNTPLLPVKKPGTNDYRPVQDLREVNKRVQDIHPTVPNPYNLLSSLPPSHTWYSVLDLKDAFFCLKLHPNSQPLFAFEWRDPEKGNTGQLTWTRLPQGFKNSPTLFNEALHRDLASFRALNPQVVMLQYVDDLLVAAPTYRDCKEGTRRLLQELSKLGYRVSAKKAQLCREEVTYLGYLLKGGKRWLTPARKATVMKIPTPTTPRQVREFLGKAGFCRLFIPGFASLAAPLYPLTRPKVPFTWTEAHQEAFGRIKEALLSAPALALPDLTKPFALYVDEKEGVARGVLTQTLGPWRRPVAYLSKKLDPVASGWPTCLKAIAAVALLLKDADKLTLGQNVLVIAPHNLESIVRQPPDRWMTNARMTHYQSLLLNERVSFAPPAILNPATLLPVESDDTPIHICSEILAEETGTRPDLRDQPLPGVPAWYTDGSSFIMDGRRQAGAAIVDNKRTVWASNLPEGTSAQKAELIALTQALRLAEGKSINIYTDSRYAFATAHVHGAIYKQRGWLTSAGKDIKNKEEILALLEAIHLPKRVAIIHCPGHQRGTDPVATGNRKADEAAKQAAQSTRILTETTKNAGKRTADGSEFEKRTADGSEFESPKKKAKVE

SEQ ID NO: 1673 - protein, 2122 aa, synthetic construct
MPAAKRVKLDGGDKKYSIGLDIGTNSVGWAVITDEYKVPSKKFKVLGNTDRHSIKKNLIGALLFDSGETAEATRLKRTARRRYTRRKNRICYLQEIFSNEMAKVDDSFFHRLEESFLVEEDKKHERHPIFGNIVDEVAYHEKYPTIYHLRKKLVDSTDKADLRLIYLALAHMIKFRGHFLIEGDLNPDNSDVDKLFIQLVQTYNQLFEENPINASGVDAKAILSARLSKSRRLENLIAQLPGEKKNGLFGNLIALSLGLTPNFKSNFDLAEDAKLQLSKDTYDDDLDNLLAQIGDQYADLFLAAKNLSDAILLSDILRVNTEITKAPLSASMIKRYDEHHQDLTLLKALVRQQLPEKYKEIFFDQSKNGYAGYIDGGASQEEFYKFIKPILEKMDGTEELLVKLNREDLLRKQRTFDNGSIPHQIHLGELHAILRRQEDFYPFLKDNREKIEKILTFRIPYYVGPLARGNSRFAWMTRKSEETITPWNFEEVVDKGASAQSFIERMTNFDKNLPNEKVLPKHSLLYEYFTVYNELTKVKYVTEGMRKPAFLSGEQKKAIVDLLFKTNRKVTVKQLKEDYFKKIECFDSVEISGVEDRFNASLGTYHDLLKIIKDKDFLDNEENEDILEDIVLTLTLFEDREMIEERLKTYAHLFDDKVMKQLKRRRYTGWGRLSRKLINGIRDKQSGKTILDFLKSDGFANRNFMQLIHDDSLTFKEDIQKAQVSGQGDSLHEHIANLAGSPAIKKGILQTVKVVDELVKVMGRHKPENIVIEMARENQTTQKGQKNSRERMKRIEEGIKELGSQILKEHPVENTQLQNEKLYLYYLQNGRDMYVDQELDINRLSDYDVDHIVPQSFLKDDSIDNKVLTRSDKARGKSDNVPSEEVVKKMKNYWRQLLNAKLITQRKFDNLTKAERGGLSELDKAGFIKRQLVETRQITKHVAQILDSRMNTKYDENDKLIREVKVITLKSKLVSDFRKDFQFYKVREINNYHHAHDAYLNAVVGTALIKKYPKLESEFVYGDYKVYDVRKMIAKSEQEIGKATAKYFFYSNIMNFFKTEITLANGEIRKRPLIETNGETGEIVWDKGRDFATVRKVLSMPQVNIVKKTEVQTGGFSKESILPKRNSDKLIARKKDWDPKKYGGFDSPTVAYSVLVVAKVEKGKSKKLKSVKELLGITIMERSSFEKNPIDFLEAKGYKEVKKDLIIKLPKYSLFELENGRKRMLASAGELQKGNELALPSKYVNFLYLASHYEKLKGSPEDNEQKQLFVEQHKHYLDEIIEQISEFSKRVILADANLDKVLSAYNKHRDKPIREQAENIIHLFTLTNLGAPAAFKYFDTTIDRKRYTSTKEVLDATLIHQSITGLYETRIDLSQLGGDGGGGGPAPGGLLGRDLLTKLKAQIQFSTEGPQVTWEDRPAMCLVLNLEEEYRLHEKPVPPSIDPSWLQLFPMVWAEKAGMGLANQVPPVVVELKSDASPVAVRQYPMSKEAREGIRPHIQRFLDLGILVPCQSPWNTPLLPVKKPGTNDYRPVQDLREVNKRVQDIHPTVPNPYNLLSSLPPSHTWYSVLDLKDAFFCLKLHPNSQPLFAFEWRDPEKGNTGQLTWTRLPQGFKNSPTLFNEALHRDLASFRALNPQVVMLQYVDDLLVAAPTYRDCKEGTRRLLQELSKLGYRVSAKKAQLCREEVTYLGYLLKGGKRWLTPARKATVMKIPTPTTPRQVREFLGKAGFCRLFIPGFASLAAPLYPLTRPKVPFTWTEAHQEAFGRIKEALLSAPALALPDLTKPFALYVDEKEGVARGVLTQTLGPWRRPVAYLSKKLDPVASGWPTCLKAIAAVALLLKDADKLTLGQNVLVIAPHNLESIVRQPPDRWMTNARMTHYQSLLLNERVSFAPPAILNPATLLPVESDDTPIHICSEILAEETGTRPDLRDQPLPGVPAWYTDGSSFIMDGRRQAGAAIVDNKRTVWASNLPEGTSAQKAELIALTQALRLAEGKSINIYTDSRYAFATAHVHGAIYKQRGWLTSAGKDIKNKEEILALLEAIHLPKRVAIIHCPGHQRGTDPVATGNRKADEAAKQAAQSTRILTETTKNAGKRTADGSEFEKRTADGSEFESPKKKAKVE

SEQ ID NO: 1674 - protein, 2136 aa, synthetic construct
MPAAKRVKLDGGDKKYSIGLDIGTNSVGWAVITDEYKVPSKKFKVLGNTDRHSIKKNLIGALLFDSGETAEATRLKRTARRRYTRRKNRICYLQEIFSNEMAKVDDSFFHRLEESFLVEEDKKHERHPIFGNIVDEVAYHEKYPTIYHLRKKLVDSTDKADLRLIYLALAHMIKFRGHFLIEGDLNPDNSDVDKLFIQLVQTYNQLFEENPINASGVDAKAILSARLSKSRRLENLIAQLPGEKKNGLFGNLIALSLGLTPNFKSNFDLAEDAKLQLSKDTYDDDLDNLLAQIGDQYADLFLAAKNLSDAILLSDILRVNTEITKAPLSASMIKRYDEHHQDLTLLKALVRQQLPEKYKEIFFDQSKNGYAGYIDGGASQEEFYKFIKPILEKMDGTEELLVKLNREDLLRKQRTFDNGSIPHQIHLGELHAILRRQEDFYPFLKDNREKIEKILTFRIPYYVGPLARGNSRFAWMTRKSEETITPWNFEEVVDKGASAQSFIERMTNFDKNLPNEKVLPKHSLLYEYFTVYNELTKVKYVTEGMRKPAFLSGEQKKAIVDLLFKTNRKVTVKQLKEDYFKKIECFDSVEISGVEDRFNASLGTYHDLLKIIKDKDFLDNEENEDILEDIVLTLTLFEDREMIEERLKTYAHLFDDKVMKQLKRRRYTGWGRLSRKLINGIRDKQSGKTILDFLKSDGFANRNFMQLIHDDSLTFKEDIQKAQVSGQGDSLHEHIANLAGSPAIKKGILQTVKVVDELVKVMGRHKPENIVIEMARENQTTQKGQKNSRERMKRIEEGIKELGSQILKEHPVENTQLQNEKLYLYYLQNGRDMYVDQELDINRLSDYDVDHIVPQSFLKDDSIDNKVLTRSDKARGKSDNVPSEEVVKKMKNYWRQLLNAKLITQRKFDNLTKAERGGLSELDKAGFIKRQLVETRQITKHVAQILDSRMNTKYDENDKLIREVKVITLKSKLVSDFRKDFQFYKVREINNYHHAHDAYLNAVVGTALIKKYPKLESEFVYGDYKVYDVRKMIAKSEQEIGKATAKYFFYSNIMNFFKTEITLANGEIRKRPLIETNGETGEIVWDKGRDFATVRKVLSMPQVNIVKKTEVQTGGFSKESILPKRNSDKLIARKKDWDPKKYGGFDSPTVAYSVLVVAKVEKGKSKKLKSVKELLGITIMERSSFEKNPIDFLEAKGYKEVKKDLIIKLPKYSLFELENGRKRMLASAGELQKGNELALPSKYVNFLYLASHYEKLKGSPEDNEQKQLFVEQHKHYLDEIIEQISEFSKRVILADANLDKVLSAYNKHRDKPIREQAENIIHLFTLTNLGAPAAFKYFDTTIDRKRYTSTKEVLDATLIHQSITGLYETRIDLSQLGGDGGEAAAKEAAAKEAAAKEAAAKGGLLGRDLLTKLKAQIQFSTEGPQVTWEDRPAMCLVLNLEEEYRLHEKPVPPSIDPSWLQLFPMVWAEKAGMGLANQVPPVVVELKSDASPVAVRQYPMSKEAREGIRPHIQRFLDLGILVPCQSPWNTPLLPVKKPGTNDYRPVQDLREVNKRVQDIHPTVPNPYNLLSSLPPSHTWYSVLDLKDAFFCLKLHPNSQPLFAFEWRDPEKGNTGQLTWTRLPQGFKNSPTLFNEALHRDLASFRALNPQVVMLQYVDDLLVAAPTYRDCKEGTRRLLQELSKLGYRVSAKKAQLCREEVTYLGYLLKGGKRWLTPARKATVMKIPTPTTPRQVREFLGKAGFCRLFIPGFASLAAPLYPLTRPKVPFTWTEAHQEAFGRIKEALLSAPALALPDLTKPFALYVDEKEGVARGVLTQTLGPWRRPVAYLSKKLDPVASGWPTCLKAIAAVALLLKDADKLTLGQNVLVIAPHNLESIVRQPPDRWMTNARMTHYQSLLLNERVSFAPPAILNPATLLPVESDDTPIHICSEILAEETGTRPDLRDQPLPGVPAWYTDGSSFIMDGRRQAGAAIVDNKRTVWASNLPEGTSAQKAELIALTQALRLAEGKSINIYTDSRYAFATAHVHGAIYKQRGWLTSAGKDIKNKEEILALLEAIHLPKRVAIIHCPGHQRGTDPVATGNRKADEAAKQAAQSTRILTETTKNAGKRTADGSEFEKRTADGSEFESPKKKAKVE

SEQ ID NO: 1675 - protein, 2119 aa, synthetic construct
MPAAKRVKLDGGDKKYSIGLDIGTNSVGWAVITDEYKVPSKKFKVLGNTDRHSIKKNLIGALLFDSGETAEATRLKRTARRRYTRRKNRICYLQEIFSNEMAKVDDSFFHRLEESFLVEEDKKHERHPIFGNIVDEVAYHEKYPTIYHLRKKLVDSTDKADLRLIYLALAHMIKFRGHFLIEGDLNPDNSDVDKLFIQLVQTYNQLFEENPINASGVDAKAILSARLSKSRRLENLIAQLPGEKKNGLFGNLIALSLGLTPNFKSNFDLAEDAKLQLSKDTYDDDLDNLLAQIGDQYADLFLAAKNLSDAILLSDILRVNTEITKAPLSASMIKRYDEHHQDLTLLKALVRQQLPEKYKEIFFDQSKNGYAGYIDGGASQEEFYKFIKPILEKMDGTEELLVKLNREDLLRKQRTFDNGSIPHQIHLGELHAILRRQEDFYPFLKDNREKIEKILTFRIPYYVGPLARGNSRFAWMTRKSEETITPWNFEEVVDKGASAQSFIERMTNFDKNLPNEKVLPKHSLLYEYFTVYNELTKVKYVTEGMRKPAFLSGEQKKAIVDLLFKTNRKVTVKQLKEDYFKKIECFDSVEISGVEDRFNASLGTYHDLLKIIKDKDFLDNEENEDILEDIVLTLTLFEDREMIEERLKTYAHLFDDKVMKQLKRRRYTGWGRLSRKLINGIRDKQSGKTILDFLKSDGFANRNFMQLIHDDSLTFKEDIQKAQVSGQGDSLHEHIANLAGSPAIKKGILQTVKVVDELVKVMGRHKPENIVIEMARENQTTQKGQKNSRERMKRIEEGIKELGSQILKEHPVENTQLQNEKLYLYYLQNGRDMYVDQELDINRLSDYDVDHIVPQSFLKDDSIDNKVLTRSDKARGKSDNVPSEEVVKKMKNYWRQLLNAKLITQRKFDNLTKAERGGLSELDKAGFIKRQLVETRQITKHVAQILDSRMNTKYDENDKLIREVKVITLKSKLVSDFRKDFQFYKVREINNYHHAHDAYLNAVVGTALIKKYPKLESEFVYGDYKVYDVRKMIAKSEQEIGKATAKYFFYSNIMNFFKTEITLANGEIRKRPLIETNGETGEIVWDKGRDFATVRKVLSMPQVNIVKKTEVQTGGFSKESILPKRNSDKLIARKKDWDPKKYGGFDSPTVAYSVLVVAKVEKGKSKKLKSVKELLGITIMERSSFEKNPIDFLEAKGYKEVKKDLIIKLPKYSLFELENGRKRMLASAGELQKGNELALPSKYVNFLYLASHYEKLKGSPEDNEQKQLFVEQHKHYLDEIIEQISEFSKRVILADANLDKVLSAYNKHRDKPIREQAENIIHLFTLTNLGAPAAFKYFDTTIDRKRYTSTKEVLDATLIHQSITGLYETRIDLSQLGGDGGGGSGGLLGRDLLTKLKAQIQFSTEGPQVTWEDRPAMCLVLNLEEEYRLHEKPVPPSIDPSWLQLFPMVWAEKAGMGLANQVPPVVVELKSDASPVAVRQYPMSKEAREGIRPHIQRFLDLGILVPCQSPWNTPLLPVKKPGTNDYRPVQDLREVNKRVQDIHPTVPNPYNLLSSLPPSHTWYSVLDLKDAFFCLKLHPNSQPLFAFEWRDPEKGNTGQLTWTRLPQGFKNSPTLFNEALHRDLASFRALNPQVVMLQYVDDLLVAAPTYRDCKEGTRRLLQELSKLGYRVSAKKAQLCREEVTYLGYLLKGGKRWLTPARKATVMKIPTPTTPRQVREFLGKAGFCRLFIPGFASLAAPLYPLTRPKVPFTWTEAHQEAFGRIKEALLSAPALALPDLTKPFALYVDEKEGVARGVLTQTLGPWRRPVAYLSKKLDPVASGWPTCLKAIAAVALLLKDADKLTLGQNVLVIAPHNLESIVRQPPDRWMTNARMTHYQSLLLNERVSFAPPAILNPATLLPVESDDTPIHICSEILAEETGTRPDLRDQPLPGVPAWYTDGSSFIMDGRRQAGAAIVDNKRTVWASNLPEGTSAQKAELIALTQALRLAEGKSINIYTDSRYAFATAHVHGAIYKQRGWLTSAGKDIKNKEEILALLEAIHLPKRVAIIHCPGHQRGTDPVATGNRKADEAAKQAAQSTRILTETTKNAGKRTADGSEFEKRTADGSEFESPKKKAKVE

SEQ ID NO: 1676 - protein, 2122 aa, synthetic construct
MPAAKRVKLDGGDKKYSIGLDIGTNSVGWAVITDEYKVPSKKFKVLGNTDRHSIKKNLIGALLFDSGETAEATRLKRTARRRYTRRKNRICYLQEIFSNEMAKVDDSFFHRLEESFLVEEDKKHERHPIFGNIVDEVAYHEKYPTIYHLRKKLVDSTDKADLRLIYLALAHMIKFRGHFLIEGDLNPDNSDVDKLFIQLVQTYNQLFEENPINASGVDAKAILSARLSKSRRLENLIAQLPGEKKNGLFGNLIALSLGLTPNFKSNFDLAEDAKLQLSKDTYDDDLDNLLAQIGDQYADLFLAAKNLSDAILLSDILRVNTEITKAPLSASMIKRYDEHHQDLTLLKALVRQQLPEKYKEIFFDQSKNGYAGYIDGGASQEEFYKFIKPILEKMDGTEELLVKLNREDLLRKQRTFDNGSIPHQIHLGELHAILRRQEDFYPFLKDNREKIEKILTFRIPYYVGPLARGNSRFAWMTRKSEETITPWNFEEVVDKGASAQSFIERMTNFDKNLPNEKVLPKHSLLYEYFTVYNELTKVKYVTEGMRKPAFLSGEQKKAIVDLLFKTNRKVTVKQLKEDYFKKIECFDSVEISGVEDRFNASLGTYHDLLKIIKDKDFLDNEENEDILEDIVLTLTLFEDREMIEERLKTYAHLFDDKVMKQLKRRRYTGWGRLSRKLINGIRDKQSGKTILDFLKSDGFANRNFMQLIHDDSLTFKEDIQKAQVSGQGDSLHEHIANLAGSPAIKKGILQTVKVVDELVKVMGRHKPENIVIEMARENQTTQKGQKNSRERMKRIEEGIKELGSQILKEHPVENTQLQNEKLYLYYLQNGRDMYVDQELDINRLSDYDVDHIVPQSFLKDDSIDNKVLTRSDKARGKSDNVPSEEVVKKMKNYWRQLLNAKLITQRKFDNLTKAERGGLSELDKAGFIKRQLVETRQITKHVAQILDSRMNTKYDENDKLIREVKVITLKSKLVSDFRKDFQFYKVREINNYHHAHDAYLNAVVGTALIKKYPKLESEFVYGDYKVYDVRKMIAKSEQEIGKATAKYFFYSNIMNFFKTEITLANGEIRKRPLIETNGETGEIVWDKGRDFATVRKVLSMPQVNIVKKTEVQTGGFSKESILPKRNSDKLIARKKDWDPKKYGGFDSPTVAYSVLVVAKVEKGKSKKLKSVKELLGITIMERSSFEKNPIDFLEAKGYKEVKKDLIIKLPKYSLFELENGRKRMLASAGELQKGNELALPSKYVNFLYLASHYEKLKGSPEDNEQKQLFVEQHKHYLDEIIEQISEFSKRVILADANLDKVLSAYNKHRDKPIREQAENIIHLFTLTNLGAPAAFKYFDTTIDRKRYTSTKEVLDATLIHQSITGLYETRIDLSQLGGDGGGGGGSSGGLLGRDLLTKLKAQIQFSTEGPQVTWEDRPAMCLVLNLEEEYRLHEKPVPPSIDPSWLQLFPMVWAEKAGMGLANQVPPVVVELKSDASPVAVRQYPMSKEAREGIRPHIQRFLDLGILVPCQSPWNTPLLPVKKPGTNDYRPVQDLREVNKRVQDIHPTVPNPYNLLSSLPPSHTWYSVLDLKDAFFCLKLHPNSQPLFAFEWRDPEKGNTGQLTWTRLPQGFKNSPTLFNEALHRDLASFRALNPQVVMLQYVDDLLVAAPTYRDCKEGTRRLLQELSKLGYRVSAKKAQLCREEVTYLGYLLKGGKRWLTPARKATVMKIPTPTTPRQVREFLGKAGFCRLFIPGFASLAAPLYPLTRPKVPFTWTEAHQEAFGRIKEALLSAPALALPDLTKPFALYVDEKEGVARGVLTQTLGPWRRPVAYLSKKLDPVASGWPTCLKAIAAVALLLKDADKLTLGQNVLVIAPHNLESIVRQPPDRWMTNARMTHYQSLLLNERVSFAPPAILNPATLLPVESDDTPIHICSEILAEETGTRPDLRDQPLPGVPAWYTDGSSFIMDGRRQAGAAIVDNKRTVWASNLPEGTSAQKAELIALTQALRLAEGKSINIYTDSRYAFATAHVHGAIYKQRGWLTSAGKDIKNKEEILALLEAIHLPKRVAIIHCPGHQRGTDPVATGNRKADEAAKQAAQSTRILTETTKNAGKRTADGSEFEKRTADGSEFESPKKKAKVE

SEQ ID NO: 1677 - protein, 2127 aa, synthetic construct
MPAAKRVKLDGGDKKYSIGLDIGTNSVGWAVITDEYKVPSKKFKVLGNTDRHSIKKNLIGALLFDSGETAEATRLKRTARRRYTRRKNRICYLQEIFSNEMAKVDDSFFHRLEESFLVEEDKKHERHPIFGNIVDEVAYHEKYPTIYHLRKKLVDSTDKADLRLIYLALAHMIKFRGHFLIEGDLNPDNSDVDKLFIQLVQTYNQLFEENPINASGVDAKAILSARLSKSRRLENLIAQLPGEKKNGLFGNLIALSLGLTPNFKSNFDLAEDAKLQLSKDTYDDDLDNLLAQIGDQYADLFLAAKNLSDAILLSDILRVNTEITKAPLSASMIKRYDEHHQDLTLLKALVRQQLPEKYKEIFFDQSKNGYAGYIDGGASQEEFYKFIKPILEKMDGTEELLVKLNREDLLRKQRTFDNGSIPHQIHLGELHAILRRQEDFYPFLKDNREKIEKILTFRIPYYVGPLARGNSRFAWMTRKSEETITPWNFEEVVDKGASAQSFIERMTNFDKNLPNEKVLPKHSLLYEYFTVYNELTKVKYVTEGMRKPAFLSGEQKKAIVDLLFKTNRKVTVKQLKEDYFKKIECFDSVEISGVEDRFNASLGTYHDLLKIIKDKDFLDNEENEDILEDIVLTLTLFEDREMIEERLKTYAHLFDDKVMKQLKRRRYTGWGRLSRKLINGIRDKQSGKTILDFLKSDGFANRNFMQLIHDDSLTFKEDIQKAQVSGQGDSLHEHIANLAGSPAIKKGILQTVKVVDELVKVMGRHKPENIVIEMARENQTTQKGQKNSRERMKRIEEGIKELGSQILKEHPVENTQLQNEKLYLYYLQNGRDMYVDQELDINRLSDYDVDHIVPQSFLKDDSIDNKVLTRSDKARGKSDNVPSEEVVKKMKNYWRQLLNAKLITQRKFDNLTKAERGGLSELDKAGFIKRQLVETRQITKHVAQILDSRMNTKYDENDKLIREVKVITLKSKLVSDFRKDFQFYKVREINNYHHAHDAYLNAVVGTALIKKYPKLESEFVYGDYKVYDVRKMIAKSEQEIGKATAKYFFYSNIMNFFKTEITLANGEIRKRPLIETNGETGEIVWDKGRDFATVRKVLSMPQVNIVKKTEVQTGGFSKESILPKRNSDKLIARKKDWDPKKYGGFDSPTVAYSVLVVAKVEKGKSKKLKSVKELLGITIMERSSFEKNPIDFLEAKGYKEVKKDLIIKLPKYSLFELENGRKRMLASAGELQKGNELALPSKYVNFLYLASHYEKLKGSPEDNEQKQLFVEQHKHYLDEIIEQISEFSKRVILADANLDKVLSAYNKHRDKPIREQAENIIHLFTLTNLGAPAAFKYFDTTIDRKRYTSTKEVLDATLIHQSITGLYETRIDLSQLGGDGGEAAAKGGGGSSGGLLGRDLLTKLKAQIQFSTEGPQVTWEDRPAMCLVLNLEEEYRLHEKPVPPSIDPSWLQLFPMVWAEKAGMGLANQVPPVVVELKSDASPVAVRQYPMSKEAREGIRPHIQRFLDLGILVPCQSPWNTPLLPVKKPGTNDYRPVQDLREVNKRVQDIHPTVPNPYNLLSSLPPSHTWYSVLDLKDAFFCLKLHPNSQPLFAFEWRDPEKGNTGQLTWTRLPQGFKNSPTLFNEALHRDLASFRALNPQVVMLQYVDDLLVAAPTYRDCKEGTRRLLQELSKLGYRVSAKKAQLCREEVTYLGYLLKGGKRWLTPARKATVMKIPTPTTPRQVREFLGKAGFCRLFIPGFASLAAPLYPLTRPKVPFTWTEAHQEAFGRIKEALLSAPALALPDLTKPFALYVDEKEGVARGVLTQTLGPWRRPVAYLSKKLDPVASGWPTCLKAIAAVALLLKDADKLTLGQNVLVIAPHNLESIVRQPPDRWMTNARMTHYQSLLLNERVSFAPPAILNPATLLPVESDDTPIHICSEILAEETGTRPDLRDQPLPGVPAWYTDGSSFIMDGRRQAGAAIVDNKRTVWASNLPEGTSAQKAELIALTQALRLAEGKSINIYTDSRYAFATAHVHGAIYKQRGWLTSAGKDIKNKEEILALLEAIHLPKRVAIIHCPGHQRGTDPVATGNRKADEAAKQAAQSTRILTETTKNAGKRTADGSEFEKRTADGSEFESPKKKAKVE

SEQ ID NO: 1678 - protein, 2128 aa, synthetic construct
MPAAKRVKLDGGDKKYSIGLDIGTNSVGWAVITDEYKVPSKKFKVLGNTDRHSIKKNLIGALLFDSGETAEATRLKRTARRRYTRRKNRICYLQEIFSNEMAKVDDSFFHRLEESFLVEEDKKHERHPIFGNIVDEVAYHEKYPTIYHLRKKLVDSTDKADLRLIYLALAHMIKFRGHFLIEGDLNPDNSDVDKLFIQLVQTYNQLFEENPINASGVDAKAILSARLSKSRRLENLIAQLPGEKKNGLFGNLIALSLGLTPNFKSNFDLAEDAKLQLSKDTYDDDLDNLLAQIGDQYADLFLAAKNLSDAILLSDILRVNTEITKAPLSASMIKRYDEHHQDLTLLKALVRQQLPEKYKEIFFDQSKNGYAGYIDGGASQEEFYKFIKPILEKMDGTEELLVKLNREDLLRKQRTFDNGSIPHQIHLGELHAILRRQEDFYPFLKDNREKIEKILTFRIPYYVGPLARGNSRFAWMTRKSEETITPWNFEEVVDKGASAQSFIERMTNFDKNLPNEKVLPKHSLLYEYFTVYNELTKVKYVTEGMRKPAFLSGEQKKAIVDLLFKTNRKVTVKQLKEDYFKKIECFDSVEISGVEDRFNASLGTYHDLLKIIKDKDFLDNEENEDILEDIVLTLTLFEDREMIEERLKTYAHLFDDKVMKQLKRRRYTGWGRLSRKLINGIRDKQSGKTILDFLKSDGFANRNFMQLIHDDSLTFKEDIQKAQVSGQGDSLHEHIANLAGSPAIKKGILQTVKVVDELVKVMGRHKPENIVIEMARENQTTQKGQKNSRERMKRIEEGIKELGSQILKEHPVENTQLQNEKLYLYYLQNGRDMYVDQELDINRLSDYDVDHIVPQSFLKDDSIDNKVLTRSDKARGKSDNVPSEEVVKKMKNYWRQLLNAKLITQRKFDNLTKAERGGLSELDKAGFIKRQLVETRQITKHVAQILDSRMNTKYDENDKLIREVKVITLKSKLVSDFRKDFQFYKVREINNYHHAHDAYLNAVVGTALIKKYPKLESEFVYGDYKVYDVRKMIAKSEQEIGKATAKYFFYSNIMNFFKTEITLANGEIRKRPLIETNGETGEIVWDKGRDFATVRKVLSMPQVNIVKKTEVQTGGFSKESILPKRNSDKLIARKKDWDPKKYGGFDSPTVAYSVLVVAKVEKGKSKKLKSVKELLGITIMERSSFEKNPIDFLEAKGYKEVKKDLIIKLPKYSLFELENGRKRMLASAGELQKGNELALPSKYVNFLYLASHYEKLKGSPEDNEQKQLFVEQHKHYLDEIIEQISEFSKRVILADANLDKVLSAYNKHRDKPIREQAENIIHLFTLTNLGAPAAFKYFDTTIDRKRYTSTKEVLDATLIHQSITGLYETRIDLSQLGGDGGGGSGGSGGSGGSGGLLGRDLLTKLKAQIQFSTEGPQVTWEDRPAMCLVLNLEEEYRLHEKPVPPSIDPSWLQLFPMVWAEKAGMGLANQVPPVVVELKSDASPVAVRQYPMSKEAREGIRPHIQRFLDLGILVPCQSPWNTPLLPVKKPGTNDYRPVQDLREVNKRVQDIHPTVPNPYNLLSSLPPSHTWYSVLDLKDAFFCLKLHPNSQPLFAFEWRDPEKGNTGQLTWTRLPQGFKNSPTLFNEALHRDLASFRALNPQVVMLQYVDDLLVAAPTYRDCKEGTRRLLQELSKLGYRVSAKKAQLCREEVTYLGYLLKGGKRWLTPARKATVMKIPTPTTPRQVREFLGKAGFCRLFIPGFASLAAPLYPLTRPKVPFTWTEAHQEAFGRIKEALLSAPALALPDLTKPFALYVDEKEGVARGVLTQTLGPWRRPVAYLSKKLDPVASGWPTCLKAIAAVALLLKDADKLTLGQNVLVIAPHNLESIVRQPPDRWMTNARMTHYQSLLLNERVSFAPPAILNPATLLPVESDDTPIHICSEILAEETGTRPDLRDQPLPGVPAWYTDGSSFIMDGRRQAGAAIVDNKRTVWASNLPEGTSAQKAELIALTQALRLAEGKSINIYTDSRYAFATAHVHGAIYKQRGWLTSAGKDIKNKEEILALLEAIHLPKRVAIIHCPGHQRGTDPVATGNRKADEAAKQAAQSTRILTETTKNAGKRTADGSEFEKRTADGSEFESPKKKAKVE

SEQ ID NO: 1679 - protein, 2124 aa, synthetic construct
MPAAKRVKLDGGDKKYSIGLDIGTNSVGWAVITDEYKVPSKKFKVLGNTDRHSIKKNLIGALLFDSGETAEATRLKRTARRRYTRRKNRICYLQEIFSNEMAKVDDSFFHRLEESFLVEEDKKHERHPIFGNIVDEVAYHEKYPTIYHLRKKLVDSTDKADLRLIYLALAHMIKFRGHFLIEGDLNPDNSDVDKLFIQLVQTYNQLFEENPINASGVDAKAILSARLSKSRRLENLIAQLPGEKKNGLFGNLIALSLGLTPNFKSNFDLAEDAKLQLSKDTYDDDLDNLLAQIGDQYADLFLAAKNLSDAILLSDILRVNTEITKAPLSASMIKRYDEHHQDLTLLKALVRQQLPEKYKEIFFDQSKNGYAGYIDGGASQEEFYKFIKPILEKMDGTEELLVKLNREDLLRKQRTFDNGSIPHQIHLGELHAILRRQEDFYPFLKDNREKIEKILTFRIPYYVGPLARGNSRFAWMTRKSEETITPWNFEEVVDKGASAQSFIERMTNFDKNLPNEKVLPKHSLLYEYFTVYNELTKVKYVTEGMRKPAFLSGEQKKAIVDLLFKTNRKVTVKQLKEDYFKKIECFDSVEISGVEDRFNASLGTYHDLLKIIKDKDFLDNEENEDILEDIVLTLTLFEDREMIEERLKTYAHLFDDKVMKQLKRRRYTGWGRLSRKLINGIRDKQSGKTILDFLKSDGFANRNFMQLIHDDSLTFKEDIQKAQVSGQGDSLHEHIANLAGSPAIKKGILQTVKVVDELVKVMGRHKPENIVIEMARENQTTQKGQKNSRERMKRIEEGIKELGSQILKEHPVENTQLQNEKLYLYYLQNGRDMYVDQELDINRLSDYDVDHIVPQSFLKDDSIDNKVLTRSDKARGKSDNVPSEEVVKKMKNYWRQLLNAKLITQRKFDNLTKAERGGLSELDKAGFIKRQLVETRQITKHVAQILDSRMNTKYDENDKLIREVKVITLKSKLVSDFRKDFQFYKVREINNYHHAHDAYLNAVVGTALIKKYPKLESEFVYGDYKVYDVRKMIAKSEQEIGKATAKYFFYSNIMNFFKTEITLANGEIRKRPLIETNGETGEIVWDKGRDFATVRKVLSMPQVNIVKKTEVQTGGFSKESILPKRNSDKLIARKKDWDPKKYGGFDSPTVAYSVLVVAKVEKGKSKKLKSVKELLGITIMERSSFEKNPIDFLEAKGYKEVKKDLIIKLPKYSLFELENGRKRMLASAGELQKGNELALPSKYVNFLYLASHYEKLKGSPEDNEQKQLFVEQHKHYLDEIIEQISEFSKRVILADANLDKVLSAYNKHRDKPIREQAENIIHLFTLTNLGAPAAFKYFDTTIDRKRYTSTKEVLDATLIHQSITGLYETRIDLSQLGGDGGEAAAKGGSGGLLGRDLLTKLKAQIQFSTEGPQVTWEDRPAMCLVLNLEEEYRLHEKPVPPSIDPSWLQLFPMVWAEKAGMGLANQVPPVVVELKSDASPVAVRQYPMSKEAREGIRPHIQRFLDLGILVPCQSPWNTPLLPVKKPGTNDYRPVQDLREVNKRVQDIHPTVPNPYNLLSSLPPSHTWYSVLDLKDAFFCLKLHPNSQPLFAFEWRDPEKGNTGQLTWTRLPQGFKNSPTLFNEALHRDLASFRALNPQVVMLQYVDDLLVAAPTYRDCKEGTRRLLQELSKLGYRVSAKKAQLCREEVTYLGYLLKGGKRWLTPARKATVMKIPTPTTPRQVREFLGKAGFCRLFIPGFASLAAPLYPLTRPKVPFTWTEAHQEAFGRIKEALLSAPALALPDLTKPFALYVDEKEGVARGVLTQTLGPWRRPVAYLSKKLDPVASGWPTCLKAIAAVALLLKDADKLTLGQNVLVIAPHNLESIVRQPPDRWMTNARMTHYQSLLLNERVSFAPPAILNPATLLPVESDDTPIHICSEILAEETGTRPDLRDQPLPGVPAWYTDGSSFIMDGRRQAGAAIVDNKRTVWASNLPEGTSAQKAELIALTQALRLAEGKSINIYTDSRYAFATAHVHGAIYKQRGWLTSAGKDIKNKEEILALLEAIHLPKRVAIIHCPGHQRGTDPVATGNRKADEAAKQAAQSTRILTETTKNAGKRTADGSEFEKRTADGSEFESPKKKAKVE

SEQ ID NO: 1680 - protein, 2123 aa, synthetic construct
MPAAKRVKLDGGDKKYSIGLDIGTNSVGWAVITDEYKVPSKKFKVLGNTDRHSIKKNLIGALLFDSGETAEATRLKRTARRRYTRRKNRICYLQEIFSNEMAKVDDSFFHRLEESFLVEEDKKHERHPIFGNIVDEVAYHEKYPTIYHLRKKLVDSTDKADLRLIYLALAHMIKFRGHFLIEGDLNPDNSDVDKLFIQLVQTYNQLFEENPINASGVDAKAILSARLSKSRRLENLIAQLPGEKKNGLFGNLIALSLGLTPNFKSNFDLAEDAKLQLSKDTYDDDLDNLLAQIGDQYADLFLAAKNLSDAILLSDILRVNTEITKAPLSASMIKRYDEHHQDLTLLKALVRQQLPEKYKEIFFDQSKNGYAGYIDGGASQEEFYKFIKPILEKMDGTEELLVKLNREDLLRKQRTFDNGSIPHQIHLGELHAILRRQEDFYPFLKDNREKIEKILTFRIPYYVGPLARGNSRFAWMTRKSEETITPWNFEEVVDKGASAQSFIERMTNFDKNLPNEKVLPKHSLLYEYFTVYNELTKVKYVTEGMRKPAFLSGEQKKAIVDLLFKTNRKVTVKQLKEDYFKKIECFDSVEISGVEDRFNASLGTYHDLLKIIKDKDFLDNEENEDILEDIVLTLTLFEDREMIEERLKTYAHLFDDKVMKQLKRRRYTGWGRLSRKLINGIRDKQSGKTILDFLKSDGFANRNFMQLIHDDSLTFKEDIQKAQVSGQGDSLHEHIANLAGSPAIKKGILQTVKVVDELVKVMGRHKPENIVIEMARENQTTQKGQKNSRERMKRIEEGIKELGSQILKEHPVENTQLQNEKLYLYYLQNGRDMYVDQELDINRLSDYDVDHIVPQSFLKDDSIDNKVLTRSDKARGKSDNVPSEEVVKKMKNYWRQLLNAKLITQRKFDNLTKAERGGLSELDKAGFIKRQLVETRQITKHVAQILDSRMNTKYDENDKLIREVKVITLKSKLVSDFRKDFQFYKVREINNYHHAHDAYLNAVVGTALIKKYPKLESEFVYGDYKVYDVRKMIAKSEQEIGKATAKYFFYSNIMNFFKTEITLANGEIRKRPLIETNGETGEIVWDKGRDFATVRKVLSMPQVNIVKKTEVQTGGFSKESILPKRNSDKLIARKKDWDPKKYGGFDSPTVAYSVLVVAKVEKGKSKKLKSVKELLGITIMERSSFEKNPIDFLEAKGYKEVKKDLIIKLPKYSLFELENGRKRMLASAGELQKGNELALPSKYVNFLYLASHYEKLKGSPEDNEQKQLFVEQHKHYLDEIIEQISEFSKRVILADANLDKVLSAYNKHRDKPIREQAENIIHLFTLTNLGAPAAFKYFDTTIDRKRYTSTKEVLDATLIHQSITGLYETRIDLSQLGGDGGPAPAPAPGGLLGRDLLTKLKAQIQFSTEGPQVTWEDRPAMCLVLNLEEEYRLHEKPVPPSIDPSWLQLFPMVWAEKAGMGLANQVPPVVVELKSDASPVAVRQYPMSKEAREGIRPHIQRFLDLGILVPCQSPWNTPLLPVKKPGTNDYRPVQDLREVNKRVQDIHPTVPNPYNLLSSLPPSHTWYSVLDLKDAFFCLKLHPNSQPLFAFEWRDPEKGNTGQLTWTRLPQGFKNSPTLFNEALHRDLASFRALNPQVVMLQYVDDLLVAAPTYRDCKEGTRRLLQELSKLGYRVSAKKAQLCREEVTYLGYLLKGGKRWLTPARKATVMKIPTPTTPRQVREFLGKAGFCRLFIPGFASLAAPLYPLTRPKVPFTWTEAHQEAFGRIKEALLSAPALALPDLTKPFALYVDEKEGVARGVLTQTLGPWRRPVAYLSKKLDPVASGWPTCLKAIAAVALLLKDADKLTLGQNVLVIAPHNLESIVRQPPDRWMTNARMTHYQSLLLNERVSFAPPAILNPATLLPVESDDTPIHICSEILAEETGTRPDLRDQPLPGVPAWYTDGSSFIMDGRRQAGAAIVDNKRTVWASNLPEGTSAQKAELIALTQALRLAEGKSINIYTDSRYAFATAHVHGAIYKQRGWLTSAGKDIKNKEEILALLEAIHLPKRVAIIHCPGHQRGTDPVATGNRKADEAAKQAAQSTRILTETTKNAGKRTADGSEFEKRTADGSEFESPKKKAKVE

SEQ ID NO: 1681 - protein, 2131 aa, synthetic construct
MPAAKRVKLDGGDKKYSIGLDIGTNSVGWAVITDEYKVPSKKFKVLGNTDRHSIKKNLIGALLFDSGETAEATRLKRTARRRYTRRKNRICYLQEIFSNEMAKVDDSFFHRLEESFLVEEDKKHERHPIFGNIVDEVAYHEKYPTIYHLRKKLVDSTDKADLRLIYLALAHMIKFRGHFLIEGDLNPDNSDVDKLFIQLVQTYNQLFEENPINASGVDAKAILSARLSKSRRLENLIAQLPGEKKNGLFGNLIALSLGLTPNFKSNFDLAEDAKLQLSKDTYDDDLDNLLAQIGDQYADLFLAAKNLSDAILLSDILRVNTEITKAPLSASMIKRYDEHHQDLTLLKALVRQQLPEKYKEIFFDQSKNGYAGYIDGGASQEEFYKFIKPILEKMDGTEELLVKLNREDLLRKQRTFDNGSIPHQIHLGELHAILRRQEDFYPFLKDNREKIEKILTFRIPYYVGPLARGNSRFAWMTRKSEETITPWNFEEVVDKGASAQSFIERMTNFDKNLPNEKVLPKHSLLYEYFTVYNELTKVKYVTEGMRKPAFLSGEQKKAIVDLLFKTNRKVTVKQLKEDYFKKIECFDSVEISGVEDRFNASLGTYHDLLKIIKDKDFLDNEENEDILEDIVLTLTLFEDREMIEERLKTYAHLFDDKVMKQLKRRRYTGWGRLSRKLINGIRDKQSGKTILDFLKSDGFANRNFMQLIHDDSLTFKEDIQKAQVSGQGDSLHEHIANLAGSPAIKKGILQTVKVVDELVKVMGRHKPENIVIEMARENQTTQKGQKNSRERMKRIEEGIKELGSQILKEHPVENTQLQNEKLYLYYLQNGRDMYVDQELDINRLSDYDVDHIVPQSFLKDDSIDNKVLTRSDKARGKSDNVPSEEVVKKMKNYWRQLLNAKLITQRKFDNLTKAERGGLSELDKAGFIKRQLVETRQITKHVAQILDSRMNTKYDENDKLIREVKVITLKSKLVSDFRKDFQFYKVREINNYHHAHDAYLNAVVGTALIKKYPKLESEFVYGDYKVYDVRKMIAKSEQEIGKATAKYFFYSNIMNFFKTEITLANGEIRKRPLIETNGETGEIVWDKGRDFATVRKVLSMPQVNIVKKTEVQTGGFSKESILPKRNSDKLIARKKDWDPKKYGGFDSPTVAYSVLVVAKVEKGKSKKLKSVKELLGITIMERSSFEKNPIDFLEAKGYKEVKKDLIIKLPKYSLFELENGRKRMLASAGELQKGNELALPSKYVNFLYLASHYEKLKGSPEDNEQKQLFVEQHKHYLDEIIEQISEFSKRVILADANLDKVLSAYNKHRDKPIREQAENIIHLFTLTNLGAPAAFKYFDTTIDRKRYTSTKEVLDATLIHQSITGLYETRIDLSQLGGDGGGSSGSSGSSGSSGSSGGLLGRDLLTKLKAQIQFSTEGPQVTWEDRPAMCLVLNLEEEYRLHEKPVPPSIDPSWLQLFPMVWAEKAGMGLANQVPPVVVELKSDASPVAVRQYPMSKEAREGIRPHIQRFLDLGILVPCQSPWNTPLLPVKKPGTNDYRPVQDLREVNKRVQDIHPTVPNPYNLLSSLPPSHTWYSVLDLKDAFFCLKLHPNSQPLFAFEWRDPEKGNTGQLTWTRLPQGFKNSPTLFNEALHRDLASFRALNPQVVMLQYVDDLLVAAPTYRDCKEGTRRLLQELSKLGYRVSAKKAQLCREEVTYLGYLLKGGKRWLTPARKATVMKIPTPTTPRQVREFLGKAGFCRLFIPGFASLAAPLYPLTRPKVPFTWTEAHQEAFGRIKEALLSAPALALPDLTKPFALYVDEKEGVARGVLTQTLGPWRRPVAYLSKKLDPVASGWPTCLKAIAAVALLLKDADKLTLGQNVLVIAPHNLESIVRQPPDRWMTNARMTHYQSLLLNERVSFAPPAILNPATLLPVESDDTPIHICSEILAEETGTRPDLRDQPLPGVPAWYTDGSSFIMDGRRQAGAAIVDNKRTVWASNLPEGTSAQKAELIALTQALRLAEGKSINIYTDSRYAFATAHVHGAIYKQRGWLTSAGKDIKNKEEILALLEAIHLPKRVAIIHCPGHQRGTDPVATGNRKADEAAKQAAQSTRILTETTKNAGKRTADGSEFEKRTADGSEFESPKKKAKVE

SEQ ID NO: 1682 - protein, 2127 aa, synthetic construct
MPAAKRVKLDGGDKKYSIGLDIGTNSVGWAVITDEYKVPSKKFKVLGNTDRHSIKKNLIGALLFDSGETAEATRLKRTARRRYTRRKNRICYLQEIFSNEMAKVDDSFFHRLEESFLVEEDKKHERHPIFGNIVDEVAYHEKYPTIYHLRKKLVDSTDKADLRLIYLALAHMIKFRGHFLIEGDLNPDNSDVDKLFIQLVQTYNQLFEENPINASGVDAKAILSARLSKSRRLENLIAQLPGEKKNGLFGNLIALSLGLTPNFKSNFDLAEDAKLQLSKDTYDDDLDNLLAQIGDQYADLFLAAKNLSDAILLSDILRVNTEITKAPLSASMIKRYDEHHQDLTLLKALVRQQLPEKYKEIFFDQSKNGYAGYIDGGASQEEFYKFIKPILEKMDGTEELLVKLNREDLLRKQRTFDNGSIPHQIHLGELHAILRRQEDFYPFLKDNREKIEKILTFRIPYYVGPLARGNSRFAWMTRKSEETITPWNFEEVVDKGASAQSFIERMTNFDKNLPNEKVLPKHSLLYEYFTVYNELTKVKYVTEGMRKPAFLSGEQKKAIVDLLFKTNRKVTVKQLKEDYFKKIECFDSVEISGVEDRFNASLGTYHDLLKIIKDKDFLDNEENEDILEDIVLTLTLFEDREMIEERLKTYAHLFDDKVMKQLKRRRYTGWGRLSRKLINGIRDKQSGKTILDFLKSDGFANRNFMQLIHDDSLTFKEDIQKAQVSGQGDSLHEHIANLAGSPAIKKGILQTVKVVDELVKVMGRHKPENIVIEMARENQTTQKGQKNSRERMKRIEEGIKELGSQILKEHPVENTQLQNEKLYLYYLQNGRDMYVDQELDINRLSDYDVDHIVPQSFLKDDSIDNKVLTRSDKARGKSDNVPSEEVVKKMKNYWRQLLNAKLITQRKFDNLTKAERGGLSELDKAGFIKRQLVETRQITKHVAQILDSRMNTKYDENDKLIREVKVITLKSKLVSDFRKDFQFYKVREINNYHHAHDAYLNAVVGTALIKKYPKLESEFVYGDYKVYDVRKMIAKSEQEIGKATAKYFFYSNIMNFFKTEITLANGEIRKRPLIETNGETGEIVWDKGRDFATVRKVLSMPQVNIVKKTEVQTGGFSKESILPKRNSDKLIARKKDWDPKKYGGFDSPTVAYSVLVVAKVEKGKSKKLKSVKELLGITIMERSSFEKNPIDFLEAKGYKEVKKDLIIKLPKYSLFELENGRKRMLASAGELQKGNELALPSKYVNFLYLASHYEKLKGSPEDNEQKQLFVEQHKHYLDEIIEQISEFSKRVILADANLDKVLSAYNKHRDKPIREQAENIIHLFTLTNLGAPAAFKYFDTTIDRKRYTSTKEVLDATLIHQSITGLYETRIDLSQLGGDGGGGGGGSEAAAKGGLLGRDLLTKLKAQIQFSTEGPQVTWEDRPAMCLVLNLEEEYRLHEKPVPPSIDPSWLQLFPMVWAEKAGMGLANQVPPVVVELKSDASPVAVRQYPMSKEAREGIRPHIQRFLDLGILVPCQSPWNTPLLPVKKPGTNDYRPVQDLREVNKRVQDIHPTVPNPYNLLSSLPPSHTWYSVLDLKDAFFCLKLHPNSQPLFAFEWRDPEKGNTGQLTWTRLPQGFKNSPTLFNEALHRDLASFRALNPQVVMLQYVDDLLVAAPTYRDCKEGTRRLLQELSKLGYRVSAKKAQLCREEVTYLGYLLKGGKRWLTPARKATVMKIPTPTTPRQVREFLGKAGFCRLFIPGFASLAAPLYPLTRPKVPFTWTEAHQEAFGRIKEALLSAPALALPDLTKPFALYVDEKEGVARGVLTQTLGPWRRPVAYLSKKLDPVASGWPTCLKAIAAVALLLKDADKLTLGQNVLVIAPHNLESIVRQPPDRWMTNARMTHYQSLLLNERVSFAPPAILNPATLLPVESDDTPIHICSEILAEETGTRPDLRDQPLPGVPAWYTDGSSFIMDGRRQAGAAIVDNKRTVWASNLPEGTSAQKAELIALTQALRLAEGKSINIYTDSRYAFATAHVHGAIYKQRGWLTSAGKDIKNKEEILALLEAIHLPKRVAIIHCPGHQRGTDPVATGNRKADEAAKQAAQSTRILTETTKNAGKRTADGSEFEKRTADGSEFESPKKKAKVE

SEQ ID NO: 1683 - protein, 2125 aa, synthetic construct
MPAAKRVKLDGGDKKYSIGLDIGTNSVGWAVITDEYKVPSKKFKVLGNTDRHSIKKNLIGALLFDSGETAEATRLKRTARRRYTRRKNRICYLQEIFSNEMAKVDDSFFHRLEESFLVEEDKKHERHPIFGNIVDEVAYHEKYPTIYHLRKKLVDSTDKADLRLIYLALAHMIKFRGHFLIEGDLNPDNSDVDKLFIQLVQTYNQLFEENPINASGVDAKAILSARLSKSRRLENLIAQLPGEKKNGLFGNLIALSLGLTPNFKSNFDLAEDAKLQLSKDTYDDDLDNLLAQIGDQYADLFLAAKNLSDAILLSDILRVNTEITKAPLSASMIKRYDEHHQDLTLLKALVRQQLPEKYKEIFFDQSKNGYAGYIDGGASQEEFYKFIKPILEKMDGTEELLVKLNREDLLRKQRTFDNGSIPHQIHLGELHAILRRQEDFYPFLKDNREKIEKILTFRIPYYVGPLARGNSRFAWMTRKSEETITPWNFEEVVDKGASAQSFIERMTNFDKNLPNEKVLPKHSLLYEYFTVYNELTKVKYVTEGMRKPAFLSGEQKKAIVDLLFKTNRKVTVKQLKEDYFKKIECFDSVEISGVEDRFNASLGTYHDLLKIIKDKDFLDNEENEDILEDIVLTLTLFEDREMIEERLKTYAHLFDDKVMKQLKRRRYTGWGRLSRKLINGIRDKQSGKTILDFLKSDGFANRNFMQLIHDDSLTFKEDIQKAQVSGQGDSLHEHIANLAGSPAIKKGILQTVKVVDELVKVMGRHKPENIVIEMARENQTTQKGQKNSRERMKRIEEGIKELGSQILKEHPVENTQLQNEKLYLYYLQNGRDMYVDQELDINRLSDYDVDHIVPQSFLKDDSIDNKVLTRSDKARGKSDNVPSEEVVKKMKNYWRQLLNAKLITQRKFDNLTKAERGGLSELDKAGFIKRQLVETRQITKHVAQILDSRMNTKYDENDKLIREVKVITLKSKLVSDFRKDFQFYKVREINNYHHAHDAYLNAVVGTALIKKYPKLESEFVYGDYKVYDVRKMIAKSEQEIGKATAKYFFYSNIMNFFKTEITLANGEIRKRPLIETNGETGEIVWDKGRDFATVRKVLSMPQVNIVKKTEVQTGGFSKESILPKRNSDKLIARKKDWDPKKYGGFDSPTVAYSVLVVAKVEKGKSKKLKSVKELLGITIMERSSFEKNPIDFLEAKGYKEVKKDLIIKLPKYSLFELENGRKRMLASAGELQKGNELALPSKYVNFLYLASHYEKLKGSPEDNEQKQLFVEQHKHYLDEIIEQISEFSKRVILADANLDKVLSAYNKHRDKPIREQAENIIHLFTLTNLGAPAAFKYFDTTIDRKRYTSTKEVLDATLIHQSITGLYETRIDLSQLGGDGGPAPGGSGSSGGLLGRDLLTKLKAQIQFSTEGPQVTWEDRPAMCLVLNLEEEYRLHEKPVPPSIDPSWLQLFPMVWAEKAGMGLANQVPPVVVELKSDASPVAVRQYPMSKEAREGIRPHIQRFLDLGILVPCQSPWNTPLLPVKKPGTNDYRPVQDLREVNKRVQDIHPTVPNPYNLLSSLPPSHTWYSVLDLKDAFFCLKLHPNSQPLFAFEWRDPEKGNTGQLTWTRLPQGFKNSPTLFNEALHRDLASFRALNPQVVMLQYVDDLLVAAPTYRDCKEGTRRLLQELSKLGYRVSAKKAQLCREEVTYLGYLLKGGKRWLTPARKATVMKIPTPTTPRQVREFLGKAGFCRLFIPGFASLAAPLYPLTRPKVPFTWTEAHQEAFGRIKEALLSAPALALPDLTKPFALYVDEKEGVARGVLTQTLGPWRRPVAYLSKKLDPVASGWPTCLKAIAAVALLLKDADKLTLGQNVLVIAPHNLESIVRQPPDRWMTNARMTHYQSLLLNERVSFAPPAILNPATLLPVESDDTPIHICSEILAEETGTRPDLRDQPLPGVPAWYTDGSSFIMDGRRQAGAAIVDNKRTVWASNLPEGTSAQKAELIALTQALRLAEGKSINIYTDSRYAFATAHVHGAIYKQRGWLTSAGKDIKNKEEILALLEAIHLPKRVAIIHCPGHQRGTDPVATGNRKADEAAKQAAQSTRILTETTKNAGKRTADGSEFEKRTADGSEFESPKKKAKVE

SEQ ID NO: 1684 - protein, 2127 aa, synthetic construct
MPAAKRVKLDGGDKKYSIGLDIGTNSVGWAVITDEYKVPSKKFKVLGNTDRHSIKKNLIGALLFDSGETAEATRLKRTARRRYTRRKNRICYLQEIFSNEMAKVDDSFFHRLEESFLVEEDKKHERHPIFGNIVDEVAYHEKYPTIYHLRKKLVDSTDKADLRLIYLALAHMIKFRGHFLIEGDLNPDNSDVDKLFIQLVQTYNQLFEENPINASGVDAKAILSARLSKSRRLENLIAQLPGEKKNGLFGNLIALSLGLTPNFKSNFDLAEDAKLQLSKDTYDDDLDNLLAQIGDQYADLFLAAKNLSDAILLSDILRVNTEITKAPLSASMIKRYDEHHQDLTLLKALVRQQLPEKYKEIFFDQSKNGYAGYIDGGASQEEFYKFIKPILEKMDGTEELLVKLNREDLLRKQRTFDNGSIPHQIHLGELHAILRRQEDFYPFLKDNREKIEKILTFRIPYYVGPLARGNSRFAWMTRKSEETITPWNFEEVVDKGASAQSFIERMTNFDKNLPNEKVLPKHSLLYEYFTVYNELTKVKYVTEGMRKPAFLSGEQKKAIVDLLFKTNRKVTVKQLKEDYFKKIECFDSVEISGVEDRFNASLGTYHDLLKIIKDKDFLDNEENEDILEDIVLTLTLFEDREMIEERLKTYAHLFDDKVMKQLKRRRYTGWGRLSRKLINGIRDKQSGKTILDFLKSDGFANRNFMQLIHDDSLTFKEDIQKAQVSGQGDSLHEHIANLAGSPAIKKGILQTVKVVDELVKVMGRHKPENIVIEMARENQTTQKGQKNSRERMKRIEEGIKELGSQILKEHPVENTQLQNEKLYLYYLQNGRDMYVDQELDINRLSDYDVDHIVPQSFLKDDSIDNKVLTRSDKARGKSDNVPSEEVVKKMKNYWRQLLNAKLITQRKFDNLTKAERGGLSELDKAGFIKRQLVETRQITKHVAQILDSRMNTKYDENDKLIREVKVITLKSKLVSDFRKDFQFYKVREINNYHHAHDAYLNAVVGTALIKKYPKLESEFVYGDYKVYDVRKMIAKSEQEIGKATAKYFFYSNIMNFFKTEITLANGEIRKRPLIETNGETGEIVWDKGRDFATVRKVLSMPQVNIVKKTEVQTGGFSKESILPKRNSDKLIARKKDWDPKKYGGFDSPTVAYSVLVVAKVEKGKSKKLKSVKELLGITIMERSSFEKNPIDFLEAKGYKEVKKDLIIKLPKYSLFELENGRKRMLASAGELQKGNELALPSKYVNFLYLASHYEKLKGSPEDNEQKQLFVEQHKHYLDEIIEQISEFSKRVILADANLDKVLSAYNKHRDKPIREQAENIIHLFTLTNLGAPAAFKYFDTTIDRKRYTSTKEVLDATLIHQSITGLYETRIDLSQLGGDGGPAPAPAPAPAPGGLLGRDLLTKLKAQIQFSTEGPQVTWEDRPAMCLVLNLEEEYRLHEKPVPPSIDPSWLQLFPMVWAEKAGMGLANQVPPVVVELKSDASPVAVRQYPMSKEAREGIRPHIQRFLDLGILVPCQSPWNTPLLPVKKPGTNDYRPVQDLREVNKRVQDIHPTVPNPYNLLSSLPPSHTWYSVLDLKDAFFCLKLHPNSQPLFAFEWRDPEKGNTGQLTWTRLPQGFKNSPTLFNEALHRDLASFRALNPQVVMLQYVDDLLVAAPTYRDCKEGTRRLLQELSKLGYRVSAKKAQLCREEVTYLGYLLKGGKRWLTPARKATVMKIPTPTTPRQVREFLGKAGFCRLFIPGFASLAAPLYPLTRPKVPFTWTEAHQEAFGRIKEALLSAPALALPDLTKPFALYVDEKEGVARGVLTQTLGPWRRPVAYLSKKLDPVASGWPTCLKAIAAVALLLKDADKLTLGQNVLVIAPHNLESIVRQPPDRWMTNARMTHYQSLLLNERVSFAPPAILNPATLLPVESDDTPIHICSEILAEETGTRPDLRDQPLPGVPAWYTDGSSFIMDGRRQAGAAIVDNKRTVWASNLPEGTSAQKAELIALTQALRLAEGKSINIYTDSRYAFATAHVHGAIYKQRGWLTSAGKDIKNKEEILALLEAIHLPKRVAIIHCPGHQRGTDPVATGNRKADEAAKQAAQSTRILTETTKNAGKRTADGSEFEKRTADGSEFESPKKKAKVE

SEQ ID NO: 1685 - protein, 2127 aa, synthetic construct
MPAAKRVKLDGGDKKYSIGLDIGTNSVGWAVITDEYKVPSKKFKVLGNTDRHSIKKNLIGALLFDSGETAEATRLKRTARRRYTRRKNRICYLQEIFSNEMAKVDDSFFHRLEESFLVEEDKKHERHPIFGNIVDEVAYHEKYPTIYHLRKKLVDSTDKADLRLIYLALAHMIKFRGHFLIEGDLNPDNSDVDKLFIQLVQTYNQLFEENPINASGVDAKAILSARLSKSRRLENLIAQLPGEKKNGLFGNLIALSLGLTPNFKSNFDLAEDAKLQLSKDTYDDDLDNLLAQIGDQYADLFLAAKNLSDAILLSDILRVNTEITKAPLSASMIKRYDEHHQDLTLLKALVRQQLPEKYKEIFFDQSKNGYAGYIDGGASQEEFYKFIKPILEKMDGTEELLVKLNREDLLRKQRTFDNGSIPHQIHLGELHAILRRQEDFYPFLKDNREKIEKILTFRIPYYVGPLARGNSRFAWMTRKSEETITPWNFEEVVDKGASAQSFIERMTNFDKNLPNEKVLPKHSLLYEYFTVYNELTKVKYVTEGMRKPAFLSGEQKKAIVDLLFKTNRKVTVKQLKEDYFKKIECFDSVEISGVEDRFNASLGTYHDLLKIIKDKDFLDNEENEDILEDIVLTLTLFEDREMIEERLKTYAHLFDDKVMKQLKRRRYTGWGRLSRKLINGIRDKQSGKTILDFLKSDGFANRNFMQLIHDDSLTFKEDIQKAQVSGQGDSLHEHIANLAGSPAIKKGILQTVKVVDELVKVMGRHKPENIVIEMARENQTTQKGQKNSRERMKRIEEGIKELGSQILKEHPVENTQLQNEKLYLYYLQNGRDMYVDQELDINRLSDYDVDHIVPQSFLKDDSIDNKVLTRSDKARGKSDNVPSEEVVKKMKNYWRQLLNAKLITQRKFDNLTKAERGGLSELDKAGFIKRQLVETRQITKHVAQILDSRMNTKYDENDKLIREVKVITLKSKLVSDFRKDFQFYKVREINNYHHAHDAYLNAVVGTALIKKYPKLESEFVYGDYKVYDVRKMIAKSEQEIGKATAKYFFYSNIMNFFKTEITLANGEIRKRPLIETNGETGEIVWDKGRDFATVRKVLSMPQVNIVKKTEVQTGGFSKESILPKRNSDKLIARKKDWDPKKYGGFDSPTVAYSVLVVAKVEKGKSKKLKSVKELLGITIMERSSFEKNPIDFLEAKGYKEVKKDLIIKLPKYSLFELENGRKRMLASAGELQKGNELALPSKYVNFLYLASHYEKLKGSPEDNEQKQLFVEQHKHYLDEIIEQISEFSKRVILADANLDKVLSAYNKHRDKPIREQAENIIHLFTLTNLGAPAAFKYFDTTIDRKRYTSTKEVLDATLIHQSITGLYETRIDLSQLGGDGGEAAAKPAPGGGGGLLGRDLLTKLKAQIQFSTEGPQVTWEDRPAMCLVLNLEEEYRLHEKPVPPSIDPSWLQLFPMVWAEKAGMGLANQVPPVVVELKSDASPVAVRQYPMSKEAREGIRPHIQRFLDLGILVPCQSPWNTPLLPVKKPGTNDYRPVQDLREVNKRVQDIHPTVPNPYNLLSSLPPSHTWYSVLDLKDAFFCLKLHPNSQPLFAFEWRDPEKGNTGQLTWTRLPQGFKNSPTLFNEALHRDLASFRALNPQVVMLQYVDDLLVAAPTYRDCKEGTRRLLQELSKLGYRVSAKKAQLCREEVTYLGYLLKGGKRWLTPARKATVMKIPTPTTPRQVREFLGKAGFCRLFIPGFASLAAPLYPLTRPKVPFTWTEAHQEAFGRIKEALLSAPALALPDLTKPFALYVDEKEGVARGVLTQTLGPWRRPVAYLSKKLDPVASGWPTCLKAIAAVALLLKDADKLTLGQNVLVIAPHNLESIVRQPPDRWMTNARMTHYQSLLLNERVSFAPPAILNPATLLPVESDDTPIHICSEILAEETGTRPDLRDQPLPGVPAWYTDGSSFIMDGRRQAGAAIVDNKRTVWASNLPEGTSAQKAELIALTQALRLAEGKSINIYTDSRYAFATAHVHGAIYKQRGWLTSAGKDIKNKEEILALLEAIHLPKRVAIIHCPGHQRGTDPVATGNRKADEAAKQAAQSTRILTETTKNAGKRTADGSEFEKRTADGSEFESPKKKAKVE

SEQ ID NO: 1686 - protein, 2125 aa, synthetic construct
MPAAKRVKLDGGDKKYSIGLDIGTNSVGWAVITDEYKVPSKKFKVLGNTDRHSIKKNLIGALLFDSGETAEATRLKRTARRRYTRRKNRICYLQEIFSNEMAKVDDSFFHRLEESFLVEEDKKHERHPIFGNIVDEVAYHEKYPTIYHLRKKLVDSTDKADLRLIYLALAHMIKFRGHFLIEGDLNPDNSDVDKLFIQLVQTYNQLFEENPINASGVDAKAILSARLSKSRRLENLIAQLPGEKKNGLFGNLIALSLGLTPNFKSNFDLAEDAKLQLSKDTYDDDLDNLLAQIGDQYADLFLAAKNLSDAILLSDILRVNTEITKAPLSASMIKRYDEHHQDLTLLKALVRQQLPEKYKEIFFDQSKNGYAGYIDGGASQEEFYKFIKPILEKMDGTEELLVKLNREDLLRKQRTFDNGSIPHQIHLGELHAILRRQEDFYPFLKDNREKIEKILTFRIPYYVGPLARGNSRFAWMTRKSEETITPWNFEEVVDKGASAQSFIERMTNFDKNLPNEKVLPKHSLLYEYFTVYNELTKVKYVTEGMRKPAFLSGEQKKAIVDLLFKTNRKVTVKQLKEDYFKKIECFDSVEISGVEDRFNASLGTYHDLLKIIKDKDFLDNEENEDILEDIVLTLTLFEDREMIEERLKTYAHLFDDKVMKQLKRRRYTGWGRLSRKLINGIRDKQSGKTILDFLKSDGFANRNFMQLIHDDSLTFKEDIQKAQVSGQGDSLHEHIANLAGSPAIKKGILQTVKVVDELVKVMGRHKPENIVIEMARENQTTQKGQKNSRERMKRIEEGIKELGSQILKEHPVENTQLQNEKLYLYYLQNGRDMYVDQELDINRLSDYDVDHIVPQSFLKDDSIDNKVLTRSDKARGKSDNVPSEEVVKKMKNYWRQLLNAKLITQRKFDNLTKAERGGLSELDKAGFIKRQLVETRQITKHVAQILDSRMNTKYDENDKLIREVKVITLKSKLVSDFRKDFQFYKVREINNYHHAHDAYLNAVVGTALIKKYPKLESEFVYGDYKVYDVRKMIAKSEQEIGKATAKYFFYSNIMNFFKTEITLANGEIRKRPLIETNGETGEIVWDKGRDFATVRKVLSMPQVNIVKKTEVQTGGFSKESILPKRNSDKLIARKKDWDPKKYGGFDSPTVAYSVLVVAKVEKGKSKKLKSVKELLGITIMERSSFEKNPIDFLEAKGYKEVKKDLIIKLPKYSLFELENGRKRMLASAGELQKGNELALPSKYVNFLYLASHYEKLKGSPEDNEQKQLFVEQHKHYLDEIIEQISEFSKRVILADANLDKVLSAYNKHRDKPIREQAENIIHLFTLTNLGAPAAFKYFDTTIDRKRYTSTKEVLDATLIHQSITGLYETRIDLSQLGGDGGGGSGGSGGSGGLLGRDLLTKLKAQIQFSTEGPQVTWEDRPAMCLVLNLEEEYRLHEKPVPPSIDPSWLQLFPMVWAEKAGMGLANQVPPVVVELKSDASPVAVRQYPMSKEAREGIRPHIQRFLDLGILVPCQSPWNTPLLPVKKPGTNDYRPVQDLREVNKRVQDIHPTVPNPYNLLSSLPPSHTWYSVLDLKDAFFCLKLHPNSQPLFAFEWRDPEKGNTGQLTWTRLPQGFKNSPTLFNEALHRDLASFRALNPQVVMLQYVDDLLVAAPTYRDCKEGTRRLLQELSKLGYRVSAKKAQLCREEVTYLGYLLKGGKRWLTPARKATVMKIPTPTTPRQVREFLGKAGFCRLFIPGFASLAAPLYPLTRPKVPFTWTEAHQEAFGRIKEALLSAPALALPDLTKPFALYVDEKEGVARGVLTQTLGPWRRPVAYLSKKLDPVASGWPTCLKAIAAVALLLKDADKLTLGQNVLVIAPHNLESIVRQPPDRWMTNARMTHYQSLLLNERVSFAPPAILNPATLLPVESDDTPIHICSEILAEETGTRPDLRDQPLPGVPAWYTDGSSFIMDGRRQAGAAIVDNKRTVWASNLPEGTSAQKAELIALTQALRLAEGKSINIYTDSRYAFATAHVHGAIYKQRGWLTSAGKDIKNKEEILALLEAIHLPKRVAIIHCPGHQRGTDPVATGNRKADEAAKQAAQSTRILTETTKNAGKRTADGSEFEKRTADGSEFESPKKKAKVE

SEQ ID NO: 1687 - protein, 2127 aa, synthetic construct
MPAAKRVKLDGGDKKYSIGLDIGTNSVGWAVITDEYKVPSKKFKVLGNTDRHSIKKNLIGALLFDSGETAEATRLKRTARRRYTRRKNRICYLQEIFSNEMAKVDDSFFHRLEESFLVEEDKKHERHPIFGNIVDEVAYHEKYPTIYHLRKKLVDSTDKADLRLIYLALAHMIKFRGHFLIEGDLNPDNSDVDKLFIQLVQTYNQLFEENPINASGVDAKAILSARLSKSRRLENLIAQLPGEKKNGLFGNLIALSLGLTPNFKSNFDLAEDAKLQLSKDTYDDDLDNLLAQIGDQYADLFLAAKNLSDAILLSDILRVNTEITKAPLSASMIKRYDEHHQDLTLLKALVRQQLPEKYKEIFFDQSKNGYAGYIDGGASQEEFYKFIKPILEKMDGTEELLVKLNREDLLRKQRTFDNGSIPHQIHLGELHAILRRQEDFYPFLKDNREKIEKILTFRIPYYVGPLARGNSRFAWMTRKSEETITPWNFEEVVDKGASAQSFIERMTNFDKNLPNEKVLPKHSLLYEYFTVYNELTKVKYVTEGMRKPAFLSGEQKKAIVDLLFKTNRKVTVKQLKEDYFKKIECFDSVEISGVEDRFNASLGTYHDLLKIIKDKDFLDNEENEDILEDIVLTLTLFEDREMIEERLKTYAHLFDDKVMKQLKRRRYTGWGRLSRKLINGIRDKQSGKTILDFLKSDGFANRNFMQLIHDDSLTFKEDIQKAQVSGQGDSLHEHIANLAGSPAIKKGILQTVKVVDELVKVMGRHKPENIVIEMARENQTTQKGQKNSRERMKRIEEGIKELGSQILKEHPVENTQLQNEKLYLYYLQNGRDMYVDQELDINRLSDYDVDHIVPQSFLKDDSIDNKVLTRSDKARGKSDNVPSEEVVKKMKNYWRQLLNAKLITQRKFDNLTKAERGGLSELDKAGFIKRQLVETRQITKHVAQILDSRMNTKYDENDKLIREVKVITLKSKLVSDFRKDFQFYKVREINNYHHAHDAYLNAVVGTALIKKYPKLESEFVYGDYKVYDVRKMIAKSEQEIGKATAKYFFYSNIMNFFKTEITLANGEIRKRPLIETNGETGEIVWDKGRDFATVRKVLSMPQVNIVKKTEVQTGGFSKESILPKRNSDKLIARKKDWDPKKYGGFDSPTVAYSVLVVAKVEKGKSKKLKSVKELLGITIMERSSFEKNPIDFLEAKGYKEVKKDLIIKLPKYSLFELENGRKRMLASAGELQKGNELALPSKYVNFLYLASHYEKLKGSPEDNEQKQLFVEQHKHYLDEIIEQISEFSKRVILADANLDKVLSAYNKHRDKPIREQAENIIHLFTLTNLGAPAAFKYFDTTIDRKRYTSTKEVLDATLIHQSITGLYETRIDLSQLGGDGGEAAAKPAPGSSGGLLGRDLLTKLKAQIQFSTEGPQVTWEDRPAMCLVLNLEEEYRLHEKPVPPSIDPSWLQLFPMVWAEKAGMGLANQVPPVVVELKSDASPVAVRQYPMSKEAREGIRPHIQRFLDLGILVPCQSPWNTPLLPVKKPGTNDYRPVQDLREVNKRVQDIHPTVPNPYNLLSSLPPSHTWYSVLDLKDAFFCLKLHPNSQPLFAFEWRDPEKGNTGQLTWTRLPQGFKNSPTLFNEALHRDLASFRALNPQVVMLQYVDDLLVAAPTYRDCKEGTRRLLQELSKLGYRVSAKKAQLCREEVTYLGYLLKGGKRWLTPARKATVMKIPTPTTPRQVREFLGKAGFCRLFIPGFASLAAPLYPLTRPKVPFTWTEAHQEAFGRIKEALLSAPALALPDLTKPFALYVDEKEGVARGVLTQTLGPWRRPVAYLSKKLDPVASGWPTCLKAIAAVALLLKDADKLTLGQNVLVIAPHNLESIVRQPPDRWMTNARMTHYQSLLLNERVSFAPPAILNPATLLPVESDDTPIHICSEILAEETGTRPDLRDQPLPGVPAWYTDGSSFIMDGRRQAGAAIVDNKRTVWASNLPEGTSAQKAELIALTQALRLAEGKSINIYTDSRYAFATAHVHGAIYKQRGWLTSAGKDIKNKEEILALLEAIHLPKRVAIIHCPGHQRGTDPVATGNRKADEAAKQAAQSTRILTETTKNAGKRTADGSEFEKRTADGSEFESPKKKAKVE

SEQ ID NO: 1688 - protein, 2127 aa, synthetic construct
MPAAKRVKLDGGDKKYSIGLDIGTNSVGWAVITDEYKVPSKKFKVLGNTDRHSIKKNLIGALLFDSGETAEATRLKRTARRRYTRRKNRICYLQEIFSNEMAKVDDSFFHRLEESFLVEEDKKHERHPIFGNIVDEVAYHEKYPTIYHLRKKLVDSTDKADLRLIYLALAHMIKFRGHFLIEGDLNPDNSDVDKLFIQLVQTYNQLFEENPINASGVDAKAILSARLSKSRRLENLIAQLPGEKKNGLFGNLIALSLGLTPNFKSNFDLAEDAKLQLSKDTYDDDLDNLLAQIGDQYADLFLAAKNLSDAILLSDILRVNTEITKAPLSASMIKRYDEHHQDLTLLKALVRQQLPEKYKEIFFDQSKNGYAGYIDGGASQEEFYKFIKPILEKMDGTEELLVKLNREDLLRKQRTFDNGSIPHQIHLGELHAILRRQEDFYPFLKDNREKIEKILTFRIPYYVGPLARGNSRFAWMTRKSEETITPWNFEEVVDKGASAQSFIERMTNFDKNLPNEKVLPKHSLLYEYFTVYNELTKVKYVTEGMRKPAFLSGEQKKAIVDLLFKTNRKVTVKQLKEDYFKKIECFDSVEISGVEDRFNASLGTYHDLLKIIKDKDFLDNEENEDILEDIVLTLTLFEDREMIEERLKTYAHLFDDKVMKQLKRRRYTGWGRLSRKLINGIRDKQSGKTILDFLKSDGFANRNFMQLIHDDSLTFKEDIQKAQVSGQGDSLHEHIANLAGSPAIKKGILQTVKVVDELVKVMGRHKPENIVIEMARENQTTQKGQKNSRERMKRIEEGIKELGSQILKEHPVENTQLQNEKLYLYYLQNGRDMYVDQELDINRLSDYDVDHIVPQSFLKDDSIDNKVLTRSDKARGKSDNVPSEEVVKKMKNYWRQLLNAKLITQRKFDNLTKAERGGLSELDKAGFIKRQLVETRQITKHVAQILDSRMNTKYDENDKLIREVKVITLKSKLVSDFRKDFQFYKVREINNYHHAHDAYLNAVVGTALIKKYPKLESEFVYGDYKVYDVRKMIAKSEQEIGKATAKYFFYSNIMNFFKTEITLANGEIRKRPLIETNGETGEIVWDKGRDFATVRKVLSMPQVNIVKKTEVQTGGFSKESILPKRNSDKLIARKKDWDPKKYGGFDSPTVAYSVLVVAKVEKGKSKKLKSVKELLGITIMERSSFEKNPIDFLEAKGYKEVKKDLIIKLPKYSLFELENGRKRMLASAGELQKGNELALPSKYVNFLYLASHYEKLKGSPEDNEQKQLFVEQHKHYLDEIIEQISEFSKRVILADANLDKVLSAYNKHRDKPIREQAENIIHLFTLTNLGAPAAFKYFDTTIDRKRYTSTKEVLDATLIHQSITGLYETRIDLSQLGGDGGGGGEAAAKGSSGGLLGRDLLTKLKAQIQFSTEGPQVTWEDRPAMCLVLNLEEEYRLHEKPVPPSIDPSWLQLFPMVWAEKAGMGLANQVPPVVVELKSDASPVAVRQYPMSKEAREGIRPHIQRFLDLGILVPCQSPWNTPLLPVKKPGTNDYRPVQDLREVNKRVQDIHPTVPNPYNLLSSLPPSHTWYSVLDLKDAFFCLKLHPNSQPLFAFEWRDPEKGNTGQLTWTRLPQGFKNSPTLFNEALHRDLASFRALNPQVVMLQYVDDLLVAAPTYRDCKEGTRRLLQELSKLGYRVSAKKAQLCREEVTYLGYLLKGGKRWLTPARKATVMKIPTPTTPRQVREFLGKAGFCRLFIPGFASLAAPLYPLTRPKVPFTWTEAHQEAFGRIKEALLSAPALALPDLTKPFALYVDEKEGVARGVLTQTLGPWRRPVAYLSKKLDPVASGWPTCLKAIAAVALLLKDADKLTLGQNVLVIAPHNLESIVRQPPDRWMTNARMTHYQSLLLNERVSFAPPAILNPATLLPVESDDTPIHICSEILAEETGTRPDLRDQPLPGVPAWYTDGSSFIMDGRRQAGAAIVDNKRTVWASNLPEGTSAQKAELIALTQALRLAEGKSINIYTDSRYAFATAHVHGAIYKQRGWLTSAGKDIKNKEEILALLEAIHLPKRVAIIHCPGHQRGTDPVATGNRKADEAAKQAAQSTRILTETTKNAGKRTADGSEFEKRTADGSEFESPKKKAKVE

SEQ ID NO: 1689 - protein, 2121 aa, synthetic construct
MPAAKRVKLDGGDKKYSIGLDIGTNSVGWAVITDEYKVPSKKFKVLGNTDRHSIKKNLIGALLFDSGETAEATRLKRTARRRYTRRKNRICYLQEIFSNEMAKVDDSFFHRLEESFLVEEDKKHERHPIFGNIVDEVAYHEKYPTIYHLRKKLVDSTDKADLRLIYLALAHMIKFRGHFLIEGDLNPDNSDVDKLFIQLVQTYNQLFEENPINASGVDAKAILSARLSKSRRLENLIAQLPGEKKNGLFGNLIALSLGLTPNFKSNFDLAEDAKLQLSKDTYDDDLDNLLAQIGDQYADLFLAAKNLSDAILLSDILRVNTEITKAPLSASMIKRYDEHHQDLTLLKALVRQQLPEKYKEIFFDQSKNGYAGYIDGGASQEEFYKFIKPILEKMDGTEELLVKLNREDLLRKQRTFDNGSIPHQIHLGELHAILRRQEDFYPFLKDNREKIEKILTFRIPYYVGPLARGNSRFAWMTRKSEETITPWNFEEVVDKGASAQSFIERMTNFDKNLPNEKVLPKHSLLYEYFTVYNELTKVKYVTEGMRKPAFLSGEQKKAIVDLLFKTNRKVTVKQLKEDYFKKIECFDSVEISGVEDRFNASLGTYHDLLKIIKDKDFLDNEENEDILEDIVLTLTLFEDREMIEERLKTYAHLFDDKVMKQLKRRRYTGWGRLSRKLINGIRDKQSGKTILDFLKSDGFANRNFMQLIHDDSLTFKEDIQKAQVSGQGDSLHEHIANLAGSPAIKKGILQTVKVVDELVKVMGRHKPENIVIEMARENQTTQKGQKNSRERMKRIEEGIKELGSQILKEHPVENTQLQNEKLYLYYLQNGRDMYVDQELDINRLSDYDVDHIVPQSFLKDDSIDNKVLTRSDKARGKSDNVPSEEVVKKMKNYWRQLLNAKLITQRKFDNLTKAERGGLSELDKAGFIKRQLVETRQITKHVAQILDSRMNTKYDENDKLIREVKVITLKSKLVSDFRKDFQFYKVREINNYHHAHDAYLNAVVGTALIKKYPKLESEFVYGDYKVYDVRKMIAKSEQEIGKATAKYFFYSNIMNFFKTEITLANGEIRKRPLIETNGETGEIVWDKGRDFATVRKVLSMPQVNIVKKTEVQTGGFSKESILPKRNSDKLIARKKDWDPKKYGGFDSPTVAYSVLVVAKVEKGKSKKLKSVKELLGITIMERSSFEKNPIDFLEAKGYKEVKKDLIIKLPKYSLFELENGRKRMLASAGELQKGNELALPSKYVNFLYLASHYEKLKGSPEDNEQKQLFVEQHKHYLDEIIEQISEFSKRVILADANLDKVLSAYNKHRDKPIREQAENIIHLFTLTNLGAPAAFKYFDTTIDRKRYTSTKEVLDATLIHQSITGLYETRIDLSQLGGDGGEAAAKGGLLGRDLLTKLKAQIQFSTEGPQVTWEDRPAMCLVLNLEEEYRLHEKPVPPSIDPSWLQLFPMVWAEKAGMGLANQVPPVVVELKSDASPVAVRQYPMSKEAREGIRPHIQRFLDLGILVPCQSPWNTPLLPVKKPGTNDYRPVQDLREVNKRVQDIHPTVPNPYNLLSSLPPSHTWYSVLDLKDAFFCLKLHPNSQPLFAFEWRDPEKGNTGQLTWTRLPQGFKNSPTLFNEALHRDLASFRALNPQVVMLQYVDDLLVAAPTYRDCKEGTRRLLQELSKLGYRVSAKKAQLCREEVTYLGYLLKGGKRWLTPARKATVMKIPTPTTPRQVREFLGKAGFCRLFIPGFASLAAPLYPLTRPKVPFTWTEAHQEAFGRIKEALLSAPALALPDLTKPFALYVDEKEGVARGVLTQTLGPWRRPVAYLSKKLDPVASGWPTCLKAIAAVALLLKDADKLTLGQNVLVIAPHNLESIVRQPPDRWMTNARMTHYQSLLLNERVSFAPPAILNPATLLPVESDDTPIHICSEILAEETGTRPDLRDQPLPGVPAWYTDGSSFIMDGRRQAGAAIVDNKRTVWASNLPEGTSAQKAELIALTQALRLAEGKSINIYTDSRYAFATAHVHGAIYKQRGWLTSAGKDIKNKEEILALLEAIHLPKRVAIIHCPGHQRGTDPVATGNRKADEAAKQAAQSTRILTETTKNAGKRTADGSEFEKRTADGSEFESPKKKAKVE

SEQ ID NO: 1690 - protein, 2127 aa, synthetic construct
MPAAKRVKLDGGDKKYSIGLDIGTNSVGWAVITDEYKVPSKKFKVLGNTDRHSIKKNLIGALLFDSGETAEATRLKRTARRRYTRRKNRICYLQEIFSNEMAKVDDSFFHRLEESFLVEEDKKHERHPIFGNIVDEVAYHEKYPTIYHLRKKLVDSTDKADLRLIYLALAHMIKFRGHFLIEGDLNPDNSDVDKLFIQLVQTYNQLFEENPINASGVDAKAILSARLSKSRRLENLIAQLPGEKKNGLFGNLIALSLGLTPNFKSNFDLAEDAKLQLSKDTYDDDLDNLLAQIGDQYADLFLAAKNLSDAILLSDILRVNTEITKAPLSASMIKRYDEHHQDLTLLKALVRQQLPEKYKEIFFDQSKNGYAGYIDGGASQEEFYKFIKPILEKMDGTEELLVKLNREDLLRKQRTFDNGSIPHQIHLGELHAILRRQEDFYPFLKDNREKIEKILTFRIPYYVGPLARGNSRFAWMTRKSEETITPWNFEEVVDKGASAQSFIERMTNFDKNLPNEKVLPKHSLLYEYFTVYNELTKVKYVTEGMRKPAFLSGEQKKAIVDLLFKTNRKVTVKQLKEDYFKKIECFDSVEISGVEDRFNASLGTYHDLLKIIKDKDFLDNEENEDILEDIVLTLTLFEDREMIEERLKTYAHLFDDKVMKQLKRRRYTGWGRLSRKLINGIRDKQSGKTILDFLKSDGFANRNFMQLIHDDSLTFKEDIQKAQVSGQGDSLHEHIANLAGSPAIKKGILQTVKVVDELVKVMGRHKPENIVIEMARENQTTQKGQKNSRERMKRIEEGIKELGSQILKEHPVENTQLQNEKLYLYYLQNGRDMYVDQELDINRLSDYDVDHIVPQSFLKDDSIDNKVLTRSDKARGKSDNVPSEEVVKKMKNYWRQLLNAKLITQRKFDNLTKAERGGLSELDKAGFIKRQLVETRQITKHVAQILDSRMNTKYDENDKLIREVKVITLKSKLVSDFRKDFQFYKVREINNYHHAHDAYLNAVVGTALIKKYPKLESEFVYGDYKVYDVRKMIAKSEQEIGKATAKYFFYSNIMNFFKTEITLANGEIRKRPLIETNGETGEIVWDKGRDFATVRKVLSMPQVNIVKKTEVQTGGFSKESILPKRNSDKLIARKKDWDPKKYGGFDSPTVAYSVLVVAKVEKGKSKKLKSVKELLGITIMERSSFEKNPIDFLEAKGYKEVKKDLIIKLPKYSLFELENGRKRMLASAGELQKGNELALPSKYVNFLYLASHYEKLKGSPEDNEQKQLFVEQHKHYLDEIIEQISEFSKRVILADANLDKVLSAYNKHRDKPIREQAENIIHLFTLTNLGAPAAFKYFDTTIDRKRYTSTKEVLDATLIHQSITGLYETRIDLSQLGGDGGEAAAKGSSGGSGGLLGRDLLTKLKAQIQFSTEGPQVTWEDRPAMCLVLNLEEEYRLHEKPVPPSIDPSWLQLFPMVWAEKAGMGLANQVPPVVVELKSDASPVAVRQYPMSKEAREGIRPHIQRFLDLGILVPCQSPWNTPLLPVKKPGTNDYRPVQDLREVNKRVQDIHPTVPNPYNLLSSLPPSHTWYSVLDLKDAFFCLKLHPNSQPLFAFEWRDPEKGNTGQLTWTRLPQGFKNSPTLFNEALHRDLASFRALNPQVVMLQYVDDLLVAAPTYRDCKEGTRRLLQELSKLGYRVSAKKAQLCREEVTYLGYLLKGGKRWLTPARKATVMKIPTPTTPRQVREFLGKAGFCRLFIPGFASLAAPLYPLTRPKVPFTWTEAHQEAFGRIKEALLSAPALALPDLTKPFALYVDEKEGVARGVLTQTLGPWRRPVAYLSKKLDPVASGWPTCLKAIAAVALLLKDADKLTLGQNVLVIAPHNLESIVRQPPDRWMTNARMTHYQSLLLNERVSFAPPAILNPATLLPVESDDTPIHICSEILAEETGTRPDLRDQPLPGVPAWYTDGSSFIMDGRRQAGAAIVDNKRTVWASNLPEGTSAQKAELIALTQALRLAEGKSINIYTDSRYAFATAHVHGAIYKQRGWLTSAGKDIKNKEEILALLEAIHLPKRVAIIHCPGHQRGTDPVATGNRKADEAAKQAAQSTRILTETTKNAGKRTADGSEFEKRTADGSEFESPKKKAKVE

SEQ ID NO: 1691 - protein, 2125 aa, synthetic construct
MPAAKRVKLDGGDKKYSIGLDIGTNSVGWAVITDEYKVPSKKFKVLGNTDRHSIKKNLIGALLFDSGETAEATRLKRTARRRYTRRKNRICYLQEIFSNEMAKVDDSFFHRLEESFLVEEDKKHERHPIFGNIVDEVAYHEKYPTIYHLRKKLVDSTDKADLRLIYLALAHMIKFRGHFLIEGDLNPDNSDVDKLFIQLVQTYNQLFEENPINASGVDAKAILSARLSKSRRLENLIAQLPGEKKNGLFGNLIALSLGLTPNFKSNFDLAEDAKLQLSKDTYDDDLDNLLAQIGDQYADLFLAAKNLSDAILLSDILRVNTEITKAPLSASMIKRYDEHHQDLTLLKALVRQQLPEKYKEIFFDQSKNGYAGYIDGGASQEEFYKFIKPILEKMDGTEELLVKLNREDLLRKQRTFDNGSIPHQIHLGELHAILRRQEDFYPFLKDNREKIEKILTFRIPYYVGPLARGNSRFAWMTRKSEETITPWNFEEVVDKGASAQSFIERMTNFDKNLPNEKVLPKHSLLYEYFTVYNELTKVKYVTEGMRKPAFLSGEQKKAIVDLLFKTNRKVTVKQLKEDYFKKIECFDSVEISGVEDRFNASLGTYHDLLKIIKDKDFLDNEENEDILEDIVLTLTLFEDREMIEERLKTYAHLFDDKVMKQLKRRRYTGWGRLSRKLINGIRDKQSGKTILDFLKSDGFANRNFMQLIHDDSLTFKEDIQKAQVSGQGDSLHEHIANLAGSPAIKKGILQTVKVVDELVKVMGRHKPENIVIEMARENQTTQKGQKNSRERMKRIEEGIKELGSQILKEHPVENTQLQNEKLYLYYLQNGRDMYVDQELDINRLSDYDVDHIVPQSFLKDDSIDNKVLTRSDKARGKSDNVPSEEVVKKMKNYWRQLLNAKLITQRKFDNLTKAERGGLSELDKAGFIKRQLVETRQITKHVAQILDSRMNTKYDENDKLIREVKVITLKSKLVSDFRKDFQFYKVREINNYHHAHDAYLNAVVGTALIKKYPKLESEFVYGDYKVYDVRKMIAKSEQEIGKATAKYFFYSNIMNFFKTEITLANGEIRKRPLIETNGETGEIVWDKGRDFATVRKVLSMPQVNIVKKTEVQTGGFSKESILPKRNSDKLIARKKDWDPKKYGGFDSPTVAYSVLVVAKVEKGKSKKLKSVKELLGITIMERSSFEKNPIDFLEAKGYKEVKKDLIIKLPKYSLFELENGRKRMLASAGELQKGNELALPSKYVNFLYLASHYEKLKGSPEDNEQKQLFVEQHKHYLDEIIEQISEFSKRVILADANLDKVLSAYNKHRDKPIREQAENIIHLFTLTNLGAPAAFKYFDTTIDRKRYTSTKEVLDATLIHQSITGLYETRIDLSQLGGDGGPAPGGGGSSGGLLGRDLLTKLKAQIQFSTEGPQVTWEDRPAMCLVLNLEEEYRLHEKPVPPSIDPSWLQLFPMVWAEKAGMGLANQVPPVVVELKSDASPVAVRQYPMSKEAREGIRPHIQRFLDLGILVPCQSPWNTPLLPVKKPGTNDYRPVQDLREVNKRVQDIHPTVPNPYNLLSSLPPSHTWYSVLDLKDAFFCLKLHPNSQPLFAFEWRDPEKGNTGQLTWTRLPQGFKNSPTLFNEALHRDLASFRALNPQVVMLQYVDDLLVAAPTYRDCKEGTRRLLQELSKLGYRVSAKKAQLCREEVTYLGYLLKGGKRWLTPARKATVMKIPTPTTPRQVREFLGKAGFCRLFIPGFASLAAPLYPLTRPKVPFTWTEAHQEAFGRIKEALLSAPALALPDLTKPFALYVDEKEGVARGVLTQTLGPWRRPVAYLSKKLDPVASGWPTCLKAIAAVALLLKDADKLTLGQNVLVIAPHNLESIVRQPPDRWMTNARMTHYQSLLLNERVSFAPPAILNPATLLPVESDDTPIHICSEILAEETGTRPDLRDQPLPGVPAWYTDGSSFIMDGRRQAGAAIVDNKRTVWASNLPEGTSAQKAELIALTQALRLAEGKSINIYTDSRYAFATAHVHGAIYKQRGWLTSAGKDIKNKEEILALLEAIHLPKRVAIIHCPGHQRGTDPVATGNRKADEAAKQAAQSTRILTETTKNAGKRTADGSEFEKRTADGSEFESPKKKAKVE

SEQ ID NO: 1692 - protein, 2119 aa, synthetic construct
MPAAKRVKLDGGDKKYSIGLDIGTNSVGWAVITDEYKVPSKKFKVLGNTDRHSIKKNLIGALLFDSGETAEATRLKRTARRRYTRRKNRICYLQEIFSNEMAKVDDSFFHRLEESFLVEEDKKHERHPIFGNIVDEVAYHEKYPTIYHLRKKLVDSTDKADLRLIYLALAHMIKFRGHFLIEGDLNPDNSDVDKLFIQLVQTYNQLFEENPINASGVDAKAILSARLSKSRRLENLIAQLPGEKKNGLFGNLIALSLGLTPNFKSNFDLAEDAKLQLSKDTYDDDLDNLLAQIGDQYADLFLAAKNLSDAILLSDILRVNTEITKAPLSASMIKRYDEHHQDLTLLKALVRQQLPEKYKEIFFDQSKNGYAGYIDGGASQEEFYKFIKPILEKMDGTEELLVKLNREDLLRKQRTFDNGSIPHQIHLGELHAILRRQEDFYPFLKDNREKIEKILTFRIPYYVGPLARGNSRFAWMTRKSEETITPWNFEEVVDKGASAQSFIERMTNFDKNLPNEKVLPKHSLLYEYFTVYNELTKVKYVTEGMRKPAFLSGEQKKAIVDLLFKTNRKVTVKQLKEDYFKKIECFDSVEISGVEDRFNASLGTYHDLLKIIKDKDFLDNEENEDILEDIVLTLTLFEDREMIEERLKTYAHLFDDKVMKQLKRRRYTGWGRLSRKLINGIRDKQSGKTILDFLKSDGFANRNFMQLIHDDSLTFKEDIQKAQVSGQGDSLHEHIANLAGSPAIKKGILQTVKVVDELVKVMGRHKPENIVIEMARENQTTQKGQKNSRERMKRIEEGIKELGSQILKEHPVENTQLQNEKLYLYYLQNGRDMYVDQELDINRLSDYDVDHIVPQSFLKDDSIDNKVLTRSDKARGKSDNVPSEEVVKKMKNYWRQLLNAKLITQRKFDNLTKAERGGLSELDKAGFIKRQLVETRQITKHVAQILDSRMNTKYDENDKLIREVKVITLKSKLVSDFRKDFQFYKVREINNYHHAHDAYLNAVVGTALIKKYPKLESEFVYGDYKVYDVRKMIAKSEQEIGKATAKYFFYSNIMNFFKTEITLANGEIRKRPLIETNGETGEIVWDKGRDFATVRKVLSMPQVNIVKKTEVQTGGFSKESILPKRNSDKLIARKKDWDPKKYGGFDSPTVAYSVLVVAKVEKGKSKKLKSVKELLGITIMERSSFEKNPIDFLEAKGYKEVKKDLIIKLPKYSLFELENGRKRMLASAGELQKGNELALPSKYVNFLYLASHYEKLKGSPEDNEQKQLFVEQHKHYLDEIIEQISEFSKRVILADANLDKVLSAYNKHRDKPIREQAENIIHLFTLTNLGAPAAFKYFDTTIDRKRYTSTKEVLDATLIHQSITGLYETRIDLSQLGGDGGPAPGGLLGRDLLTKLKAQIQFSTEGPQVTWEDRPAMCLVLNLEEEYRLHEKPVPPSIDPSWLQLFPMVWAEKAGMGLANQVPPVVVELKSDASPVAVRQYPMSKEAREGIRPHIQRFLDLGILVPCQSPWNTPLLPVKKPGTNDYRPVQDLREVNKRVQDIHPTVPNPYNLLSSLPPSHTWYSVLDLKDAFFCLKLHPNSQPLFAFEWRDPEKGNTGQLTWTRLPQGFKNSPTLFNEALHRDLASFRALNPQVVMLQYVDDLLVAAPTYRDCKEGTRRLLQELSKLGYRVSAKKAQLCREEVTYLGYLLKGGKRWLTPARKATVMKIPTPTTPRQVREFLGKAGFCRLFIPGFASLAAPLYPLTRPKVPFTWTEAHQEAFGRIKEALLSAPALALPDLTKPFALYVDEKEGVARGVLTQTLGPWRRPVAYLSKKLDPVASGWPTCLKAIAAVALLLKDADKLTLGQNVLVIAPHNLESIVRQPPDRWMTNARMTHYQSLLLNERVSFAPPAILNPATLLPVESDDTPIHICSEILAEETGTRPDLRDQPLPGVPAWYTDGSSFIMDGRRQAGAAIVDNKRTVWASNLPEGTSAQKAELIALTQALRLAEGKSINIYTDSRYAFATAHVHGAIYKQRGWLTSAGKDIKNKEEILALLEAIHLPKRVAIIHCPGHQRGTDPVATGNRKADEAAKQAAQSTRILTETTKNAGKRTADGSEFEKRTADGSEFESPKKKAKVE

SEQ ID NO: 1693 - protein, 2128 aa, synthetic construct
MPAAKRVKLDGGDKKYSIGLDIGTNSVGWAVITDEYKVPSKKFKVLGNTDRHSIKKNLIGALLFDSGETAEATRLKRTARRRYTRRKNRICYLQEIFSNEMAKVDDSFFHRLEESFLVEEDKKHERHPIFGNIVDEVAYHEKYPTIYHLRKKLVDSTDKADLRLIYLALAHMIKFRGHFLIEGDLNPDNSDVDKLFIQLVQTYNQLFEENPINASGVDAKAILSARLSKSRRLENLIAQLPGEKKNGLFGNLIALSLGLTPNFKSNFDLAEDAKLQLSKDTYDDDLDNLLAQIGDQYADLFLAAKNLSDAILLSDILRVNTEITKAPLSASMIKRYDEHHQDLTLLKALVRQQLPEKYKEIFFDQSKNGYAGYIDGGASQEEFYKFIKPILEKMDGTEELLVKLNREDLLRKQRTFDNGSIPHQIHLGELHAILRRQEDFYPFLKDNREKIEKILTFRIPYYVGPLARGNSRFAWMTRKSEETITPWNFEEVVDKGASAQSFIERMTNFDKNLPNEKVLPKHSLLYEYFTVYNELTKVKYVTEGMRKPAFLSGEQKKAIVDLLFKTNRKVTVKQLKEDYFKKIECFDSVEISGVEDRFNASLGTYHDLLKIIKDKDFLDNEENEDILEDIVLTLTLFEDREMIEERLKTYAHLFDDKVMKQLKRRRYTGWGRLSRKLINGIRDKQSGKTILDFLKSDGFANRNFMQLIHDDSLTFKEDIQKAQVSGQGDSLHEHIANLAGSPAIKKGILQTVKVVDELVKVMGRHKPENIVIEMARENQTTQKGQKNSRERMKRIEEGIKELGSQILKEHPVENTQLQNEKLYLYYLQNGRDMYVDQELDINRLSDYDVDHIVPQSFLKDDSIDNKVLTRSDKARGKSDNVPSEEVVKKMKNYWRQLLNAKLITQRKFDNLTKAERGGLSELDKAGFIKRQLVETRQITKHVAQILDSRMNTKYDENDKLIREVKVITLKSKLVSDFRKDFQFYKVREINNYHHAHDAYLNAVVGTALIKKYPKLESEFVYGDYKVYDVRKMIAKSEQEIGKATAKYFFYSNIMNFFKTEITLANGEIRKRPLIETNGETGEIVWDKGRDFATVRKVLSMPQVNIVKKTEVQTGGFSKESILPKRNSDKLIARKKDWDPKKYGGFDSPTVAYSVLVVAKVEKGKSKKLKSVKELLGITIMERSSFEKNPIDFLEAKGYKEVKKDLIIKLPKYSLFELENGRKRMLASAGELQKGNELALPSKYVNFLYLASHYEKLKGSPEDNEQKQLFVEQHKHYLDEIIEQISEFSKRVILADANLDKVLSAYNKHRDKPIREQAENIIHLFTLTNLGAPAAFKYFDTTIDRKRYTSTKEVLDATLIHQSITGLYETRIDLSQLGGDGGGSAGSAAGSGEFGGLLGRDLLTKLKAQIQFSTEGPQVTWEDRPAMCLVLNLEEEYRLHEKPVPPSIDPSWLQLFPMVWAEKAGMGLANQVPPVVVELKSDASPVAVRQYPMSKEAREGIRPHIQRFLDLGILVPCQSPWNTPLLPVKKPGTNDYRPVQDLREVNKRVQDIHPTVPNPYNLLSSLPPSHTWYSVLDLKDAFFCLKLHPNSQPLFAFEWRDPEKGNTGQLTWTRLPQGFKNSPTLFNEALHRDLASFRALNPQVVMLQYVDDLLVAAPTYRDCKEGTRRLLQELSKLGYRVSAKKAQLCREEVTYLGYLLKGGKRWLTPARKATVMKIPTPTTPRQVREFLGKAGFCRLFIPGFASLAAPLYPLTRPKVPFTWTEAHQEAFGRIKEALLSAPALALPDLTKPFALYVDEKEGVARGVLTQTLGPWRRPVAYLSKKLDPVASGWPTCLKAIAAVALLLKDADKLTLGQNVLVIAPHNLESIVRQPPDRWMTNARMTHYQSLLLNERVSFAPPAILNPATLLPVESDDTPIHICSEILAEETGTRPDLRDQPLPGVPAWYTDGSSFIMDGRRQAGAAIVDNKRTVWASNLPEGTSAQKAELIALTQALRLAEGKSINIYTDSRYAFATAHVHGAIYKQRGWLTSAGKDIKNKEEILALLEAIHLPKRVAIIHCPGHQRGTDPVATGNRKADEAAKQAAQSTRILTETTKNAGKRTADGSEFEKRTADGSEFESPKKKAKVE

SEQ ID NO: 1694 - protein, 2125 aa, synthetic construct
MPAAKRVKLDGGDKKYSIGLDIGTNSVGWAVITDEYKVPSKKFKVLGNTDRHSIKKNLIGALLFDSGETAEATRLKRTARRRYTRRKNRICYLQEIFSNEMAKVDDSFFHRLEESFLVEEDKKHERHPIFGNIVDEVAYHEKYPTIYHLRKKLVDSTDKADLRLIYLALAHMIKFRGHFLIEGDLNPDNSDVDKLFIQLVQTYNQLFEENPINASGVDAKAILSARLSKSRRLENLIAQLPGEKKNGLFGNLIALSLGLTPNFKSNFDLAEDAKLQLSKDTYDDDLDNLLAQIGDQYADLFLAAKNLSDAILLSDILRVNTEITKAPLSASMIKRYDEHHQDLTLLKALVRQQLPEKYKEIFFDQSKNGYAGYIDGGASQEEFYKFIKPILEKMDGTEELLVKLNREDLLRKQRTFDNGSIPHQIHLGELHAILRRQEDFYPFLKDNREKIEKILTFRIPYYVGPLARGNSRFAWMTRKSEETITPWNFEEVVDKGASAQSFIERMTNFDKNLPNEKVLPKHSLLYEYFTVYNELTKVKYVTEGMRKPAFLSGEQKKAIVDLLFKTNRKVTVKQLKEDYFKKIECFDSVEISGVEDRFNASLGTYHDLLKIIKDKDFLDNEENEDILEDIVLTLTLFEDREMIEERLKTYAHLFDDKVMKQLKRRRYTGWGRLSRKLINGIRDKQSGKTILDFLKSDGFANRNFMQLIHDDSLTFKEDIQKAQVSGQGDSLHEHIANLAGSPAIKKGILQTVKVVDELVKVMGRHKPENIVIEMARENQTTQKGQKNSRERMKRIEEGIKELGSQILKEHPVENTQLQNEKLYLYYLQNGRDMYVDQELDINRLSDYDVDHIVPQSFLKDDSIDNKVLTRSDKARGKSDNVPSEEVVKKMKNYWRQLLNAKLITQRKFDNLTKAERGGLSELDKAGFIKRQLVETRQITKHVAQILDSRMNTKYDENDKLIREVKVITLKSKLVSDFRKDFQFYKVREINNYHHAHDAYLNAVVGTALIKKYPKLESEFVYGDYKVYDVRKMIAKSEQEIGKATAKYFFYSNIMNFFKTEITLANGEIRKRPLIETNGETGEIVWDKGRDFATVRKVLSMPQVNIVKKTEVQTGGFSKESILPKRNSDKLIARKKDWDPKKYGGFDSPTVAYSVLVVAKVEKGKSKKLKSVKELLGITIMERSSFEKNPIDFLEAKGYKEVKKDLIIKLPKYSLFELENGRKRMLASAGELQKGNELALPSKYVNFLYLASHYEKLKGSPEDNEQKQLFVEQHKHYLDEIIEQISEFSKRVILADANLDKVLSAYNKHRDKPIREQAENIIHLFTLTNLGAPAAFKYFDTTIDRKRYTSTKEVLDATLIHQSITGLYETRIDLSQLGGDGGGSSPAPGGGGGLLGRDLLTKLKAQIQFSTEGPQVTWEDRPAMCLVLNLEEEYRLHEKPVPPSIDPSWLQLFPMVWAEKAGMGLANQVPPVVVELKSDASPVAVRQYPMSKEAREGIRPHIQRFLDLGILVPCQSPWNTPLLPVKKPGTNDYRPVQDLREVNKRVQDIHPTVPNPYNLLSSLPPSHTWYSVLDLKDAFFCLKLHPNSQPLFAFEWRDPEKGNTGQLTWTRLPQGFKNSPTLFNEALHRDLASFRALNPQVVMLQYVDDLLVAAPTYRDCKEGTRRLLQELSKLGYRVSAKKAQLCREEVTYLGYLLKGGKRWLTPARKATVMKIPTPTTPRQVREFLGKAGFCRLFIPGFASLAAPLYPLTRPKVPFTWTEAHQEAFGRIKEALLSAPALALPDLTKPFALYVDEKEGVARGVLTQTLGPWRRPVAYLSKKLDPVASGWPTCLKAIAAVALLLKDADKLTLGQNVLVIAPHNLESIVRQPPDRWMTNARMTHYQSLLLNERVSFAPPAILNPATLLPVESDDTPIHICSEILAEETGTRPDLRDQPLPGVPAWYTDGSSFIMDGRRQAGAAIVDNKRTVWASNLPEGTSAQKAELIALTQALRLAEGKSINIYTDSRYAFATAHVHGAIYKQRGWLTSAGKDIKNKEEILALLEAIHLPKRVAIIHCPGHQRGTDPVATGNRKADEAAKQAAQSTRILTETTKNAGKRTADGSEFEKRTADGSEFESPKKKAKVE

SEQ ID NO: 1695 - protein, 2122 aa, synthetic construct
MPAAKRVKLDGGDKKYSIGLDIGTNSVGWAVITDEYKVPSKKFKVLGNTDRHSIKKNLIGALLFDSGETAEATRLKRTARRRYTRRKNRICYLQEIFSNEMAKVDDSFFHRLEESFLVEEDKKHERHPIFGNIVDEVAYHEKYPTIYHLRKKLVDSTDKADLRLIYLALAHMIKFRGHFLIEGDLNPDNSDVDKLFIQLVQTYNQLFEENPINASGVDAKAILSARLSKSRRLENLIAQLPGEKKNGLFGNLIALSLGLTPNFKSNFDLAEDAKLQLSKDTYDDDLDNLLAQIGDQYADLFLAAKNLSDAILLSDILRVNTEITKAPLSASMIKRYDEHHQDLTLLKALVRQQLPEKYKEIFFDQSKNGYAGYIDGGASQEEFYKFIKPILEKMDGTEELLVKLNREDLLRKQRTFDNGSIPHQIHLGELHAILRRQEDFYPFLKDNREKIEKILTFRIPYYVGPLARGNSRFAWMTRKSEETITPWNFEEVVDKGASAQSFIERMTNFDKNLPNEKVLPKHSLLYEYFTVYNELTKVKYVTEGMRKPAFLSGEQKKAIVDLLFKTNRKVTVKQLKEDYFKKIECFDSVEISGVEDRFNASLGTYHDLLKIIKDKDFLDNEENEDILEDIVLTLTLFEDREMIEERLKTYAHLFDDKVMKQLKRRRYTGWGRLSRKLINGIRDKQSGKTILDFLKSDGFANRNFMQLIHDDSLTFKEDIQKAQVSGQGDSLHEHIANLAGSPAIKKGILQTVKVVDELVKVMGRHKPENIVIEMARENQTTQKGQKNSRERMKRIEEGIKELGSQILKEHPVENTQLQNEKLYLYYLQNGRDMYVDQELDINRLSDYDVDHIVPQSFLKDDSIDNKVLTRSDKARGKSDNVPSEEVVKKMKNYWRQLLNAKLITQRKFDNLTKAERGGLSELDKAGFIKRQLVETRQITKHVAQILDSRMNTKYDENDKLIREVKVITLKSKLVSDFRKDFQFYKVREINNYHHAHDAYLNAVVGTALIKKYPKLESEFVYGDYKVYDVRKMIAKSEQEIGKATAKYFFYSNIMNFFKTEITLANGEIRKRPLIETNGETGEIVWDKGRDFATVRKVLSMPQVNIVKKTEVQTGGFSKESILPKRNSDKLIARKKDWDPKKYGGFDSPTVAYSVLVVAKVEKGKSKKLKSVKELLGITIMERSSFEKNPIDFLEAKGYKEVKKDLIIKLPKYSLFELENGRKRMLASAGELQKGNELALPSKYVNFLYLASHYEKLKGSPEDNEQKQLFVEQHKHYLDEIIEQISEFSKRVILADANLDKVLSAYNKHRDKPIREQAENIIHLFTLTNLGAPAAFKYFDTTIDRKRYTSTKEVLDATLIHQSITGLYETRIDLSQLGGDGGPAPGSSGGLLGRDLLTKLKAQIQFSTEGPQVTWEDRPAMCLVLNLEEEYRLHEKPVPPSIDPSWLQLFPMVWAEKAGMGLANQVPPVVVELKSDASPVAVRQYPMSKEAREGIRPHIQRFLDLGILVPCQSPWNTPLLPVKKPGTNDYRPVQDLREVNKRVQDIHPTVPNPYNLLSSLPPSHTWYSVLDLKDAFFCLKLHPNSQPLFAFEWRDPEKGNTGQLTWTRLPQGFKNSPTLFNEALHRDLASFRALNPQVVMLQYVDDLLVAAPTYRDCKEGTRRLLQELSKLGYRVSAKKAQLCREEVTYLGYLLKGGKRWLTPARKATVMKIPTPTTPRQVREFLGKAGFCRLFIPGFASLAAPLYPLTRPKVPFTWTEAHQEAFGRIKEALLSAPALALPDLTKPFALYVDEKEGVARGVLTQTLGPWRRPVAYLSKKLDPVASGWPTCLKAIAAVALLLKDADKLTLGQNVLVIAPHNLESIVRQPPDRWMTNARMTHYQSLLLNERVSFAPPAILNPATLLPVESDDTPIHICSEILAEETGTRPDLRDQPLPGVPAWYTDGSSFIMDGRRQAGAAIVDNKRTVWASNLPEGTSAQKAELIALTQALRLAEGKSINIYTDSRYAFATAHVHGAIYKQRGWLTSAGKDIKNKEEILALLEAIHLPKRVAIIHCPGHQRGTDPVATGNRKADEAAKQAAQSTRILTETTKNAGKRTADGSEFEKRTADGSEFESPKKKAKVE

SEQ ID NO: 1696 - protein, 2125 aa, synthetic construct
MPAAKRVKLDGGDKKYSIGLDIGTNSVGWAVITDEYKVPSKKFKVLGNTDRHSIKKNLIGALLFDSGETAEATRLKRTARRRYTRRKNRICYLQEIFSNEMAKVDDSFFHRLEESFLVEEDKKHERHPIFGNIVDEVAYHEKYPTIYHLRKKLVDSTDKADLRLIYLALAHMIKFRGHFLIEGDLNPDNSDVDKLFIQLVQTYNQLFEENPINASGVDAKAILSARLSKSRRLENLIAQLPGEKKNGLFGNLIALSLGLTPNFKSNFDLAEDAKLQLSKDTYDDDLDNLLAQIGDQYADLFLAAKNLSDAILLSDILRVNTEITKAPLSASMIKRYDEHHQDLTLLKALVRQQLPEKYKEIFFDQSKNGYAGYIDGGASQEEFYKFIKPILEKMDGTEELLVKLNREDLLRKQRTFDNGSIPHQIHLGELHAILRRQEDFYPFLKDNREKIEKILTFRIPYYVGPLARGNSRFAWMTRKSEETITPWNFEEVVDKGASAQSFIERMTNFDKNLPNEKVLPKHSLLYEYFTVYNELTKVKYVTEGMRKPAFLSGEQKKAIVDLLFKTNRKVTVKQLKEDYFKKIECFDSVEISGVEDRFNASLGTYHDLLKIIKDKDFLDNEENEDILEDIVLTLTLFEDREMIEERLKTYAHLFDDKVMKQLKRRRYTGWGRLSRKLINGIRDKQSGKTILDFLKSDGFANRNFMQLIHDDSLTFKEDIQKAQVSGQGDSLHEHIANLAGSPAIKKGILQTVKVVDELVKVMGRHKPENIVIEMARENQTTQKGQKNSRERMKRIEEGIKELGSQILKEHPVENTQLQNEKLYLYYLQNGRDMYVDQELDINRLSDYDVDHIVPQSFLKDDSIDNKVLTRSDKARGKSDNVPSEEVVKKMKNYWRQLLNAKLITQRKFDNLTKAERGGLSELDKAGFIKRQLVETRQITKHVAQILDSRMNTKYDENDKLIREVKVITLKSKLVSDFRKDFQFYKVREINNYHHAHDAYLNAVVGTALIKKYPKLESEFVYGDYKVYDVRKMIAKSEQEIGKATAKYFFYSNIMNFFKTEITLANGEIRKRPLIETNGETGEIVWDKGRDFATVRKVLSMPQVNIVKKTEVQTGGFSKESILPKRNSDKLIARKKDWDPKKYGGFDSPTVAYSVLVVAKVEKGKSKKLKSVKELLGITIMERSSFEKNPIDFLEAKGYKEVKKDLIIKLPKYSLFELENGRKRMLASAGELQKGNELALPSKYVNFLYLASHYEKLKGSPEDNEQKQLFVEQHKHYLDEIIEQISEFSKRVILADANLDKVLSAYNKHRDKPIREQAENIIHLFTLTNLGAPAAFKYFDTTIDRKRYTSTKEVLDATLIHQSITGLYETRIDLSQLGGDGGPAPAPAPAPGGLLGRDLLTKLKAQIQFSTEGPQVTWEDRPAMCLVLNLEEEYRLHEKPVPPSIDPSWLQLFPMVWAEKAGMGLANQVPPVVVELKSDASPVAVRQYPMSKEAREGIRPHIQRFLDLGILVPCQSPWNTPLLPVKKPGTNDYRPVQDLREVNKRVQDIHPTVPNPYNLLSSLPPSHTWYSVLDLKDAFFCLKLHPNSQPLFAFEWRDPEKGNTGQLTWTRLPQGFKNSPTLFNEALHRDLASFRALNPQVVMLQYVDDLLVAAPTYRDCKEGTRRLLQELSKLGYRVSAKKAQLCREEVTYLGYLLKGGKRWLTPARKATVMKIPTPTTPRQVREFLGKAGFCRLFIPGFASLAAPLYPLTRPKVPFTWTEAHQEAFGRIKEALLSAPALALPDLTKPFALYVDEKEGVARGVLTQTLGPWRRPVAYLSKKLDPVASGWPTCLKAIAAVALLLKDADKLTLGQNVLVIAPHNLESIVRQPPDRWMTNARMTHYQSLLLNERVSFAPPAILNPATLLPVESDDTPIHICSEILAEETGTRPDLRDQPLPGVPAWYTDGSSFIMDGRRQAGAAIVDNKRTVWASNLPEGTSAQKAELIALTQALRLAEGKSINIYTDSRYAFATAHVHGAIYKQRGWLTSAGKDIKNKEEILALLEAIHLPKRVAIIHCPGHQRGTDPVATGNRKADEAAKQAAQSTRILTETTKNAGKRTADGSEFEKRTADGSEFESPKKKAKVE

SEQ ID NO: 1697 - protein, 2119 aa, synthetic construct
MPAAKRVKLDGGDKKYSIGLDIGTNSVGWAVITDEYKVPSKKFKVLGNTDRHSIKKNLIGALLFDSGETAEATRLKRTARRRYTRRKNRICYLQEIFSNEMAKVDDSFFHRLEESFLVEEDKKHERHPIFGNIVDEVAYHEKYPTIYHLRKKLVDSTDKADLRLIYLALAHMIKFRGHFLIEGDLNPDNSDVDKLFIQLVQTYNQLFEENPINASGVDAKAILSARLSKSRRLENLIAQLPGEKKNGLFGNLIALSLGLTPNFKSNFDLAEDAKLQLSKDTYDDDLDNLLAQIGDQYADLFLAAKNLSDAILLSDILRVNTEITKAPLSASMIKRYDEHHQDLTLLKALVRQQLPEKYKEIFFDQSKNGYAGYIDGGASQEEFYKFIKPILEKMDGTEELLVKLNREDLLRKQRTFDNGSIPHQIHLGELHAILRRQEDFYPFLKDNREKIEKILTFRIPYYVGPLARGNSRFAWMTRKSEETITPWNFEEVVDKGASAQSFIERMTNFDKNLPNEKVLPKHSLLYEYFTVYNELTKVKYVTEGMRKPAFLSGEQKKAIVDLLFKTNRKVTVKQLKEDYFKKIECFDSVEISGVEDRFNASLGTYHDLLKIIKDKDFLDNEENEDILEDIVLTLTLFEDREMIEERLKTYAHLFDDKVMKQLKRRRYTGWGRLSRKLINGIRDKQSGKTILDFLKSDGFANRNFMQLIHDDSLTFKEDIQKAQVSGQGDSLHEHIANLAGSPAIKKGILQTVKVVDELVKVMGRHKPENIVIEMARENQTTQKGQKNSRERMKRIEEGIKELGSQILKEHPVENTQLQNEKLYLYYLQNGRDMYVDQELDINRLSDYDVDHIVPQSFLKDDSIDNKVLTRSDKARGKSDNVPSEEVVKKMKNYWRQLLNAKLITQRKFDNLTKAERGGLSELDKAGFIKRQLVETRQITKHVAQILDSRMNTKYDENDKLIREVKVITLKSKLVSDFRKDFQFYKVREINNYHHAHDAYLNAVVGTALIKKYPKLESEFVYGDYKVYDVRKMIAKSEQEIGKATAKYFFYSNIMNFFKTEITLANGEIRKRPLIETNGETGEIVWDKGRDFATVRKVLSMPQVNIVKKTEVQTGGFSKESILPKRNSDKLIARKKDWDPKKYGGFDSPTVAYSVLVVAKVEKGKSKKLKSVKELLGITIMERSSFEKNPIDFLEAKGYKEVKKDLIIKLPKYSLFELENGRKRMLASAGELQKGNELALPSKYVNFLYLASHYEKLKGSPEDNEQKQLFVEQHKHYLDEIIEQISEFSKRVILADANLDKVLSAYNKHRDKPIREQAENIIHLFTLTNLGAPAAFKYFDTTIDRKRYTSTKEVLDATLIHQSITGLYETRIDLSQLGGDGGGSSGGLLGRDLLTKLKAQIQFSTEGPQVTWEDRPAMCLVLNLEEEYRLHEKPVPPSIDPSWLQLFPMVWAEKAGMGLANQVPPVVVELKSDASPVAVRQYPMSKEAREGIRPHIQRFLDLGILVPCQSPWNTPLLPVKKPGTNDYRPVQDLREVNKRVQDIHPTVPNPYNLLSSLPPSHTWYSVLDLKDAFFCLKLHPNSQPLFAFEWRDPEKGNTGQLTWTRLPQGFKNSPTLFNEALHRDLASFRALNPQVVMLQYVDDLLVAAPTYRDCKEGTRRLLQELSKLGYRVSAKKAQLCREEVTYLGYLLKGGKRWLTPARKATVMKIPTPTTPRQVREFLGKAGFCRLFIPGFASLAAPLYPLTRPKVPFTWTEAHQEAFGRIKEALLSAPALALPDLTKPFALYVDEKEGVARGVLTQTLGPWRRPVAYLSKKLDPVASGWPTCLKAIAAVALLLKDADKLTLGQNVLVIAPHNLESIVRQPPDRWMTNARMTHYQSLLLNERVSFAPPAILNPATLLPVESDDTPIHICSEILAEETGTRPDLRDQPLPGVPAWYTDGSSFIMDGRRQAGAAIVDNKRTVWASNLPEGTSAQKAELIALTQALRLAEGKSINIYTDSRYAFATAHVHGAIYKQRGWLTSAGKDIKNKEEILALLEAIHLPKRVAIIHCPGHQRGTDPVATGNRKADEAAKQAAQSTRILTETTKNAGKRTADGSEFEKRTADGSEFESPKKKAKVE

SEQ ID NO: 1698 - protein, 2122 aa, synthetic construct
MPAAKRVKLDGGDKKYSIGLDIGTNSVGWAVITDEYKVPSKKFKVLGNTDRHSIKKNLIGALLFDSGETAEATRLKRTARRRYTRRKNRICYLQEIFSNEMAKVDDSFFHRLEESFLVEEDKKHERHPIFGNIVDEVAYHEKYPTIYHLRKKLVDSTDKADLRLIYLALAHMIKFRGHFLIEGDLNPDNSDVDKLFIQLVQTYNQLFEENPINASGVDAKAILSARLSKSRRLENLIAQLPGEKKNGLFGNLIALSLGLTPNFKSNFDLAEDAKLQLSKDTYDDDLDNLLAQIGDQYADLFLAAKNLSDAILLSDILRVNTEITKAPLSASMIKRYDEHHQDLTLLKALVRQQLPEKYKEIFFDQSKNGYAGYIDGGASQEEFYKFIKPILEKMDGTEELLVKLNREDLLRKQRTFDNGSIPHQIHLGELHAILRRQEDFYPFLKDNREKIEKILTFRIPYYVGPLARGNSRFAWMTRKSEETITPWNFEEVVDKGASAQSFIERMTNFDKNLPNEKVLPKHSLLYEYFTVYNELTKVKYVTEGMRKPAFLSGEQKKAIVDLLFKTNRKVTVKQLKEDYFKKIECFDSVEISGVEDRFNASLGTYHDLLKIIKDKDFLDNEENEDILEDIVLTLTLFEDREMIEERLKTYAHLFDDKVMKQLKRRRYTGWGRLSRKLINGIRDKQSGKTILDFLKSDGFANRNFMQLIHDDSLTFKEDIQKAQVSGQGDSLHEHIANLAGSPAIKKGILQTVKVVDELVKVMGRHKPENIVIEMARENQTTQKGQKNSRERMKRIEEGIKELGSQILKEHPVENTQLQNEKLYLYYLQNGRDMYVDQELDINRLSDYDVDHIVPQSFLKDDSIDNKVLTRSDKARGKSDNVPSEEVVKKMKNYWRQLLNAKLITQRKFDNLTKAERGGLSELDKAGFIKRQLVETRQITKHVAQILDSRMNTKYDENDKLIREVKVITLKSKLVSDFRKDFQFYKVREINNYHHAHDAYLNAVVGTALIKKYPKLESEFVYGDYKVYDVRKMIAKSEQEIGKATAKYFFYSNIMNFFKTEITLANGEIRKRPLIETNGETGEIVWDKGRDFATVRKVLSMPQVNIVKKTEVQTGGFSKESILPKRNSDKLIARKKDWDPKKYGGFDSPTVAYSVLVVAKVEKGKSKKLKSVKELLGITIMERSSFEKNPIDFLEAKGYKEVKKDLIIKLPKYSLFELENGRKRMLASAGELQKGNELALPSKYVNFLYLASHYEKLKGSPEDNEQKQLFVEQHKHYLDEIIEQISEFSKRVILADANLDKVLSAYNKHRDKPIREQAENIIHLFTLTNLGAPAAFKYFDTTIDRKRYTSTKEVLDATLIHQSITGLYETRIDLSQLGGDGGGSSGGGGGLLGRDLLTKLKAQIQFSTEGPQVTWEDRPAMCLVLNLEEEYRLHEKPVPPSIDPSWLQLFPMVWAEKAGMGLANQVPPVVVELKSDASPVAVRQYPMSKEAREGIRPHIQRFLDLGILVPCQSPWNTPLLPVKKPGTNDYRPVQDLREVNKRVQDIHPTVPNPYNLLSSLPPSHTWYSVLDLKDAFFCLKLHPNSQPLFAFEWRDPEKGNTGQLTWTRLPQGFKNSPTLFNEALHRDLASFRALNPQVVMLQYVDDLLVAAPTYRDCKEGTRRLLQELSKLGYRVSAKKAQLCREEVTYLGYLLKGGKRWLTPARKATVMKIPTPTTPRQVREFLGKAGFCRLFIPGFASLAAPLYPLTRPKVPFTWTEAHQEAFGRIKEALLSAPALALPDLTKPFALYVDEKEGVARGVLTQTLGPWRRPVAYLSKKLDPVASGWPTCLKAIAAVALLLKDADKLTLGQNVLVIAPHNLESIVRQPPDRWMTNARMTHYQSLLLNERVSFAPPAILNPATLLPVESDDTPIHICSEILAEETGTRPDLRDQPLPGVPAWYTDGSSFIMDGRRQAGAAIVDNKRTVWASNLPEGTSAQKAELIALTQALRLAEGKSINIYTDSRYAFATAHVHGAIYKQRGWLTSAGKDIKNKEEILALLEAIHLPKRVAIIHCPGHQRGTDPVATGNRKADEAAKQAAQSTRILTETTKNAGKRTADGSEFEKRTADGSEFESPKKKAKVE

SEQ ID NO: 1699 - protein, 2127 aa, synthetic construct
MPAAKRVKLDGGDKKYSIGLDIGTNSVGWAVITDEYKVPSKKFKVLGNTDRHSIKKNLIGALLFDSGETAEATRLKRTARRRYTRRKNRICYLQEIFSNEMAKVDDSFFHRLEESFLVEEDKKHERHPIFGNIVDEVAYHEKYPTIYHLRKKLVDSTDKADLRLIYLALAHMIKFRGHFLIEGDLNPDNSDVDKLFIQLVQTYNQLFEENPINASGVDAKAILSARLSKSRRLENLIAQLPGEKKNGLFGNLIALSLGLTPNFKSNFDLAEDAKLQLSKDTYDDDLDNLLAQIGDQYADLFLAAKNLSDAILLSDILRVNTEITKAPLSASMIKRYDEHHQDLTLLKALVRQQLPEKYKEIFFDQSKNGYAGYIDGGASQEEFYKFIKPILEKMDGTEELLVKLNREDLLRKQRTFDNGSIPHQIHLGELHAILRRQEDFYPFLKDNREKIEKILTFRIPYYVGPLARGNSRFAWMTRKSEETITPWNFEEVVDKGASAQSFIERMTNFDKNLPNEKVLPKHSLLYEYFTVYNELTKVKYVTEGMRKPAFLSGEQKKAIVDLLFKTNRKVTVKQLKEDYFKKIECFDSVEISGVEDRFNASLGTYHDLLKIIKDKDFLDNEENEDILEDIVLTLTLFEDREMIEERLKTYAHLFDDKVMKQLKRRRYTGWGRLSRKLINGIRDKQSGKTILDFLKSDGFANRNFMQLIHDDSLTFKEDIQKAQVSGQGDSLHEHIANLAGSPAIKKGILQTVKVVDELVKVMGRHKPENIVIEMARENQTTQKGQKNSRERMKRIEEGIKELGSQILKEHPVENTQLQNEKLYLYYLQNGRDMYVDQELDINRLSDYDVDHIVPQSFLKDDSIDNKVLTRSDKARGKSDNVPSEEVVKKMKNYWRQLLNAKLITQRKFDNLTKAERGGLSELDKAGFIKRQLVETRQITKHVAQILDSRMNTKYDENDKLIREVKVITLKSKLVSDFRKDFQFYKVREINNYHHAHDAYLNAVVGTALIKKYPKLESEFVYGDYKVYDVRKMIAKSEQEIGKATAKYFFYSNIMNFFKTEITLANGEIRKRPLIETNGETGEIVWDKGRDFATVRKVLSMPQVNIVKKTEVQTGGFSKESILPKRNSDKLIARKKDWDPKKYGGFDSPTVAYSVLVVAKVEKGKSKKLKSVKELLGITIMERSSFEKNPIDFLEAKGYKEVKKDLIIKLPKYSLFELENGRKRMLASAGELQKGNELALPSKYVNFLYLASHYEKLKGSPEDNEQKQLFVEQHKHYLDEIIEQISEFSKRVILADANLDKVLSAYNKHRDKPIREQAENIIHLFTLTNLGAPAAFKYFDTTIDRKRYTSTKEVLDATLIHQSITGLYETRIDLSQLGGDGGPAPEAAAKGSSGGLLGRDLLTKLKAQIQFSTEGPQVTWEDRPAMCLVLNLEEEYRLHEKPVPPSIDPSWLQLFPMVWAEKAGMGLANQVPPVVVELKSDASPVAVRQYPMSKEAREGIRPHIQRFLDLGILVPCQSPWNTPLLPVKKPGTNDYRPVQDLREVNKRVQDIHPTVPNPYNLLSSLPPSHTWYSVLDLKDAFFCLKLHPNSQPLFAFEWRDPEKGNTGQLTWTRLPQGFKNSPTLFNEALHRDLASFRALNPQVVMLQYVDDLLVAAPTYRDCKEGTRRLLQELSKLGYRVSAKKAQLCREEVTYLGYLLKGGKRWLTPARKATVMKIPTPTTPRQVREFLGKAGFCRLFIPGFASLAAPLYPLTRPKVPFTWTEAHQEAFGRIKEALLSAPALALPDLTKPFALYVDEKEGVARGVLTQTLGPWRRPVAYLSKKLDPVASGWPTCLKAIAAVALLLKDADKLTLGQNVLVIAPHNLESIVRQPPDRWMTNARMTHYQSLLLNERVSFAPPAILNPATLLPVESDDTPIHICSEILAEETGTRPDLRDQPLPGVPAWYTDGSSFIMDGRRQAGAAIVDNKRTVWASNLPEGTSAQKAELIALTQALRLAEGKSINIYTDSRYAFATAHVHGAIYKQRGWLTSAGKDIKNKEEILALLEAIHLPKRVAIIHCPGHQRGTDPVATGNRKADEAAKQAAQSTRILTETTKNAGKRTADGSEFEKRTADGSEFESPKKKAKVE

SEQ ID NO: 1700 - protein, 2127 aa, synthetic construct
MPAAKRVKLDGGDKKYSIGLDIGTNSVGWAVITDEYKVPSKKFKVLGNTDRHSIKKNLIGALLFDSGETAEATRLKRTARRRYTRRKNRICYLQEIFSNEMAKVDDSFFHRLEESFLVEEDKKHERHPIFGNIVDEVAYHEKYPTIYHLRKKLVDSTDKADLRLIYLALAHMIKFRGHFLIEGDLNPDNSDVDKLFIQLVQTYNQLFEENPINASGVDAKAILSARLSKSRRLENLIAQLPGEKKNGLFGNLIALSLGLTPNFKSNFDLAEDAKLQLSKDTYDDDLDNLLAQIGDQYADLFLAAKNLSDAILLSDILRVNTEITKAPLSASMIKRYDEHHQDLTLLKALVRQQLPEKYKEIFFDQSKNGYAGYIDGGASQEEFYKFIKPILEKMDGTEELLVKLNREDLLRKQRTFDNGSIPHQIHLGELHAILRRQEDFYPFLKDNREKIEKILTFRIPYYVGPLARGNSRFAWMTRKSEETITPWNFEEVVDKGASAQSFIERMTNFDKNLPNEKVLPKHSLLYEYFTVYNELTKVKYVTEGMRKPAFLSGEQKKAIVDLLFKTNRKVTVKQLKEDYFKKIECFDSVEISGVEDRFNASLGTYHDLLKIIKDKDFLDNEENEDILEDIVLTLTLFEDREMIEERLKTYAHLFDDKVMKQLKRRRYTGWGRLSRKLINGIRDKQSGKTILDFLKSDGFANRNFMQLIHDDSLTFKEDIQKAQVSGQGDSLHEHIANLAGSPAIKKGILQTVKVVDELVKVMGRHKPENIVIEMARENQTTQKGQKNSRERMKRIEEGIKELGSQILKEHPVENTQLQNEKLYLYYLQNGRDMYVDQELDINRLSDYDVDHIVPQSFLKDDSIDNKVLTRSDKARGKSDNVPSEEVVKKMKNYWRQLLNAKLITQRKFDNLTKAERGGLSELDKAGFIKRQLVETRQITKHVAQILDSRMNTKYDENDKLIREVKVITLKSKLVSDFRKDFQFYKVREINNYHHAHDAYLNAVVGTALIKKYPKLESEFVYGDYKVYDVRKMIAKSEQEIGKATAKYFFYSNIMNFFKTEITLANGEIRKRPLIETNGETGEIVWDKGRDFATVRKVLSMPQVNIVKKTEVQTGGFSKESILPKRNSDKLIARKKDWDPKKYGGFDSPTVAYSVLVVAKVEKGKSKKLKSVKELLGITIMERSSFEKNPIDFLEAKGYKEVKKDLIIKLPKYSLFELENGRKRMLASAGELQKGNELALPSKYVNFLYLASHYEKLKGSPEDNEQKQLFVEQHKHYLDEIIEQISEFSKRVILADANLDKVLSAYNKHRDKPIREQAENIIHLFTLTNLGAPAAFKYFDTTIDRKRYTSTKEVLDATLIHQSITGLYETRIDLSQLGGDGGEAAAKGSSGGGGGLLGRDLLTKLKAQIQFSTEGPQVTWEDRPAMCLVLNLEEEYRLHEKPVPPSIDPSWLQLFPMVWAEKAGMGLANQVPPVVVELKSDASPVAVRQYPMSKEAREGIRPHIQRFLDLGILVPCQSPWNTPLLPVKKPGTNDYRPVQDLREVNKRVQDIHPTVPNPYNLLSSLPPSHTWYSVLDLKDAFFCLKLHPNSQPLFAFEWRDPEKGNTGQLTWTRLPQGFKNSPTLFNEALHRDLASFRALNPQVVMLQYVDDLLVAAPTYRDCKEGTRRLLQELSKLGYRVSAKKAQLCREEVTYLGYLLKGGKRWLTPARKATVMKIPTPTTPRQVREFLGKAGFCRLFIPGFASLAAPLYPLTRPKVPFTWTEAHQEAFGRIKEALLSAPALALPDLTKPFALYVDEKEGVARGVLTQTLGPWRRPVAYLSKKLDPVASGWPTCLKAIAAVALLLKDADKLTLGQNVLVIAPHNLESIVRQPPDRWMTNARMTHYQSLLLNERVSFAPPAILNPATLLPVESDDTPIHICSEILAEETGTRPDLRDQPLPGVPAWYTDGSSFIMDGRRQAGAAIVDNKRTVWASNLPEGTSAQKAELIALTQALRLAEGKSINIYTDSRYAFATAHVHGAIYKQRGWLTSAGKDIKNKEEILALLEAIHLPKRVAIIHCPGHQRGTDPVATGNRKADEAAKQAAQSTRILTETTKNAGKRTADGSEFEKRTADGSEFESPKKKAKVE

SEQ ID NO: 1701 - protein, 2129 aa, synthetic construct
MPAAKRVKLDGGDKKYSIGLDIGTNSVGWAVITDEYKVPSKKFKVLGNTDRHSIKKNLIGALLFDSGETAEATRLKRTARRRYTRRKNRICYLQEIFSNEMAKVDDSFFHRLEESFLVEEDKKHERHPIFGNIVDEVAYHEKYPTIYHLRKKLVDSTDKADLRLIYLALAHMIKFRGHFLIEGDLNPDNSDVDKLFIQLVQTYNQLFEENPINASGVDAKAILSARLSKSRRLENLIAQLPGEKKNGLFGNLIALSLGLTPNFKSNFDLAEDAKLQLSKDTYDDDLDNLLAQIGDQYADLFLAAKNLSDAILLSDILRVNTEITKAPLSASMIKRYDEHHQDLTLLKALVRQQLPEKYKEIFFDQSKNGYAGYIDGGASQEEFYKFIKPILEKMDGTEELLVKLNREDLLRKQRTFDNGSIPHQIHLGELHAILRRQEDFYPFLKDNREKIEKILTFRIPYYVGPLARGNSRFAWMTRKSEETITPWNFEEVVDKGASAQSFIERMTNFDKNLPNEKVLPKHSLLYEYFTVYNELTKVKYVTEGMRKPAFLSGEQKKAIVDLLFKTNRKVTVKQLKEDYFKKIECFDSVEISGVEDRFNASLGTYHDLLKIIKDKDFLDNEENEDILEDIVLTLTLFEDREMIEERLKTYAHLFDDKVMKQLKRRRYTGWGRLSRKLINGIRDKQSGKTILDFLKSDGFANRNFMQLIHDDSLTFKEDIQKAQVSGQGDSLHEHIANLAGSPAIKKGILQTVKVVDELVKVMGRHKPENIVIEMARENQTTQKGQKNSRERMKRIEEGIKELGSQILKEHPVENTQLQNEKLYLYYLQNGRDMYVDQELDINRLSDYDVDHIVPQSFLKDDSIDNKVLTRSDKARGKSDNVPSEEVVKKMKNYWRQLLNAKLITQRKFDNLTKAERGGLSELDKAGFIKRQLVETRQITKHVAQILDSRMNTKYDENDKLIREVKVITLKSKLVSDFRKDFQFYKVREINNYHHAHDAYLNAVVGTALIKKYPKLESEFVYGDYKVYDVRKMIAKSEQEIGKATAKYFFYSNIMNFFKTEITLANGEIRKRPLIETNGETGEIVWDKGRDFATVRKVLSMPQVNIVKKTEVQTGGFSKESILPKRNSDKLIARKKDWDPKKYGGFDSPTVAYSVLVVAKVEKGKSKKLKSVKELLGITIMERSSFEKNPIDFLEAKGYKEVKKDLIIKLPKYSLFELENGRKRMLASAGELQKGNELALPSKYVNFLYLASHYEKLKGSPEDNEQKQLFVEQHKHYLDEIIEQISEFSKRVILADANLDKVLSAYNKHRDKPIREQAENIIHLFTLTNLGAPAAFKYFDTTIDRKRYTSTKEVLDATLIHQSITGLYETRIDLSQLGGDGGPAPAPAPAPAPAPGGLLGRDLLTKLKAQIQFSTEGPQVTWEDRPAMCLVLNLEEEYRLHEKPVPPSIDPSWLQLFPMVWAEKAGMGLANQVPPVVVELKSDASPVAVRQYPMSKEAREGIRPHIQRFLDLGILVPCQSPWNTPLLPVKKPGTNDYRPVQDLREVNKRVQDIHPTVPNPYNLLSSLPPSHTWYSVLDLKDAFFCLKLHPNSQPLFAFEWRDPEKGNTGQLTWTRLPQGFKNSPTLFNEALHRDLASFRALNPQVVMLQYVDDLLVAAPTYRDCKEGTRRLLQELSKLGYRVSAKKAQLCREEVTYLGYLLKGGKRWLTPARKATVMKIPTPTTPRQVREFLGKAGFCRLFIPGFASLAAPLYPLTRPKVPFTWTEAHQEAFGRIKEALLSAPALALPDLTKPFALYVDEKEGVARGVLTQTLGPWRRPVAYLSKKLDPVASGWPTCLKAIAAVALLLKDADKLTLGQNVLVIAPHNLESIVRQPPDRWMTNARMTHYQSLLLNERVSFAPPAILNPATLLPVESDDTPIHICSEILAEETGTRPDLRDQPLPGVPAWYTDGSSFIMDGRRQAGAAIVDNKRTVWASNLPEGTSAQKAELIALTQALRLAEGKSINIYTDSRYAFATAHVHGAIYKQRGWLTSAGKDIKNKEEILALLEAIHLPKRVAIIHCPGHQRGTDPVATGNRKADEAAKQAAQSTRILTETTKNAGKRTADGSEFEKRTADGSEFESPKKKAKVE

SEQ ID NO: 1702 - protein, 2127 aa, synthetic construct
MPAAKRVKLDGGDKKYSIGLDIGTNSVGWAVITDEYKVPSKKFKVLGNTDRHSIKKNLIGALLFDSGETAEATRLKRTARRRYTRRKNRICYLQEIFSNEMAKVDDSFFHRLEESFLVEEDKKHERHPIFGNIVDEVAYHEKYPTIYHLRKKLVDSTDKADLRLIYLALAHMIKFRGHFLIEGDLNPDNSDVDKLFIQLVQTYNQLFEENPINASGVDAKAILSARLSKSRRLENLIAQLPGEKKNGLFGNLIALSLGLTPNFKSNFDLAEDAKLQLSKDTYDDDLDNLLAQIGDQYADLFLAAKNLSDAILLSDILRVNTEITKAPLSASMIKRYDEHHQDLTLLKALVRQQLPEKYKEIFFDQSKNGYAGYIDGGASQEEFYKFIKPILEKMDGTEELLVKLNREDLLRKQRTFDNGSIPHQIHLGELHAILRRQEDFYPFLKDNREKIEKILTFRIPYYVGPLARGNSRFAWMTRKSEETITPWNFEEVVDKGASAQSFIERMTNFDKNLPNEKVLPKHSLLYEYFTVYNELTKVKYVTEGMRKPAFLSGEQKKAIVDLLFKTNRKVTVKQLKEDYFKKIECFDSVEISGVEDRFNASLGTYHDLLKIIKDKDFLDNEENEDILEDIVLTLTLFEDREMIEERLKTYAHLFDDKVMKQLKRRRYTGWGRLSRKLINGIRDKQSGKTILDFLKSDGFANRNFMQLIHDDSLTFKEDIQKAQVSGQGDSLHEHIANLAGSPAIKKGILQTVKVVDELVKVMGRHKPENIVIEMARENQTTQKGQKNSRERMKRIEEGIKELGSQILKEHPVENTQLQNEKLYLYYLQNGRDMYVDQELDINRLSDYDVDHIVPQSFLKDDSIDNKVLTRSDKARGKSDNVPSEEVVKKMKNYWRQLLNAKLITQRKFDNLTKAERGGLSELDKAGFIKRQLVETRQITKHVAQILDSRMNTKYDENDKLIREVKVITLKSKLVSDFRKDFQFYKVREINNYHHAHDAYLNAVVGTALIKKYPKLESEFVYGDYKVYDVRKMIAKSEQEIGKATAKYFFYSNIMNFFKTEITLANGEIRKRPLIETNGETGEIVWDKGRDFATVRKVLSMPQVNIVKKTEVQTGGFSKESILPKRNSDKLIARKKDWDPKKYGGFDSPTVAYSVLVVAKVEKGKSKKLKSVKELLGITIMERSSFEKNPIDFLEAKGYKEVKKDLIIKLPKYSLFELENGRKRMLASAGELQKGNELALPSKYVNFLYLASHYEKLKGSPEDNEQKQLFVEQHKHYLDEIIEQISEFSKRVILADANLDKVLSAYNKHRDKPIREQAENIIHLFTLTNLGAPAAFKYFDTTIDRKRYTSTKEVLDATLIHQSITGLYETRIDLSQLGGDGGGGGEAAAKGGSGGLLGRDLLTKLKAQIQFSTEGPQVTWEDRPAMCLVLNLEEEYRLHEKPVPPSIDPSWLQLFPMVWAEKAGMGLANQVPPVVVELKSDASPVAVRQYPMSKEAREGIRPHIQRFLDLGILVPCQSPWNTPLLPVKKPGTNDYRPVQDLREVNKRVQDIHPTVPNPYNLLSSLPPSHTWYSVLDLKDAFFCLKLHPNSQPLFAFEWRDPEKGNTGQLTWTRLPQGFKNSPTLFNEALHRDLASFRALNPQVVMLQYVDDLLVAAPTYRDCKEGTRRLLQELSKLGYRVSAKKAQLCREEVTYLGYLLKGGKRWLTPARKATVMKIPTPTTPRQVREFLGKAGFCRLFIPGFASLAAPLYPLTRPKVPFTWTEAHQEAFGRIKEALLSAPALALPDLTKPFALYVDEKEGVARGVLTQTLGPWRRPVAYLSKKLDPVASGWPTCLKAIAAVALLLKDADKLTLGQNVLVIAPHNLESIVRQPPDRWMTNARMTHYQSLLLNERVSFAPPAILNPATLLPVESDDTPIHICSEILAEETGTRPDLRDQPLPGVPAWYTDGSSFIMDGRRQAGAAIVDNKRTVWASNLPEGTSAQKAELIALTQALRLAEGKSINIYTDSRYAFATAHVHGAIYKQRGWLTSAGKDIKNKEEILALLEAIHLPKRVAIIHCPGHQRGTDPVATGNRKADEAAKQAAQSTRILTETTKNAGKRTADGSEFEKRTADGSEFESPKKKAKVE

SEQ ID NO: 1703 - protein, 2122 aa, synthetic construct
MPAAKRVKLDGGDKKYSIGLDIGTNSVGWAVITDEYKVPSKKFKVLGNTDRHSIKKNLIGALLFDSGETAEATRLKRTARRRYTRRKNRICYLQEIFSNEMAKVDDSFFHRLEESFLVEEDKKHERHPIFGNIVDEVAYHEKYPTIYHLRKKLVDSTDKADLRLIYLALAHMIKFRGHFLIEGDLNPDNSDVDKLFIQLVQTYNQLFEENPINASGVDAKAILSARLSKSRRLENLIAQLPGEKKNGLFGNLIALSLGLTPNFKSNFDLAEDAKLQLSKDTYDDDLDNLLAQIGDQYADLFLAAKNLSDAILLSDILRVNTEITKAPLSASMIKRYDEHHQDLTLLKALVRQQLPEKYKEIFFDQSKNGYAGYIDGGASQEEFYKFIKPILEKMDGTEELLVKLNREDLLRKQRTFDNGSIPHQIHLGELHAILRRQEDFYPFLKDNREKIEKILTFRIPYYVGPLARGNSRFAWMTRKSEETITPWNFEEVVDKGASAQSFIERMTNFDKNLPNEKVLPKHSLLYEYFTVYNELTKVKYVTEGMRKPAFLSGEQKKAIVDLLFKTNRKVTVKQLKEDYFKKIECFDSVEISGVEDRFNASLGTYHDLLKIIKDKDFLDNEENEDILEDIVLTLTLFEDREMIEERLKTYAHLFDDKVMKQLKRRRYTGWGRLSRKLINGIRDKQSGKTILDFLKSDGFANRNFMQLIHDDSLTFKEDIQKAQVSGQGDSLHEHIANLAGSPAIKKGILQTVKVVDELVKVMGRHKPENIVIEMARENQTTQKGQKNSRERMKRIEEGIKELGSQILKEHPVENTQLQNEKLYLYYLQNGRDMYVDQELDINRLSDYDVDHIVPQSFLKDDSIDNKVLTRSDKARGKSDNVPSEEVVKKMKNYWRQLLNAKLITQRKFDNLTKAERGGLSELDKAGFIKRQLVETRQITKHVAQILDSRMNTKYDENDKLIREVKVITLKSKLVSDFRKDFQFYKVREINNYHHAHDAYLNAVVGTALIKKYPKLESEFVYGDYKVYDVRKMIAKSEQEIGKATAKYFFYSNIMNFFKTEITLANGEIRKRPLIETNGETGEIVWDKGRDFATVRKVLSMPQVNIVKKTEVQTGGFSKESILPKRNSDKLIARKKDWDPKKYGGFDSPTVAYSVLVVAKVEKGKSKKLKSVKELLGITIMERSSFEKNPIDFLEAKGYKEVKKDLIIKLPKYSLFELENGRKRMLASAGELQKGNELALPSKYVNFLYLASHYEKLKGSPEDNEQKQLFVEQHKHYLDEIIEQISEFSKRVILADANLDKVLSAYNKHRDKPIREQAENIIHLFTLTNLGAPAAFKYFDTTIDRKRYTSTKEVLDATLIHQSITGLYETRIDLSQLGGDGGGGSPAPGGLLGRDLLTKLKAQIQFSTEGPQVTWEDRPAMCLVLNLEEEYRLHEKPVPPSIDPSWLQLFPMVWAEKAGMGLANQVPPVVVELKSDASPVAVRQYPMSKEAREGIRPHIQRFLDLGILVPCQSPWNTPLLPVKKPGTNDYRPVQDLREVNKRVQDIHPTVPNPYNLLSSLPPSHTWYSVLDLKDAFFCLKLHPNSQPLFAFEWRDPEKGNTGQLTWTRLPQGFKNSPTLFNEALHRDLASFRALNPQVVMLQYVDDLLVAAPTYRDCKEGTRRLLQELSKLGYRVSAKKAQLCREEVTYLGYLLKGGKRWLTPARKATVMKIPTPTTPRQVREFLGKAGFCRLFIPGFASLAAPLYPLTRPKVPFTWTEAHQEAFGRIKEALLSAPALALPDLTKPFALYVDEKEGVARGVLTQTLGPWRRPVAYLSKKLDPVASGWPTCLKAIAAVALLLKDADKLTLGQNVLVIAPHNLESIVRQPPDRWMTNARMTHYQSLLLNERVSFAPPAILNPATLLPVESDDTPIHICSEILAEETGTRPDLRDQPLPGVPAWYTDGSSFIMDGRRQAGAAIVDNKRTVWASNLPEGTSAQKAELIALTQALRLAEGKSINIYTDSRYAFATAHVHGAIYKQRGWLTSAGKDIKNKEEILALLEAIHLPKRVAIIHCPGHQRGTDPVATGNRKADEAAKQAAQSTRILTETTKNAGKRTADGSEFEKRTADGSEFESPKKKAKVE

SEQ ID NO: 1704 - protein, 2127 aa, synthetic construct
MPAAKRVKLDGGDKKYSIGLDIGTNSVGWAVITDEYKVPSKKFKVLGNTDRHSIKKNLIGALLFDSGETAEATRLKRTARRRYTRRKNRICYLQEIFSNEMAKVDDSFFHRLEESFLVEEDKKHERHPIFGNIVDEVAYHEKYPTIYHLRKKLVDSTDKADLRLIYLALAHMIKFRGHFLIEGDLNPDNSDVDKLFIQLVQTYNQLFEENPINASGVDAKAILSARLSKSRRLENLIAQLPGEKKNGLFGNLIALSLGLTPNFKSNFDLAEDAKLQLSKDTYDDDLDNLLAQIGDQYADLFLAAKNLSDAILLSDILRVNTEITKAPLSASMIKRYDEHHQDLTLLKALVRQQLPEKYKEIFFDQSKNGYAGYIDGGASQEEFYKFIKPILEKMDGTEELLVKLNREDLLRKQRTFDNGSIPHQIHLGELHAILRRQEDFYPFLKDNREKIEKILTFRIPYYVGPLARGNSRFAWMTRKSEETITPWNFEEVVDKGASAQSFIERMTNFDKNLPNEKVLPKHSLLYEYFTVYNELTKVKYVTEGMRKPAFLSGEQKKAIVDLLFKTNRKVTVKQLKEDYFKKIECFDSVEISGVEDRFNASLGTYHDLLKIIKDKDFLDNEENEDILEDIVLTLTLFEDREMIEERLKTYAHLFDDKVMKQLKRRRYTGWGRLSRKLINGIRDKQSGKTILDFLKSDGFANRNFMQLIHDDSLTFKEDIQKAQVSGQGDSLHEHIANLAGSPAIKKGILQTVKVVDELVKVMGRHKPENIVIEMARENQTTQKGQKNSRERMKRIEEGIKELGSQILKEHPVENTQLQNEKLYLYYLQNGRDMYVDQELDINRLSDYDVDHIVPQSFLKDDSIDNKVLTRSDKARGKSDNVPSEEVVKKMKNYWRQLLNAKLITQRKFDNLTKAERGGLSELDKAGFIKRQLVETRQITKHVAQILDSRMNTKYDENDKLIREVKVITLKSKLVSDFRKDFQFYKVREINNYHHAHDAYLNAVVGTALIKKYPKLESEFVYGDYKVYDVRKMIAKSEQEIGKATAKYFFYSNIMNFFKTEITLANGEIRKRPLIETNGETGEIVWDKGRDFATVRKVLSMPQVNIVKKTEVQTGGFSKESILPKRNSDKLIARKKDWDPKKYGGFDSPTVAYSVLVVAKVEKGKSKKLKSVKELLGITIMERSSFEKNPIDFLEAKGYKEVKKDLIIKLPKYSLFELENGRKRMLASAGELQKGNELALPSKYVNFLYLASHYEKLKGSPEDNEQKQLFVEQHKHYLDEIIEQISEFSKRVILADANLDKVLSAYNKHRDKPIREQAENIIHLFTLTNLGAPAAFKYFDTTIDRKRYTSTKEVLDATLIHQSITGLYETRIDLSQLGGDGGGGSEAAAKPAPGGLLGRDLLTKLKAQIQFSTEGPQVTWEDRPAMCLVLNLEEEYRLHEKPVPPSIDPSWLQLFPMVWAEKAGMGLANQVPPVVVELKSDASPVAVRQYPMSKEAREGIRPHIQRFLDLGILVPCQSPWNTPLLPVKKPGTNDYRPVQDLREVNKRVQDIHPTVPNPYNLLSSLPPSHTWYSVLDLKDAFFCLKLHPNSQPLFAFEWRDPEKGNTGQLTWTRLPQGFKNSPTLFNEALHRDLASFRALNPQVVMLQYVDDLLVAAPTYRDCKEGTRRLLQELSKLGYRVSAKKAQLCREEVTYLGYLLKGGKRWLTPARKATVMKIPTPTTPRQVREFLGKAGFCRLFIPGFASLAAPLYPLTRPKVPFTWTEAHQEAFGRIKEALLSAPALALPDLTKPFALYVDEKEGVARGVLTQTLGPWRRPVAYLSKKLDPVASGWPTCLKAIAAVALLLKDADKLTLGQNVLVIAPHNLESIVRQPPDRWMTNARMTHYQSLLLNERVSFAPPAILNPATLLPVESDDTPIHICSEILAEETGTRPDLRDQPLPGVPAWYTDGSSFIMDGRRQAGAAIVDNKRTVWASNLPEGTSAQKAELIALTQALRLAEGKSINIYTDSRYAFATAHVHGAIYKQRGWLTSAGKDIKNKEEILALLEAIHLPKRVAIIHCPGHQRGTDPVATGNRKADEAAKQAAQSTRILTETTKNAGKRTADGSEFEKRTADGSEFESPKKKAKVE

SEQ ID NO: 1705 - protein, 2121 aa, synthetic construct
MPAAKRVKLDGGDKKYSIGLDIGTNSVGWAVITDEYKVPSKKFKVLGNTDRHSIKKNLIGALLFDSGETAEATRLKRTARRRYTRRKNRICYLQEIFSNEMAKVDDSFFHRLEESFLVEEDKKHERHPIFGNIVDEVAYHEKYPTIYHLRKKLVDSTDKADLRLIYLALAHMIKFRGHFLIEGDLNPDNSDVDKLFIQLVQTYNQLFEENPINASGVDAKAILSARLSKSRRLENLIAQLPGEKKNGLFGNLIALSLGLTPNFKSNFDLAEDAKLQLSKDTYDDDLDNLLAQIGDQYADLFLAAKNLSDAILLSDILRVNTEITKAPLSASMIKRYDEHHQDLTLLKALVRQQLPEKYKEIFFDQSKNGYAGYIDGGASQEEFYKFIKPILEKMDGTEELLVKLNREDLLRKQRTFDNGSIPHQIHLGELHAILRRQEDFYPFLKDNREKIEKILTFRIPYYVGPLARGNSRFAWMTRKSEETITPWNFEEVVDKGASAQSFIERMTNFDKNLPNEKVLPKHSLLYEYFTVYNELTKVKYVTEGMRKPAFLSGEQKKAIVDLLFKTNRKVTVKQLKEDYFKKIECFDSVEISGVEDRFNASLGTYHDLLKIIKDKDFLDNEENEDILEDIVLTLTLFEDREMIEERLKTYAHLFDDKVMKQLKRRRYTGWGRLSRKLINGIRDKQSGKTILDFLKSDGFANRNFMQLIHDDSLTFKEDIQKAQVSGQGDSLHEHIANLAGSPAIKKGILQTVKVVDELVKVMGRHKPENIVIEMARENQTTQKGQKNSRERMKRIEEGIKELGSQILKEHPVENTQLQNEKLYLYYLQNGRDMYVDQELDINRLSDYDVDHIVPQSFLKDDSIDNKVLTRSDKARGKSDNVPSEEVVKKMKNYWRQLLNAKLITQRKFDNLTKAERGGLSELDKAGFIKRQLVETRQITKHVAQILDSRMNTKYDENDKLIREVKVITLKSKLVSDFRKDFQFYKVREINNYHHAHDAYLNAVVGTALIKKYPKLESEFVYGDYKVYDVRKMIAKSEQEIGKATAKYFFYSNIMNFFKTEITLANGEIRKRPLIETNGETGEIVWDKGRDFATVRKVLSMPQVNIVKKTEVQTGGFSKESILPKRNSDKLIARKKDWDPKKYGGFDSPTVAYSVLVVAKVEKGKSKKLKSVKELLGITIMERSSFEKNPIDFLEAKGYKEVKKDLIIKLPKYSLFELENGRKRMLASAGELQKGNELALPSKYVNFLYLASHYEKLKGSPEDNEQKQLFVEQHKHYLDEIIEQISEFSKRVILADANLDKVLSAYNKHRDKPIREQAENIIHLFTLTNLGAPAAFKYFDTTIDRKRYTSTKEVLDATLIHQSITGLYETRIDLSQLGGDGGGGGGSGGLLGRDLLTKLKAQIQFSTEGPQVTWEDRPAMCLVLNLEEEYRLHEKPVPPSIDPSWLQLFPMVWAEKAGMGLANQVPPVVVELKSDASPVAVRQYPMSKEAREGIRPHIQRFLDLGILVPCQSPWNTPLLPVKKPGTNDYRPVQDLREVNKRVQDIHPTVPNPYNLLSSLPPSHTWYSVLDLKDAFFCLKLHPNSQPLFAFEWRDPEKGNTGQLTWTRLPQGFKNSPTLFNEALHRDLASFRALNPQVVMLQYVDDLLVAAPTYRDCKEGTRRLLQELSKLGYRVSAKKAQLCREEVTYLGYLLKGGKRWLTPARKATVMKIPTPTTPRQVREFLGKAGFCRLFIPGFASLAAPLYPLTRPKVPFTWTEAHQEAFGRIKEALLSAPALALPDLTKPFALYVDEKEGVARGVLTQTLGPWRRPVAYLSKKLDPVASGWPTCLKAIAAVALLLKDADKLTLGQNVLVIAPHNLESIVRQPPDRWMTNARMTHYQSLLLNERVSFAPPAILNPATLLPVESDDTPIHICSEILAEETGTRPDLRDQPLPGVPAWYTDGSSFIMDGRRQAGAAIVDNKRTVWASNLPEGTSAQKAELIALTQALRLAEGKSINIYTDSRYAFATAHVHGAIYKQRGWLTSAGKDIKNKEEILALLEAIHLPKRVAIIHCPGHQRGTDPVATGNRKADEAAKQAAQSTRILTETTKNAGKRTADGSEFEKRTADGSEFESPKKKAKVE

SEQ ID NO: 1706 - protein, 2146 aa, synthetic construct
MPAAKRVKLDGGDKKYSIGLDIGTNSVGWAVITDEYKVPSKKFKVLGNTDRHSIKKNLIGALLFDSGETAEATRLKRTARRRYTRRKNRICYLQEIFSNEMAKVDDSFFHRLEESFLVEEDKKHERHPIFGNIVDEVAYHEKYPTIYHLRKKLVDSTDKADLRLIYLALAHMIKFRGHFLIEGDLNPDNSDVDKLFIQLVQTYNQLFEENPINASGVDAKAILSARLSKSRRLENLIAQLPGEKKNGLFGNLIALSLGLTPNFKSNFDLAEDAKLQLSKDTYDDDLDNLLAQIGDQYADLFLAAKNLSDAILLSDILRVNTEITKAPLSASMIKRYDEHHQDLTLLKALVRQQLPEKYKEIFFDQSKNGYAGYIDGGASQEEFYKFIKPILEKMDGTEELLVKLNREDLLRKQRTFDNGSIPHQIHLGELHAILRRQEDFYPFLKDNREKIEKILTFRIPYYVGPLARGNSRFAWMTRKSEETITPWNFEEVVDKGASAQSFIERMTNFDKNLPNEKVLPKHSLLYEYFTVYNELTKVKYVTEGMRKPAFLSGEQKKAIVDLLFKTNRKVTVKQLKEDYFKKIECFDSVEISGVEDRFNASLGTYHDLLKIIKDKDFLDNEENEDILEDIVLTLTLFEDREMIEERLKTYAHLFDDKVMKQLKRRRYTGWGRLSRKLINGIRDKQSGKTILDFLKSDGFANRNFMQLIHDDSLTFKEDIQKAQVSGQGDSLHEHIANLAGSPAIKKGILQTVKVVDELVKVMGRHKPENIVIEMARENQTTQKGQKNSRERMKRIEEGIKELGSQILKEHPVENTQLQNEKLYLYYLQNGRDMYVDQELDINRLSDYDVDHIVPQSFLKDDSIDNKVLTRSDKARGKSDNVPSEEVVKKMKNYWRQLLNAKLITQRKFDNLTKAERGGLSELDKAGFIKRQLVETRQITKHVAQILDSRMNTKYDENDKLIREVKVITLKSKLVSDFRKDFQFYKVREINNYHHAHDAYLNAVVGTALIKKYPKLESEFVYGDYKVYDVRKMIAKSEQEIGKATAKYFFYSNIMNFFKTEITLANGEIRKRPLIETNGETGEIVWDKGRDFATVRKVLSMPQVNIVKKTEVQTGGFSKESILPKRNSDKLIARKKDWDPKKYGGFDSPTVAYSVLVVAKVEKGKSKKLKSVKELLGITIMERSSFEKNPIDFLEAKGYKEVKKDLIIKLPKYSLFELENGRKRMLASAGELQKGNELALPSKYVNFLYLASHYEKLKGSPEDNEQKQLFVEQHKHYLDEIIEQISEFSKRVILADANLDKVLSAYNKHRDKPIREQAENIIHLFTLTNLGAPAAFKYFDTTIDRKRYTSTKEVLDATLIHQSITGLYETRIDLSQLGGDGGEAAAKEAAAKEAAAKEAAAKEAAAKEAAAKGGLLGRDLLTKLKAQIQFSTEGPQVTWEDRPAMCLVLNLEEEYRLHEKPVPPSIDPSWLQLFPMVWAEKAGMGLANQVPPVVVELKSDASPVAVRQYPMSKEAREGIRPHIQRFLDLGILVPCQSPWNTPLLPVKKPGTNDYRPVQDLREVNKRVQDIHPTVPNPYNLLSSLPPSHTWYSVLDLKDAFFCLKLHPNSQPLFAFEWRDPEKGNTGQLTWTRLPQGFKNSPTLFNEALHRDLASFRALNPQVVMLQYVDDLLVAAPTYRDCKEGTRRLLQELSKLGYRVSAKKAQLCREEVTYLGYLLKGGKRWLTPARKATVMKIPTPTTPRQVREFLGKAGFCRLFIPGFASLAAPLYPLTRPKVPFTWTEAHQEAFGRIKEALLSAPALALPDLTKPFALYVDEKEGVARGVLTQTLGPWRRPVAYLSKKLDPVASGWPTCLKAIAAVALLLKDADKLTLGQNVLVIAPHNLESIVRQPPDRWMTNARMTHYQSLLLNERVSFAPPAILNPATLLPVESDDTPIHICSEILAEETGTRPDLRDQPLPGVPAWYTDGSSFIMDGRRQAGAAIVDNKRTVWASNLPEGTSAQKAELIALTQALRLAEGKSINIYTDSRYAFATAHVHGAIYKQRGWLTSAGKDIKNKEEILALLEAIHLPKRVAIIHCPGHQRGTDPVATGNRKADEAAKQAAQSTRILTETTKNAGKRTADGSEFEKRTADGSEFESPKKKAKVE

SEQ ID NO: 1707 - protein, 2122 aa, synthetic construct
MPAAKRVKLDGGDKKYSIGLDIGTNSVGWAVITDEYKVPSKKFKVLGNTDRHSIKKNLIGALLFDSGETAEATRLKRTARRRYTRRKNRICYLQEIFSNEMAKVDDSFFHRLEESFLVEEDKKHERHPIFGNIVDEVAYHEKYPTIYHLRKKLVDSTDKADLRLIYLALAHMIKFRGHFLIEGDLNPDNSDVDKLFIQLVQTYNQLFEENPINASGVDAKAILSARLSKSRRLENLIAQLPGEKKNGLFGNLIALSLGLTPNFKSNFDLAEDAKLQLSKDTYDDDLDNLLAQIGDQYADLFLAAKNLSDAILLSDILRVNTEITKAPLSASMIKRYDEHHQDLTLLKALVRQQLPEKYKEIFFDQSKNGYAGYIDGGASQEEFYKFIKPILEKMDGTEELLVKLNREDLLRKQRTFDNGSIPHQIHLGELHAILRRQEDFYPFLKDNREKIEKILTFRIPYYVGPLARGNSRFAWMTRKSEETITPWNFEEVVDKGASAQSFIERMTNFDKNLPNEKVLPKHSLLYEYFTVYNELTKVKYVTEGMRKPAFLSGEQKKAIVDLLFKTNRKVTVKQLKEDYFKKIECFDSVEISGVEDRFNASLGTYHDLLKIIKDKDFLDNEENEDILEDIVLTLTLFEDREMIEERLKTYAHLFDDKVMKQLKRRRYTGWGRLSRKLINGIRDKQSGKTILDFLKSDGFANRNFMQLIHDDSLTFKEDIQKAQVSGQGDSLHEHIANLAGSPAIKKGILQTVKVVDELVKVMGRHKPENIVIEMARENQTTQKGQKNSRERMKRIEEGIKELGSQILKEHPVENTQLQNEKLYLYYLQNGRDMYVDQELDINRLSDYDVDHIVPQSFLKDDSIDNKVLTRSDKARGKSDNVPSEEVVKKMKNYWRQLLNAKLITQRKFDNLTKAERGGLSELDKAGFIKRQLVETRQITKHVAQILDSRMNTKYDENDKLIREVKVITLKSKLVSDFRKDFQFYKVREINNYHHAHDAYLNAVVGTALIKKYPKLESEFVYGDYKVYDVRKMIAKSEQEIGKATAKYFFYSNIMNFFKTEITLANGEIRKRPLIETNGETGEIVWDKGRDFATVRKVLSMPQVNIVKKTEVQTGGFSKESILPKRNSDKLIARKKDWDPKKYGGFDSPTVAYSVLVVAKVEKGKSKKLKSVKELLGITIMERSSFEKNPIDFLEAKGYKEVKKDLIIKLPKYSLFELENGRKRMLASAGELQKGNELALPSKYVNFLYLASHYEKLKGSPEDNEQKQLFVEQHKHYLDEIIEQISEFSKRVILADANLDKVLSAYNKHRDKPIREQAENIIHLFTLTNLGAPAAFKYFDTTIDRKRYTSTKEVLDATLIHQSITGLYETRIDLSQLGGDGGGGGGGGGGLLGRDLLTKLKAQIQFSTEGPQVTWEDRPAMCLVLNLEEEYRLHEKPVPPSIDPSWLQLFPMVWAEKAGMGLANQVPPVVVELKSDASPVAVRQYPMSKEAREGIRPHIQRFLDLGILVPCQSPWNTPLLPVKKPGTNDYRPVQDLREVNKRVQDIHPTVPNPYNLLSSLPPSHTWYSVLDLKDAFFCLKLHPNSQPLFAFEWRDPEKGNTGQLTWTRLPQGFKNSPTLFNEALHRDLASFRALNPQVVMLQYVDDLLVAAPTYRDCKEGTRRLLQELSKLGYRVSAKKAQLCREEVTYLGYLLKGGKRWLTPARKATVMKIPTPTTPRQVREFLGKAGFCRLFIPGFASLAAPLYPLTRPKVPFTWTEAHQEAFGRIKEALLSAPALALPDLTKPFALYVDEKEGVARGVLTQTLGPWRRPVAYLSKKLDPVASGWPTCLKAIAAVALLLKDADKLTLGQNVLVIAPHNLESIVRQPPDRWMTNARMTHYQSLLLNERVSFAPPAILNPATLLPVESDDTPIHICSEILAEETGTRPDLRDQPLPGVPAWYTDGSSFIMDGRRQAGAAIVDNKRTVWASNLPEGTSAQKAELIALTQALRLAEGKSINIYTDSRYAFATAHVHGAIYKQRGWLTSAGKDIKNKEEILALLEAIHLPKRVAIIHCPGHQRGTDPVATGNRKADEAAKQAAQSTRILTETTKNAGKRTADGSEFEKRTADGSEFESPKKKAKVE

SEQ ID NO: 1708 - protein, 2127 aa, synthetic construct
MPAAKRVKLDGGDKKYSIGLDIGTNSVGWAVITDEYKVPSKKFKVLGNTDRHSIKKNLIGALLFDSGETAEATRLKRTARRRYTRRKNRICYLQEIFSNEMAKVDDSFFHRLEESFLVEEDKKHERHPIFGNIVDEVAYHEKYPTIYHLRKKLVDSTDKADLRLIYLALAHMIKFRGHFLIEGDLNPDNSDVDKLFIQLVQTYNQLFEENPINASGVDAKAILSARLSKSRRLENLIAQLPGEKKNGLFGNLIALSLGLTPNFKSNFDLAEDAKLQLSKDTYDDDLDNLLAQIGDQYADLFLAAKNLSDAILLSDILRVNTEITKAPLSASMIKRYDEHHQDLTLLKALVRQQLPEKYKEIFFDQSKNGYAGYIDGGASQEEFYKFIKPILEKMDGTEELLVKLNREDLLRKQRTFDNGSIPHQIHLGELHAILRRQEDFYPFLKDNREKIEKILTFRIPYYVGPLARGNSRFAWMTRKSEETITPWNFEEVVDKGASAQSFIERMTNFDKNLPNEKVLPKHSLLYEYFTVYNELTKVKYVTEGMRKPAFLSGEQKKAIVDLLFKTNRKVTVKQLKEDYFKKIECFDSVEISGVEDRFNASLGTYHDLLKIIKDKDFLDNEENEDILEDIVLTLTLFEDREMIEERLKTYAHLFDDKVMKQLKRRRYTGWGRLSRKLINGIRDKQSGKTILDFLKSDGFANRNFMQLIHDDSLTFKEDIQKAQVSGQGDSLHEHIANLAGSPAIKKGILQTVKVVDELVKVMGRHKPENIVIEMARENQTTQKGQKNSRERMKRIEEGIKELGSQILKEHPVENTQLQNEKLYLYYLQNGRDMYVDQELDINRLSDYDVDHIVPQSFLKDDSIDNKVLTRSDKARGKSDNVPSEEVVKKMKNYWRQLLNAKLITQRKFDNLTKAERGGLSELDKAGFIKRQLVETRQITKHVAQILDSRMNTKYDENDKLIREVKVITLKSKLVSDFRKDFQFYKVREINNYHHAHDAYLNAVVGTALIKKYPKLESEFVYGDYKVYDVRKMIAKSEQEIGKATAKYFFYSNIMNFFKTEITLANGEIRKRPLIETNGETGEIVWDKGRDFATVRKVLSMPQVNIVKKTEVQTGGFSKESILPKRNSDKLIARKKDWDPKKYGGFDSPTVAYSVLVVAKVEKGKSKKLKSVKELLGITIMERSSFEKNPIDFLEAKGYKEVKKDLIIKLPKYSLFELENGRKRMLASAGELQKGNELALPSKYVNFLYLASHYEKLKGSPEDNEQKQLFVEQHKHYLDEIIEQISEFSKRVILADANLDKVLSAYNKHRDKPIREQAENIIHLFTLTNLGAPAAFKYFDTTIDRKRYTSTKEVLDATLIHQSITGLYETRIDLSQLGGDGGGSSGGGEAAAKGGLLGRDLLTKLKAQIQFSTEGPQVTWEDRPAMCLVLNLEEEYRLHEKPVPPSIDPSWLQLFPMVWAEKAGMGLANQVPPVVVELKSDASPVAVRQYPMSKEAREGIRPHIQRFLDLGILVPCQSPWNTPLLPVKKPGTNDYRPVQDLREVNKRVQDIHPTVPNPYNLLSSLPPSHTWYSVLDLKDAFFCLKLHPNSQPLFAFEWRDPEKGNTGQLTWTRLPQGFKNSPTLFNEALHRDLASFRALNPQVVMLQYVDDLLVAAPTYRDCKEGTRRLLQELSKLGYRVSAKKAQLCREEVTYLGYLLKGGKRWLTPARKATVMKIPTPTTPRQVREFLGKAGFCRLFIPGFASLAAPLYPLTRPKVPFTWTEAHQEAFGRIKEALLSAPALALPDLTKPFALYVDEKEGVARGVLTQTLGPWRRPVAYLSKKLDPVASGWPTCLKAIAAVALLLKDADKLTLGQNVLVIAPHNLESIVRQPPDRWMTNARMTHYQSLLLNERVSFAPPAILNPATLLPVESDDTPIHICSEILAEETGTRPDLRDQPLPGVPAWYTDGSSFIMDGRRQAGAAIVDNKRTVWASNLPEGTSAQKAELIALTQALRLAEGKSINIYTDSRYAFATAHVHGAIYKQRGWLTSAGKDIKNKEEILALLEAIHLPKRVAIIHCPGHQRGTDPVATGNRKADEAAKQAAQSTRILTETTKNAGKRTADGSEFEKRTADGSEFESPKKKAKVE

SEQ ID NO: 1709 - protein, 2124 aa, synthetic construct
MPAAKRVKLDGGDKKYSIGLDIGTNSVGWAVITDEYKVPSKKFKVLGNTDRHSIKKNLIGALLFDSGETAEATRLKRTARRRYTRRKNRICYLQEIFSNEMAKVDDSFFHRLEESFLVEEDKKHERHPIFGNIVDEVAYHEKYPTIYHLRKKLVDSTDKADLRLIYLALAHMIKFRGHFLIEGDLNPDNSDVDKLFIQLVQTYNQLFEENPINASGVDAKAILSARLSKSRRLENLIAQLPGEKKNGLFGNLIALSLGLTPNFKSNFDLAEDAKLQLSKDTYDDDLDNLLAQIGDQYADLFLAAKNLSDAILLSDILRVNTEITKAPLSASMIKRYDEHHQDLTLLKALVRQQLPEKYKEIFFDQSKNGYAGYIDGGASQEEFYKFIKPILEKMDGTEELLVKLNREDLLRKQRTFDNGSIPHQIHLGELHAILRRQEDFYPFLKDNREKIEKILTFRIPYYVGPLARGNSRFAWMTRKSEETITPWNFEEVVDKGASAQSFIERMTNFDKNLPNEKVLPKHSLLYEYFTVYNELTKVKYVTEGMRKPAFLSGEQKKAIVDLLFKTNRKVTVKQLKEDYFKKIECFDSVEISGVEDRFNASLGTYHDLLKIIKDKDFLDNEENEDILEDIVLTLTLFEDREMIEERLKTYAHLFDDKVMKQLKRRRYTGWGRLSRKLINGIRDKQSGKTILDFLKSDGFANRNFMQLIHDDSLTFKEDIQKAQVSGQGDSLHEHIANLAGSPAIKKGILQTVKVVDELVKVMGRHKPENIVIEMARENQTTQKGQKNSRERMKRIEEGIKELGSQILKEHPVENTQLQNEKLYLYYLQNGRDMYVDQELDINRLSDYDVDHIVPQSFLKDDSIDNKVLTRSDKARGKSDNVPSEEVVKKMKNYWRQLLNAKLITQRKFDNLTKAERGGLSELDKAGFIKRQLVETRQITKHVAQILDSRMNTKYDENDKLIREVKVITLKSKLVSDFRKDFQFYKVREINNYHHAHDAYLNAVVGTALIKKYPKLESEFVYGDYKVYDVRKMIAKSEQEIGKATAKYFFYSNIMNFFKTEITLANGEIRKRPLIETNGETGEIVWDKGRDFATVRKVLSMPQVNIVKKTEVQTGGFSKESILPKRNSDKLIARKKDWDPKKYGGFDSPTVAYSVLVVAKVEKGKSKKLKSVKELLGITIMERSSFEKNPIDFLEAKGYKEVKKDLIIKLPKYSLFELENGRKRMLASAGELQKGNELALPSKYVNFLYLASHYEKLKGSPEDNEQKQLFVEQHKHYLDEIIEQISEFSKRVILADANLDKVLSAYNKHRDKPIREQAENIIHLFTLTNLGAPAAFKYFDTTIDRKRYTSTKEVLDATLIHQSITGLYETRIDLSQLGGDGGGSSEAAAKGGLLGRDLLTKLKAQIQFSTEGPQVTWEDRPAMCLVLNLEEEYRLHEKPVPPSIDPSWLQLFPMVWAEKAGMGLANQVPPVVVELKSDASPVAVRQYPMSKEAREGIRPHIQRFLDLGILVPCQSPWNTPLLPVKKPGTNDYRPVQDLREVNKRVQDIHPTVPNPYNLLSSLPPSHTWYSVLDLKDAFFCLKLHPNSQPLFAFEWRDPEKGNTGQLTWTRLPQGFKNSPTLFNEALHRDLASFRALNPQVVMLQYVDDLLVAAPTYRDCKEGTRRLLQELSKLGYRVSAKKAQLCREEVTYLGYLLKGGKRWLTPARKATVMKIPTPTTPRQVREFLGKAGFCRLFIPGFASLAAPLYPLTRPKVPFTWTEAHQEAFGRIKEALLSAPALALPDLTKPFALYVDEKEGVARGVLTQTLGPWRRPVAYLSKKLDPVASGWPTCLKAIAAVALLLKDADKLTLGQNVLVIAPHNLESIVRQPPDRWMTNARMTHYQSLLLNERVSFAPPAILNPATLLPVESDDTPIHICSEILAEETGTRPDLRDQPLPGVPAWYTDGSSFIMDGRRQAGAAIVDNKRTVWASNLPEGTSAQKAELIALTQALRLAEGKSINIYTDSRYAFATAHVHGAIYKQRGWLTSAGKDIKNKEEILALLEAIHLPKRVAIIHCPGHQRGTDPVATGNRKADEAAKQAAQSTRILTETTKNAGKRTADGSEFEKRTADGSEFESPKKKAKVE

SEQ ID NO: 1710 - protein, 2125 aa, synthetic construct
MPAAKRVKLDGGDKKYSIGLDIGTNSVGWAVITDEYKVPSKKFKVLGNTDRHSIKKNLIGALLFDSGETAEATRLKRTARRRYTRRKNRICYLQEIFSNEMAKVDDSFFHRLEESFLVEEDKKHERHPIFGNIVDEVAYHEKYPTIYHLRKKLVDSTDKADLRLIYLALAHMIKFRGHFLIEGDLNPDNSDVDKLFIQLVQTYNQLFEENPINASGVDAKAILSARLSKSRRLENLIAQLPGEKKNGLFGNLIALSLGLTPNFKSNFDLAEDAKLQLSKDTYDDDLDNLLAQIGDQYADLFLAAKNLSDAILLSDILRVNTEITKAPLSASMIKRYDEHHQDLTLLKALVRQQLPEKYKEIFFDQSKNGYAGYIDGGASQEEFYKFIKPILEKMDGTEELLVKLNREDLLRKQRTFDNGSIPHQIHLGELHAILRRQEDFYPFLKDNREKIEKILTFRIPYYVGPLARGNSRFAWMTRKSEETITPWNFEEVVDKGASAQSFIERMTNFDKNLPNEKVLPKHSLLYEYFTVYNELTKVKYVTEGMRKPAFLSGEQKKAIVDLLFKTNRKVTVKQLKEDYFKKIECFDSVEISGVEDRFNASLGTYHDLLKIIKDKDFLDNEENEDILEDIVLTLTLFEDREMIEERLKTYAHLFDDKVMKQLKRRRYTGWGRLSRKLINGIRDKQSGKTILDFLKSDGFANRNFMQLIHDDSLTFKEDIQKAQVSGQGDSLHEHIANLAGSPAIKKGILQTVKVVDELVKVMGRHKPENIVIEMARENQTTQKGQKNSRERMKRIEEGIKELGSQILKEHPVENTQLQNEKLYLYYLQNGRDMYVDQELDINRLSDYDVDHIVPQSFLKDDSIDNKVLTRSDKARGKSDNVPSEEVVKKMKNYWRQLLNAKLITQRKFDNLTKAERGGLSELDKAGFIKRQLVETRQITKHVAQILDSRMNTKYDENDKLIREVKVITLKSKLVSDFRKDFQFYKVREINNYHHAHDAYLNAVVGTALIKKYPKLESEFVYGDYKVYDVRKMIAKSEQEIGKATAKYFFYSNIMNFFKTEITLANGEIRKRPLIETNGETGEIVWDKGRDFATVRKVLSMPQVNIVKKTEVQTGGFSKESILPKRNSDKLIARKKDWDPKKYGGFDSPTVAYSVLVVAKVEKGKSKKLKSVKELLGITIMERSSFEKNPIDFLEAKGYKEVKKDLIIKLPKYSLFELENGRKRMLASAGELQKGNELALPSKYVNFLYLASHYEKLKGSPEDNEQKQLFVEQHKHYLDEIIEQISEFSKRVILADANLDKVLSAYNKHRDKPIREQAENIIHLFTLTNLGAPAAFKYFDTTIDRKRYTSTKEVLDATLIHQSITGLYETRIDLSQLGGDGGGGGPAPGGSGGLLGRDLLTKLKAQIQFSTEGPQVTWEDRPAMCLVLNLEEEYRLHEKPVPPSIDPSWLQLFPMVWAEKAGMGLANQVPPVVVELKSDASPVAVRQYPMSKEAREGIRPHIQRFLDLGILVPCQSPWNTPLLPVKKPGTNDYRPVQDLREVNKRVQDIHPTVPNPYNLLSSLPPSHTWYSVLDLKDAFFCLKLHPNSQPLFAFEWRDPEKGNTGQLTWTRLPQGFKNSPTLFNEALHRDLASFRALNPQVVMLQYVDDLLVAAPTYRDCKEGTRRLLQELSKLGYRVSAKKAQLCREEVTYLGYLLKGGKRWLTPARKATVMKIPTPTTPRQVREFLGKAGFCRLFIPGFASLAAPLYPLTRPKVPFTWTEAHQEAFGRIKEALLSAPALALPDLTKPFALYVDEKEGVARGVLTQTLGPWRRPVAYLSKKLDPVASGWPTCLKAIAAVALLLKDADKLTLGQNVLVIAPHNLESIVRQPPDRWMTNARMTHYQSLLLNERVSFAPPAILNPATLLPVESDDTPIHICSEILAEETGTRPDLRDQPLPGVPAWYTDGSSFIMDGRRQAGAAIVDNKRTVWASNLPEGTSAQKAELIALTQALRLAEGKSINIYTDSRYAFATAHVHGAIYKQRGWLTSAGKDIKNKEEILALLEAIHLPKRVAIIHCPGHQRGTDPVATGNRKADEAAKQAAQSTRILTETTKNAGKRTADGSEFEKRTADGSEFESPKKKAKVE

SEQ ID NO: 1711 - protein, 2127 aa, synthetic construct
MPAAKRVKLDGGDKKYSIGLDIGTNSVGWAVITDEYKVPSKKFKVLGNTDRHSIKKNLIGALLFDSGETAEATRLKRTARRRYTRRKNRICYLQEIFSNEMAKVDDSFFHRLEESFLVEEDKKHERHPIFGNIVDEVAYHEKYPTIYHLRKKLVDSTDKADLRLIYLALAHMIKFRGHFLIEGDLNPDNSDVDKLFIQLVQTYNQLFEENPINASGVDAKAILSARLSKSRRLENLIAQLPGEKKNGLFGNLIALSLGLTPNFKSNFDLAEDAKLQLSKDTYDDDLDNLLAQIGDQYADLFLAAKNLSDAILLSDILRVNTEITKAPLSASMIKRYDEHHQDLTLLKALVRQQLPEKYKEIFFDQSKNGYAGYIDGGASQEEFYKFIKPILEKMDGTEELLVKLNREDLLRKQRTFDNGSIPHQIHLGELHAILRRQEDFYPFLKDNREKIEKILTFRIPYYVGPLARGNSRFAWMTRKSEETITPWNFEEVVDKGASAQSFIERMTNFDKNLPNEKVLPKHSLLYEYFTVYNELTKVKYVTEGMRKPAFLSGEQKKAIVDLLFKTNRKVTVKQLKEDYFKKIECFDSVEISGVEDRFNASLGTYHDLLKIIKDKDFLDNEENEDILEDIVLTLTLFEDREMIEERLKTYAHLFDDKVMKQLKRRRYTGWGRLSRKLINGIRDKQSGKTILDFLKSDGFANRNFMQLIHDDSLTFKEDIQKAQVSGQGDSLHEHIANLAGSPAIKKGILQTVKVVDELVKVMGRHKPENIVIEMARENQTTQKGQKNSRERMKRIEEGIKELGSQILKEHPVENTQLQNEKLYLYYLQNGRDMYVDQELDINRLSDYDVDHIVPQSFLKDDSIDNKVLTRSDKARGKSDNVPSEEVVKKMKNYWRQLLNAKLITQRKFDNLTKAERGGLSELDKAGFIKRQLVETRQITKHVAQILDSRMNTKYDENDKLIREVKVITLKSKLVSDFRKDFQFYKVREINNYHHAHDAYLNAVVGTALIKKYPKLESEFVYGDYKVYDVRKMIAKSEQEIGKATAKYFFYSNIMNFFKTEITLANGEIRKRPLIETNGETGEIVWDKGRDFATVRKVLSMPQVNIVKKTEVQTGGFSKESILPKRNSDKLIARKKDWDPKKYGGFDSPTVAYSVLVVAKVEKGKSKKLKSVKELLGITIMERSSFEKNPIDFLEAKGYKEVKKDLIIKLPKYSLFELENGRKRMLASAGELQKGNELALPSKYVNFLYLASHYEKLKGSPEDNEQKQLFVEQHKHYLDEIIEQISEFSKRVILADANLDKVLSAYNKHRDKPIREQAENIIHLFTLTNLGAPAAFKYFDTTIDRKRYTSTKEVLDATLIHQSITGLYETRIDLSQLGGDGGGSSEAAAKPAPGGLLGRDLLTKLKAQIQFSTEGPQVTWEDRPAMCLVLNLEEEYRLHEKPVPPSIDPSWLQLFPMVWAEKAGMGLANQVPPVVVELKSDASPVAVRQYPMSKEAREGIRPHIQRFLDLGILVPCQSPWNTPLLPVKKPGTNDYRPVQDLREVNKRVQDIHPTVPNPYNLLSSLPPSHTWYSVLDLKDAFFCLKLHPNSQPLFAFEWRDPEKGNTGQLTWTRLPQGFKNSPTLFNEALHRDLASFRALNPQVVMLQYVDDLLVAAPTYRDCKEGTRRLLQELSKLGYRVSAKKAQLCREEVTYLGYLLKGGKRWLTPARKATVMKIPTPTTPRQVREFLGKAGFCRLFIPGFASLAAPLYPLTRPKVPFTWTEAHQEAFGRIKEALLSAPALALPDLTKPFALYVDEKEGVARGVLTQTLGPWRRPVAYLSKKLDPVASGWPTCLKAIAAVALLLKDADKLTLGQNVLVIAPHNLESIVRQPPDRWMTNARMTHYQSLLLNERVSFAPPAILNPATLLPVESDDTPIHICSEILAEETGTRPDLRDQPLPGVPAWYTDGSSFIMDGRRQAGAAIVDNKRTVWASNLPEGTSAQKAELIALTQALRLAEGKSINIYTDSRYAFATAHVHGAIYKQRGWLTSAGKDIKNKEEILALLEAIHLPKRVAIIHCPGHQRGTDPVATGNRKADEAAKQAAQSTRILTETTKNAGKRTADGSEFEKRTADGSEFESPKKKAKVE

SEQ ID NO: 1712 - protein, 2131 aa, synthetic construct
MPAAKRVKLDGGDKKYSIGLDIGTNSVGWAVITDEYKVPSKKFKVLGNTDRHSIKKNLIGALLFDSGETAEATRLKRTARRRYTRRKNRICYLQEIFSNEMAKVDDSFFHRLEESFLVEEDKKHERHPIFGNIVDEVAYHEKYPTIYHLRKKLVDSTDKADLRLIYLALAHMIKFRGHFLIEGDLNPDNSDVDKLFIQLVQTYNQLFEENPINASGVDAKAILSARLSKSRRLENLIAQLPGEKKNGLFGNLIALSLGLTPNFKSNFDLAEDAKLQLSKDTYDDDLDNLLAQIGDQYADLFLAAKNLSDAILLSDILRVNTEITKAPLSASMIKRYDEHHQDLTLLKALVRQQLPEKYKEIFFDQSKNGYAGYIDGGASQEEFYKFIKPILEKMDGTEELLVKLNREDLLRKQRTFDNGSIPHQIHLGELHAILRRQEDFYPFLKDNREKIEKILTFRIPYYVGPLARGNSRFAWMTRKSEETITPWNFEEVVDKGASAQSFIERMTNFDKNLPNEKVLPKHSLLYEYFTVYNELTKVKYVTEGMRKPAFLSGEQKKAIVDLLFKTNRKVTVKQLKEDYFKKIECFDSVEISGVEDRFNASLGTYHDLLKIIKDKDFLDNEENEDILEDIVLTLTLFEDREMIEERLKTYAHLFDDKVMKQLKRRRYTGWGRLSRKLINGIRDKQSGKTILDFLKSDGFANRNFMQLIHDDSLTFKEDIQKAQVSGQGDSLHEHIANLAGSPAIKKGILQTVKVVDELVKVMGRHKPENIVIEMARENQTTQKGQKNSRERMKRIEEGIKELGSQILKEHPVENTQLQNEKLYLYYLQNGRDMYVDQELDINRLSDYDVDHIVPQSFLKDDSIDNKVLTRSDKARGKSDNVPSEEVVKKMKNYWRQLLNAKLITQRKFDNLTKAERGGLSELDKAGFIKRQLVETRQITKHVAQILDSRMNTKYDENDKLIREVKVITLKSKLVSDFRKDFQFYKVREINNYHHAHDAYLNAVVGTALIKKYPKLESEFVYGDYKVYDVRKMIAKSEQEIGKATAKYFFYSNIMNFFKTEITLANGEIRKRPLIETNGETGEIVWDKGRDFATVRKVLSMPQVNIVKKTEVQTGGFSKESILPKRNSDKLIARKKDWDPKKYGGFDSPTVAYSVLVVAKVEKGKSKKLKSVKELLGITIMERSSFEKNPIDFLEAKGYKEVKKDLIIKLPKYSLFELENGRKRMLASAGELQKGNELALPSKYVNFLYLASHYEKLKGSPEDNEQKQLFVEQHKHYLDEIIEQISEFSKRVILADANLDKVLSAYNKHRDKPIREQAENIIHLFTLTNLGAPAAFKYFDTTIDRKRYTSTKEVLDATLIHQSITGLYETRIDLSQLGGDGGEAAAKGGGGSEAAAKGGLLGRDLLTKLKAQIQFSTEGPQVTWEDRPAMCLVLNLEEEYRLHEKPVPPSIDPSWLQLFPMVWAEKAGMGLANQVPPVVVELKSDASPVAVRQYPMSKEAREGIRPHIQRFLDLGILVPCQSPWNTPLLPVKKPGTNDYRPVQDLREVNKRVQDIHPTVPNPYNLLSSLPPSHTWYSVLDLKDAFFCLKLHPNSQPLFAFEWRDPEKGNTGQLTWTRLPQGFKNSPTLFNEALHRDLASFRALNPQVVMLQYVDDLLVAAPTYRDCKEGTRRLLQELSKLGYRVSAKKAQLCREEVTYLGYLLKGGKRWLTPARKATVMKIPTPTTPRQVREFLGKAGFCRLFIPGFASLAAPLYPLTRPKVPFTWTEAHQEAFGRIKEALLSAPALALPDLTKPFALYVDEKEGVARGVLTQTLGPWRRPVAYLSKKLDPVASGWPTCLKAIAAVALLLKDADKLTLGQNVLVIAPHNLESIVRQPPDRWMTNARMTHYQSLLLNERVSFAPPAILNPATLLPVESDDTPIHICSEILAEETGTRPDLRDQPLPGVPAWYTDGSSFIMDGRRQAGAAIVDNKRTVWASNLPEGTSAQKAELIALTQALRLAEGKSINIYTDSRYAFATAHVHGAIYKQRGWLTSAGKDIKNKEEILALLEAIHLPKRVAIIHCPGHQRGTDPVATGNRKADEAAKQAAQSTRILTETTKNAGKRTADGSEFEKRTADGSEFESPKKKAKVE

SEQ ID NO: 1713 - protein, 2127 aa, synthetic construct
MPAAKRVKLDGGDKKYSIGLDIGTNSVGWAVITDEYKVPSKKFKVLGNTDRHSIKKNLIGALLFDSGETAEATRLKRTARRRYTRRKNRICYLQEIFSNEMAKVDDSFFHRLEESFLVEEDKKHERHPIFGNIVDEVAYHEKYPTIYHLRKKLVDSTDKADLRLIYLALAHMIKFRGHFLIEGDLNPDNSDVDKLFIQLVQTYNQLFEENPINASGVDAKAILSARLSKSRRLENLIAQLPGEKKNGLFGNLIALSLGLTPNFKSNFDLAEDAKLQLSKDTYDDDLDNLLAQIGDQYADLFLAAKNLSDAILLSDILRVNTEITKAPLSASMIKRYDEHHQDLTLLKALVRQQLPEKYKEIFFDQSKNGYAGYIDGGASQEEFYKFIKPILEKMDGTEELLVKLNREDLLRKQRTFDNGSIPHQIHLGELHAILRRQEDFYPFLKDNREKIEKILTFRIPYYVGPLARGNSRFAWMTRKSEETITPWNFEEVVDKGASAQSFIERMTNFDKNLPNEKVLPKHSLLYEYFTVYNELTKVKYVTEGMRKPAFLSGEQKKAIVDLLFKTNRKVTVKQLKEDYFKKIECFDSVEISGVEDRFNASLGTYHDLLKIIKDKDFLDNEENEDILEDIVLTLTLFEDREMIEERLKTYAHLFDDKVMKQLKRRRYTGWGRLSRKLINGIRDKQSGKTILDFLKSDGFANRNFMQLIHDDSLTFKEDIQKAQVSGQGDSLHEHIANLAGSPAIKKGILQTVKVVDELVKVMGRHKPENIVIEMARENQTTQKGQKNSRERMKRIEEGIKELGSQILKEHPVENTQLQNEKLYLYYLQNGRDMYVDQELDINRLSDYDVDHIVPQSFLKDDSIDNKVLTRSDKARGKSDNVPSEEVVKKMKNYWRQLLNAKLITQRKFDNLTKAERGGLSELDKAGFIKRQLVETRQITKHVAQILDSRMNTKYDENDKLIREVKVITLKSKLVSDFRKDFQFYKVREINNYHHAHDAYLNAVVGTALIKKYPKLESEFVYGDYKVYDVRKMIAKSEQEIGKATAKYFFYSNIMNFFKTEITLANGEIRKRPLIETNGETGEIVWDKGRDFATVRKVLSMPQVNIVKKTEVQTGGFSKESILPKRNSDKLIARKKDWDPKKYGGFDSPTVAYSVLVVAKVEKGKSKKLKSVKELLGITIMERSSFEKNPIDFLEAKGYKEVKKDLIIKLPKYSLFELENGRKRMLASAGELQKGNELALPSKYVNFLYLASHYEKLKGSPEDNEQKQLFVEQHKHYLDEIIEQISEFSKRVILADANLDKVLSAYNKHRDKPIREQAENIIHLFTLTNLGAPAAFKYFDTTIDRKRYTSTKEVLDATLIHQSITGLYETRIDLSQLGGDGGGSSGGSEAAAKGGLLGRDLLTKLKAQIQFSTEGPQVTWEDRPAMCLVLNLEEEYRLHEKPVPPSIDPSWLQLFPMVWAEKAGMGLANQVPPVVVELKSDASPVAVRQYPMSKEAREGIRPHIQRFLDLGILVPCQSPWNTPLLPVKKPGTNDYRPVQDLREVNKRVQDIHPTVPNPYNLLSSLPPSHTWYSVLDLKDAFFCLKLHPNSQPLFAFEWRDPEKGNTGQLTWTRLPQGFKNSPTLFNEALHRDLASFRALNPQVVMLQYVDDLLVAAPTYRDCKEGTRRLLQELSKLGYRVSAKKAQLCREEVTYLGYLLKGGKRWLTPARKATVMKIPTPTTPRQVREFLGKAGFCRLFIPGFASLAAPLYPLTRPKVPFTWTEAHQEAFGRIKEALLSAPALALPDLTKPFALYVDEKEGVARGVLTQTLGPWRRPVAYLSKKLDPVASGWPTCLKAIAAVALLLKDADKLTLGQNVLVIAPHNLESIVRQPPDRWMTNARMTHYQSLLLNERVSFAPPAILNPATLLPVESDDTPIHICSEILAEETGTRPDLRDQPLPGVPAWYTDGSSFIMDGRRQAGAAIVDNKRTVWASNLPEGTSAQKAELIALTQALRLAEGKSINIYTDSRYAFATAHVHGAIYKQRGWLTSAGKDIKNKEEILALLEAIHLPKRVAIIHCPGHQRGTDPVATGNRKADEAAKQAAQSTRILTETTKNAGKRTADGSEFEKRTADGSEFESPKKKAKVE

SEQ ID NO: 1714 - protein, 2125 aa, synthetic construct
MPAAKRVKLDGGDKKYSIGLDIGTNSVGWAVITDEYKVPSKKFKVLGNTDRHSIKKNLIGALLFDSGETAEATRLKRTARRRYTRRKNRICYLQEIFSNEMAKVDDSFFHRLEESFLVEEDKKHERHPIFGNIVDEVAYHEKYPTIYHLRKKLVDSTDKADLRLIYLALAHMIKFRGHFLIEGDLNPDNSDVDKLFIQLVQTYNQLFEENPINASGVDAKAILSARLSKSRRLENLIAQLPGEKKNGLFGNLIALSLGLTPNFKSNFDLAEDAKLQLSKDTYDDDLDNLLAQIGDQYADLFLAAKNLSDAILLSDILRVNTEITKAPLSASMIKRYDEHHQDLTLLKALVRQQLPEKYKEIFFDQSKNGYAGYIDGGASQEEFYKFIKPILEKMDGTEELLVKLNREDLLRKQRTFDNGSIPHQIHLGELHAILRRQEDFYPFLKDNREKIEKILTFRIPYYVGPLARGNSRFAWMTRKSEETITPWNFEEVVDKGASAQSFIERMTNFDKNLPNEKVLPKHSLLYEYFTVYNELTKVKYVTEGMRKPAFLSGEQKKAIVDLLFKTNRKVTVKQLKEDYFKKIECFDSVEISGVEDRFNASLGTYHDLLKIIKDKDFLDNEENEDILEDIVLTLTLFEDREMIEERLKTYAHLFDDKVMKQLKRRRYTGWGRLSRKLINGIRDKQSGKTILDFLKSDGFANRNFMQLIHDDSLTFKEDIQKAQVSGQGDSLHEHIANLAGSPAIKKGILQTVKVVDELVKVMGRHKPENIVIEMARENQTTQKGQKNSRERMKRIEEGIKELGSQILKEHPVENTQLQNEKLYLYYLQNGRDMYVDQELDINRLSDYDVDHIVPQSFLKDDSIDNKVLTRSDKARGKSDNVPSEEVVKKMKNYWRQLLNAKLITQRKFDNLTKAERGGLSELDKAGFIKRQLVETRQITKHVAQILDSRMNTKYDENDKLIREVKVITLKSKLVSDFRKDFQFYKVREINNYHHAHDAYLNAVVGTALIKKYPKLESEFVYGDYKVYDVRKMIAKSEQEIGKATAKYFFYSNIMNFFKTEITLANGEIRKRPLIETNGETGEIVWDKGRDFATVRKVLSMPQVNIVKKTEVQTGGFSKESILPKRNSDKLIARKKDWDPKKYGGFDSPTVAYSVLVVAKVEKGKSKKLKSVKELLGITIMERSSFEKNPIDFLEAKGYKEVKKDLIIKLPKYSLFELENGRKRMLASAGELQKGNELALPSKYVNFLYLASHYEKLKGSPEDNEQKQLFVEQHKHYLDEIIEQISEFSKRVILADANLDKVLSAYNKHRDKPIREQAENIIHLFTLTNLGAPAAFKYFDTTIDRKRYTSTKEVLDATLIHQSITGLYETRIDLSQLGGDGGGSSGSSGSSGGLLGRDLLTKLKAQIQFSTEGPQVTWEDRPAMCLVLNLEEEYRLHEKPVPPSIDPSWLQLFPMVWAEKAGMGLANQVPPVVVELKSDASPVAVRQYPMSKEAREGIRPHIQRFLDLGILVPCQSPWNTPLLPVKKPGTNDYRPVQDLREVNKRVQDIHPTVPNPYNLLSSLPPSHTWYSVLDLKDAFFCLKLHPNSQPLFAFEWRDPEKGNTGQLTWTRLPQGFKNSPTLFNEALHRDLASFRALNPQVVMLQYVDDLLVAAPTYRDCKEGTRRLLQELSKLGYRVSAKKAQLCREEVTYLGYLLKGGKRWLTPARKATVMKIPTPTTPRQVREFLGKAGFCRLFIPGFASLAAPLYPLTRPKVPFTWTEAHQEAFGRIKEALLSAPALALPDLTKPFALYVDEKEGVARGVLTQTLGPWRRPVAYLSKKLDPVASGWPTCLKAIAAVALLLKDADKLTLGQNVLVIAPHNLESIVRQPPDRWMTNARMTHYQSLLLNERVSFAPPAILNPATLLPVESDDTPIHICSEILAEETGTRPDLRDQPLPGVPAWYTDGSSFIMDGRRQAGAAIVDNKRTVWASNLPEGTSAQKAELIALTQALRLAEGKSINIYTDSRYAFATAHVHGAIYKQRGWLTSAGKDIKNKEEILALLEAIHLPKRVAIIHCPGHQRGTDPVATGNRKADEAAKQAAQSTRILTETTKNAGKRTADGSEFEKRTADGSEFESPKKKAKVE

SEQ ID NO: 1715 - protein, 2127 aa, synthetic construct
MPAAKRVKLDGGDKKYSIGLDIGTNSVGWAVITDEYKVPSKKFKVLGNTDRHSIKKNLIGALLFDSGETAEATRLKRTARRRYTRRKNRICYLQEIFSNEMAKVDDSFFHRLEESFLVEEDKKHERHPIFGNIVDEVAYHEKYPTIYHLRKKLVDSTDKADLRLIYLALAHMIKFRGHFLIEGDLNPDNSDVDKLFIQLVQTYNQLFEENPINASGVDAKAILSARLSKSRRLENLIAQLPGEKKNGLFGNLIALSLGLTPNFKSNFDLAEDAKLQLSKDTYDDDLDNLLAQIGDQYADLFLAAKNLSDAILLSDILRVNTEITKAPLSASMIKRYDEHHQDLTLLKALVRQQLPEKYKEIFFDQSKNGYAGYIDGGASQEEFYKFIKPILEKMDGTEELLVKLNREDLLRKQRTFDNGSIPHQIHLGELHAILRRQEDFYPFLKDNREKIEKILTFRIPYYVGPLARGNSRFAWMTRKSEETITPWNFEEVVDKGASAQSFIERMTNFDKNLPNEKVLPKHSLLYEYFTVYNELTKVKYVTEGMRKPAFLSGEQKKAIVDLLFKTNRKVTVKQLKEDYFKKIECFDSVEISGVEDRFNASLGTYHDLLKIIKDKDFLDNEENEDILEDIVLTLTLFEDREMIEERLKTYAHLFDDKVMKQLKRRRYTGWGRLSRKLINGIRDKQSGKTILDFLKSDGFANRNFMQLIHDDSLTFKEDIQKAQVSGQGDSLHEHIANLAGSPAIKKGILQTVKVVDELVKVMGRHKPENIVIEMARENQTTQKGQKNSRERMKRIEEGIKELGSQILKEHPVENTQLQNEKLYLYYLQNGRDMYVDQELDINRLSDYDVDHIVPQSFLKDDSIDNKVLTRSDKARGKSDNVPSEEVVKKMKNYWRQLLNAKLITQRKFDNLTKAERGGLSELDKAGFIKRQLVETRQITKHVAQILDSRMNTKYDENDKLIREVKVITLKSKLVSDFRKDFQFYKVREINNYHHAHDAYLNAVVGTALIKKYPKLESEFVYGDYKVYDVRKMIAKSEQEIGKATAKYFFYSNIMNFFKTEITLANGEIRKRPLIETNGETGEIVWDKGRDFATVRKVLSMPQVNIVKKTEVQTGGFSKESILPKRNSDKLIARKKDWDPKKYGGFDSPTVAYSVLVVAKVEKGKSKKLKSVKELLGITIMERSSFEKNPIDFLEAKGYKEVKKDLIIKLPKYSLFELENGRKRMLASAGELQKGNELALPSKYVNFLYLASHYEKLKGSPEDNEQKQLFVEQHKHYLDEIIEQISEFSKRVILADANLDKVLSAYNKHRDKPIREQAENIIHLFTLTNLGAPAAFKYFDTTIDRKRYTSTKEVLDATLIHQSITGLYETRIDLSQLGGDGGEAAAKGGSGSSGGLLGRDLLTKLKAQIQFSTEGPQVTWEDRPAMCLVLNLEEEYRLHEKPVPPSIDPSWLQLFPMVWAEKAGMGLANQVPPVVVELKSDASPVAVRQYPMSKEAREGIRPHIQRFLDLGILVPCQSPWNTPLLPVKKPGTNDYRPVQDLREVNKRVQDIHPTVPNPYNLLSSLPPSHTWYSVLDLKDAFFCLKLHPNSQPLFAFEWRDPEKGNTGQLTWTRLPQGFKNSPTLFNEALHRDLASFRALNPQVVMLQYVDDLLVAAPTYRDCKEGTRRLLQELSKLGYRVSAKKAQLCREEVTYLGYLLKGGKRWLTPARKATVMKIPTPTTPRQVREFLGKAGFCRLFIPGFASLAAPLYPLTRPKVPFTWTEAHQEAFGRIKEALLSAPALALPDLTKPFALYVDEKEGVARGVLTQTLGPWRRPVAYLSKKLDPVASGWPTCLKAIAAVALLLKDADKLTLGQNVLVIAPHNLESIVRQPPDRWMTNARMTHYQSLLLNERVSFAPPAILNPATLLPVESDDTPIHICSEILAEETGTRPDLRDQPLPGVPAWYTDGSSFIMDGRRQAGAAIVDNKRTVWASNLPEGTSAQKAELIALTQALRLAEGKSINIYTDSRYAFATAHVHGAIYKQRGWLTSAGKDIKNKEEILALLEAIHLPKRVAIIHCPGHQRGTDPVATGNRKADEAAKQAAQSTRILTETTKNAGKRTADGSEFEKRTADGSEFESPKKKAKVE

SEQ ID NO: 1716 - protein, 2127 aa, synthetic construct
MPAAKRVKLDGGDKKYSIGLDIGTNSVGWAVITDEYKVPSKKFKVLGNTDRHSIKKNLIGALLFDSGETAEATRLKRTARRRYTRRKNRICYLQEIFSNEMAKVDDSFFHRLEESFLVEEDKKHERHPIFGNIVDEVAYHEKYPTIYHLRKKLVDSTDKADLRLIYLALAHMIKFRGHFLIEGDLNPDNSDVDKLFIQLVQTYNQLFEENPINASGVDAKAILSARLSKSRRLENLIAQLPGEKKNGLFGNLIALSLGLTPNFKSNFDLAEDAKLQLSKDTYDDDLDNLLAQIGDQYADLFLAAKNLSDAILLSDILRVNTEITKAPLSASMIKRYDEHHQDLTLLKALVRQQLPEKYKEIFFDQSKNGYAGYIDGGASQEEFYKFIKPILEKMDGTEELLVKLNREDLLRKQRTFDNGSIPHQIHLGELHAILRRQEDFYPFLKDNREKIEKILTFRIPYYVGPLARGNSRFAWMTRKSEETITPWNFEEVVDKGASAQSFIERMTNFDKNLPNEKVLPKHSLLYEYFTVYNELTKVKYVTEGMRKPAFLSGEQKKAIVDLLFKTNRKVTVKQLKEDYFKKIECFDSVEISGVEDRFNASLGTYHDLLKIIKDKDFLDNEENEDILEDIVLTLTLFEDREMIEERLKTYAHLFDDKVMKQLKRRRYTGWGRLSRKLINGIRDKQSGKTILDFLKSDGFANRNFMQLIHDDSLTFKEDIQKAQVSGQGDSLHEHIANLAGSPAIKKGILQTVKVVDELVKVMGRHKPENIVIEMARENQTTQKGQKNSRERMKRIEEGIKELGSQILKEHPVENTQLQNEKLYLYYLQNGRDMYVDQELDINRLSDYDVDHIVPQSFLKDDSIDNKVLTRSDKARGKSDNVPSEEVVKKMKNYWRQLLNAKLITQRKFDNLTKAERGGLSELDKAGFIKRQLVETRQITKHVAQILDSRMNTKYDENDKLIREVKVITLKSKLVSDFRKDFQFYKVREINNYHHAHDAYLNAVVGTALIKKYPKLESEFVYGDYKVYDVRKMIAKSEQEIGKATAKYFFYSNIMNFFKTEITLANGEIRKRPLIETNGETGEIVWDKGRDFATVRKVLSMPQVNIVKKTEVQTGGFSKESILPKRNSDKLIARKKDWDPKKYGGFDSPTVAYSVLVVAKVEKGKSKKLKSVKELLGITIMERSSFEKNPIDFLEAKGYKEVKKDLIIKLPKYSLFELENGRKRMLASAGELQKGNELALPSKYVNFLYLASHYEKLKGSPEDNEQKQLFVEQHKHYLDEIIEQISEFSKRVILADANLDKVLSAYNKHRDKPIREQAENIIHLFTLTNLGAPAAFKYFDTTIDRKRYTSTKEVLDATLIHQSITGLYETRIDLSQLGGDGGGGSGSSEAAAKGGLLGRDLLTKLKAQIQFSTEGPQVTWEDRPAMCLVLNLEEEYRLHEKPVPPSIDPSWLQLFPMVWAEKAGMGLANQVPPVVVELKSDASPVAVRQYPMSKEAREGIRPHIQRFLDLGILVPCQSPWNTPLLPVKKPGTNDYRPVQDLREVNKRVQDIHPTVPNPYNLLSSLPPSHTWYSVLDLKDAFFCLKLHPNSQPLFAFEWRDPEKGNTGQLTWTRLPQGFKNSPTLFNEALHRDLASFRALNPQVVMLQYVDDLLVAAPTYRDCKEGTRRLLQELSKLGYRVSAKKAQLCREEVTYLGYLLKGGKRWLTPARKATVMKIPTPTTPRQVREFLGKAGFCRLFIPGFASLAAPLYPLTRPKVPFTWTEAHQEAFGRIKEALLSAPALALPDLTKPFALYVDEKEGVARGVLTQTLGPWRRPVAYLSKKLDPVASGWPTCLKAIAAVALLLKDADKLTLGQNVLVIAPHNLESIVRQPPDRWMTNARMTHYQSLLLNERVSFAPPAILNPATLLPVESDDTPIHICSEILAEETGTRPDLRDQPLPGVPAWYTDGSSFIMDGRRQAGAAIVDNKRTVWASNLPEGTSAQKAELIALTQALRLAEGKSINIYTDSRYAFATAHVHGAIYKQRGWLTSAGKDIKNKEEILALLEAIHLPKRVAIIHCPGHQRGTDPVATGNRKADEAAKQAAQSTRILTETTKNAGKRTADGSEFEKRTADGSEFESPKKKAKVE

SEQ ID NO: 1717 - protein, 2127 aa, synthetic construct
MPAAKRVKLDGGDKKYSIGLDIGTNSVGWAVITDEYKVPSKKFKVLGNTDRHSIKKNLIGALLFDSGETAEATRLKRTARRRYTRRKNRICYLQEIFSNEMAKVDDSFFHRLEESFLVEEDKKHERHPIFGNIVDEVAYHEKYPTIYHLRKKLVDSTDKADLRLIYLALAHMIKFRGHFLIEGDLNPDNSDVDKLFIQLVQTYNQLFEENPINASGVDAKAILSARLSKSRRLENLIAQLPGEKKNGLFGNLIALSLGLTPNFKSNFDLAEDAKLQLSKDTYDDDLDNLLAQIGDQYADLFLAAKNLSDAILLSDILRVNTEITKAPLSASMIKRYDEHHQDLTLLKALVRQQLPEKYKEIFFDQSKNGYAGYIDGGASQEEFYKFIKPILEKMDGTEELLVKLNREDLLRKQRTFDNGSIPHQIHLGELHAILRRQEDFYPFLKDNREKIEKILTFRIPYYVGPLARGNSRFAWMTRKSEETITPWNFEEVVDKGASAQSFIERMTNFDKNLPNEKVLPKHSLLYEYFTVYNELTKVKYVTEGMRKPAFLSGEQKKAIVDLLFKTNRKVTVKQLKEDYFKKIECFDSVEISGVEDRFNASLGTYHDLLKIIKDKDFLDNEENEDILEDIVLTLTLFEDREMIEERLKTYAHLFDDKVMKQLKRRRYTGWGRLSRKLINGIRDKQSGKTILDFLKSDGFANRNFMQLIHDDSLTFKEDIQKAQVSGQGDSLHEHIANLAGSPAIKKGILQTVKVVDELVKVMGRHKPENIVIEMARENQTTQKGQKNSRERMKRIEEGIKELGSQILKEHPVENTQLQNEKLYLYYLQNGRDMYVDQELDINRLSDYDVDHIVPQSFLKDDSIDNKVLTRSDKARGKSDNVPSEEVVKKMKNYWRQLLNAKLITQRKFDNLTKAERGGLSELDKAGFIKRQLVETRQITKHVAQILDSRMNTKYDENDKLIREVKVITLKSKLVSDFRKDFQFYKVREINNYHHAHDAYLNAVVGTALIKKYPKLESEFVYGDYKVYDVRKMIAKSEQEIGKATAKYFFYSNIMNFFKTEITLANGEIRKRPLIETNGETGEIVWDKGRDFATVRKVLSMPQVNIVKKTEVQTGGFSKESILPKRNSDKLIARKKDWDPKKYGGFDSPTVAYSVLVVAKVEKGKSKKLKSVKELLGITIMERSSFEKNPIDFLEAKGYKEVKKDLIIKLPKYSLFELENGRKRMLASAGELQKGNELALPSKYVNFLYLASHYEKLKGSPEDNEQKQLFVEQHKHYLDEIIEQISEFSKRVILADANLDKVLSAYNKHRDKPIREQAENIIHLFTLTNLGAPAAFKYFDTTIDRKRYTSTKEVLDATLIHQSITGLYETRIDLSQLGGDGGGGSEAAAKGGGGGLLGRDLLTKLKAQIQFSTEGPQVTWEDRPAMCLVLNLEEEYRLHEKPVPPSIDPSWLQLFPMVWAEKAGMGLANQVPPVVVELKSDASPVAVRQYPMSKEAREGIRPHIQRFLDLGILVPCQSPWNTPLLPVKKPGTNDYRPVQDLREVNKRVQDIHPTVPNPYNLLSSLPPSHTWYSVLDLKDAFFCLKLHPNSQPLFAFEWRDPEKGNTGQLTWTRLPQGFKNSPTLFNEALHRDLASFRALNPQVVMLQYVDDLLVAAPTYRDCKEGTRRLLQELSKLGYRVSAKKAQLCREEVTYLGYLLKGGKRWLTPARKATVMKIPTPTTPRQVREFLGKAGFCRLFIPGFASLAAPLYPLTRPKVPFTWTEAHQEAFGRIKEALLSAPALALPDLTKPFALYVDEKEGVARGVLTQTLGPWRRPVAYLSKKLDPVASGWPTCLKAIAAVALLLKDADKLTLGQNVLVIAPHNLESIVRQPPDRWMTNARMTHYQSLLLNERVSFAPPAILNPATLLPVESDDTPIHICSEILAEETGTRPDLRDQPLPGVPAWYTDGSSFIMDGRRQAGAAIVDNKRTVWASNLPEGTSAQKAELIALTQALRLAEGKSINIYTDSRYAFATAHVHGAIYKQRGWLTSAGKDIKNKEEILALLEAIHLPKRVAIIHCPGHQRGTDPVATGNRKADEAAKQAAQSTRILTETTKNAGKRTADGSEFEKRTADGSEFESPKKKAKVE

SEQ ID NO: 1718 - protein, 2127 aa, synthetic construct
MPAAKRVKLDGGDKKYSIGLDIGTNSVGWAVITDEYKVPSKKFKVLGNTDRHSIKKNLIGALLFDSGETAEATRLKRTARRRYTRRKNRICYLQEIFSNEMAKVDDSFFHRLEESFLVEEDKKHERHPIFGNIVDEVAYHEKYPTIYHLRKKLVDSTDKADLRLIYLALAHMIKFRGHFLIEGDLNPDNSDVDKLFIQLVQTYNQLFEENPINASGVDAKAILSARLSKSRRLENLIAQLPGEKKNGLFGNLIALSLGLTPNFKSNFDLAEDAKLQLSKDTYDDDLDNLLAQIGDQYADLFLAAKNLSDAILLSDILRVNTEITKAPLSASMIKRYDEHHQDLTLLKALVRQQLPEKYKEIFFDQSKNGYAGYIDGGASQEEFYKFIKPILEKMDGTEELLVKLNREDLLRKQRTFDNGSIPHQIHLGELHAILRRQEDFYPFLKDNREKIEKILTFRIPYYVGPLARGNSRFAWMTRKSEETITPWNFEEVVDKGASAQSFIERMTNFDKNLPNEKVLPKHSLLYEYFTVYNELTKVKYVTEGMRKPAFLSGEQKKAIVDLLFKTNRKVTVKQLKEDYFKKIECFDSVEISGVEDRFNASLGTYHDLLKIIKDKDFLDNEENEDILEDIVLTLTLFEDREMIEERLKTYAHLFDDKVMKQLKRRRYTGWGRLSRKLINGIRDKQSGKTILDFLKSDGFANRNFMQLIHDDSLTFKEDIQKAQVSGQGDSLHEHIANLAGSPAIKKGILQTVKVVDELVKVMGRHKPENIVIEMARENQTTQKGQKNSRERMKRIEEGIKELGSQILKEHPVENTQLQNEKLYLYYLQNGRDMYVDQELDINRLSDYDVDHIVPQSFLKDDSIDNKVLTRSDKARGKSDNVPSEEVVKKMKNYWRQLLNAKLITQRKFDNLTKAERGGLSELDKAGFIKRQLVETRQITKHVAQILDSRMNTKYDENDKLIREVKVITLKSKLVSDFRKDFQFYKVREINNYHHAHDAYLNAVVGTALIKKYPKLESEFVYGDYKVYDVRKMIAKSEQEIGKATAKYFFYSNIMNFFKTEITLANGEIRKRPLIETNGETGEIVWDKGRDFATVRKVLSMPQVNIVKKTEVQTGGFSKESILPKRNSDKLIARKKDWDPKKYGGFDSPTVAYSVLVVAKVEKGKSKKLKSVKELLGITIMERSSFEKNPIDFLEAKGYKEVKKDLIIKLPKYSLFELENGRKRMLASAGELQKGNELALPSKYVNFLYLASHYEKLKGSPEDNEQKQLFVEQHKHYLDEIIEQISEFSKRVILADANLDKVLSAYNKHRDKPIREQAENIIHLFTLTNLGAPAAFKYFDTTIDRKRYTSTKEVLDATLIHQSITGLYETRIDLSQLGGDGGPAPGGSEAAAKGGLLGRDLLTKLKAQIQFSTEGPQVTWEDRPAMCLVLNLEEEYRLHEKPVPPSIDPSWLQLFPMVWAEKAGMGLANQVPPVVVELKSDASPVAVRQYPMSKEAREGIRPHIQRFLDLGILVPCQSPWNTPLLPVKKPGTNDYRPVQDLREVNKRVQDIHPTVPNPYNLLSSLPPSHTWYSVLDLKDAFFCLKLHPNSQPLFAFEWRDPEKGNTGQLTWTRLPQGFKNSPTLFNEALHRDLASFRALNPQVVMLQYVDDLLVAAPTYRDCKEGTRRLLQELSKLGYRVSAKKAQLCREEVTYLGYLLKGGKRWLTPARKATVMKIPTPTTPRQVREFLGKAGFCRLFIPGFASLAAPLYPLTRPKVPFTWTEAHQEAFGRIKEALLSAPALALPDLTKPFALYVDEKEGVARGVLTQTLGPWRRPVAYLSKKLDPVASGWPTCLKAIAAVALLLKDADKLTLGQNVLVIAPHNLESIVRQPPDRWMTNARMTHYQSLLLNERVSFAPPAILNPATLLPVESDDTPIHICSEILAEETGTRPDLRDQPLPGVPAWYTDGSSFIMDGRRQAGAAIVDNKRTVWASNLPEGTSAQKAELIALTQALRLAEGKSINIYTDSRYAFATAHVHGAIYKQRGWLTSAGKDIKNKEEILALLEAIHLPKRVAIIHCPGHQRGTDPVATGNRKADEAAKQAAQSTRILTETTKNAGKRTADGSEFEKRTADGSEFESPKKKAKVE

SEQ ID NO: 1719 - protein, 2125 aa, synthetic construct
MPAAKRVKLDGGDKKYSIGLDIGTNSVGWAVITDEYKVPSKKFKVLGNTDRHSIKKNLIGALLFDSGETAEATRLKRTARRRYTRRKNRICYLQEIFSNEMAKVDDSFFHRLEESFLVEEDKKHERHPIFGNIVDEVAYHEKYPTIYHLRKKLVDSTDKADLRLIYLALAHMIKFRGHFLIEGDLNPDNSDVDKLFIQLVQTYNQLFEENPINASGVDAKAILSARLSKSRRLENLIAQLPGEKKNGLFGNLIALSLGLTPNFKSNFDLAEDAKLQLSKDTYDDDLDNLLAQIGDQYADLFLAAKNLSDAILLSDILRVNTEITKAPLSASMIKRYDEHHQDLTLLKALVRQQLPEKYKEIFFDQSKNGYAGYIDGGASQEEFYKFIKPILEKMDGTEELLVKLNREDLLRKQRTFDNGSIPHQIHLGELHAILRRQEDFYPFLKDNREKIEKILTFRIPYYVGPLARGNSRFAWMTRKSEETITPWNFEEVVDKGASAQSFIERMTNFDKNLPNEKVLPKHSLLYEYFTVYNELTKVKYVTEGMRKPAFLSGEQKKAIVDLLFKTNRKVTVKQLKEDYFKKIECFDSVEISGVEDRFNASLGTYHDLLKIIKDKDFLDNEENEDILEDIVLTLTLFEDREMIEERLKTYAHLFDDKVMKQLKRRRYTGWGRLSRKLINGIRDKQSGKTILDFLKSDGFANRNFMQLIHDDSLTFKEDIQKAQVSGQGDSLHEHIANLAGSPAIKKGILQTVKVVDELVKVMGRHKPENIVIEMARENQTTQKGQKNSRERMKRIEEGIKELGSQILKEHPVENTQLQNEKLYLYYLQNGRDMYVDQELDINRLSDYDVDHIVPQSFLKDDSIDNKVLTRSDKARGKSDNVPSEEVVKKMKNYWRQLLNAKLITQRKFDNLTKAERGGLSELDKAGFIKRQLVETRQITKHVAQILDSRMNTKYDENDKLIREVKVITLKSKLVSDFRKDFQFYKVREINNYHHAHDAYLNAVVGTALIKKYPKLESEFVYGDYKVYDVRKMIAKSEQEIGKATAKYFFYSNIMNFFKTEITLANGEIRKRPLIETNGETGEIVWDKGRDFATVRKVLSMPQVNIVKKTEVQTGGFSKESILPKRNSDKLIARKKDWDPKKYGGFDSPTVAYSVLVVAKVEKGKSKKLKSVKELLGITIMERSSFEKNPIDFLEAKGYKEVKKDLIIKLPKYSLFELENGRKRMLASAGELQKGNELALPSKYVNFLYLASHYEKLKGSPEDNEQKQLFVEQHKHYLDEIIEQISEFSKRVILADANLDKVLSAYNKHRDKPIREQAENIIHLFTLTNLGAPAAFKYFDTTIDRKRYTSTKEVLDATLIHQSITGLYETRIDLSQLGGDGGPAPGSSGGGGGLLGRDLLTKLKAQIQFSTEGPQVTWEDRPAMCLVLNLEEEYRLHEKPVPPSIDPSWLQLFPMVWAEKAGMGLANQVPPVVVELKSDASPVAVRQYPMSKEAREGIRPHIQRFLDLGILVPCQSPWNTPLLPVKKPGTNDYRPVQDLREVNKRVQDIHPTVPNPYNLLSSLPPSHTWYSVLDLKDAFFCLKLHPNSQPLFAFEWRDPEKGNTGQLTWTRLPQGFKNSPTLFNEALHRDLASFRALNPQVVMLQYVDDLLVAAPTYRDCKEGTRRLLQELSKLGYRVSAKKAQLCREEVTYLGYLLKGGKRWLTPARKATVMKIPTPTTPRQVREFLGKAGFCRLFIPGFASLAAPLYPLTRPKVPFTWTEAHQEAFGRIKEALLSAPALALPDLTKPFALYVDEKEGVARGVLTQTLGPWRRPVAYLSKKLDPVASGWPTCLKAIAAVALLLKDADKLTLGQNVLVIAPHNLESIVRQPPDRWMTNARMTHYQSLLLNERVSFAPPAILNPATLLPVESDDTPIHICSEILAEETGTRPDLRDQPLPGVPAWYTDGSSFIMDGRRQAGAAIVDNKRTVWASNLPEGTSAQKAELIALTQALRLAEGKSINIYTDSRYAFATAHVHGAIYKQRGWLTSAGKDIKNKEEILALLEAIHLPKRVAIIHCPGHQRGTDPVATGNRKADEAAKQAAQSTRILTETTKNAGKRTADGSEFEKRTADGSEFESPKKKAKVE

SEQ ID NO: 1720 - protein, 2126 aa, synthetic construct
MPAAKRVKLDGGDKKYSIGLDIGTNSVGWAVITDEYKVPSKKFKVLGNTDRHSIKKNLIGALLFDSGETAEATRLKRTARRRYTRRKNRICYLQEIFSNEMAKVDDSFFHRLEESFLVEEDKKHERHPIFGNIVDEVAYHEKYPTIYHLRKKLVDSTDKADLRLIYLALAHMIKFRGHFLIEGDLNPDNSDVDKLFIQLVQTYNQLFEENPINASGVDAKAILSARLSKSRRLENLIAQLPGEKKNGLFGNLIALSLGLTPNFKSNFDLAEDAKLQLSKDTYDDDLDNLLAQIGDQYADLFLAAKNLSDAILLSDILRVNTEITKAPLSASMIKRYDEHHQDLTLLKALVRQQLPEKYKEIFFDQSKNGYAGYIDGGASQEEFYKFIKPILEKMDGTEELLVKLNREDLLRKQRTFDNGSIPHQIHLGELHAILRRQEDFYPFLKDNREKIEKILTFRIPYYVGPLARGNSRFAWMTRKSEETITPWNFEEVVDKGASAQSFIERMTNFDKNLPNEKVLPKHSLLYEYFTVYNELTKVKYVTEGMRKPAFLSGEQKKAIVDLLFKTNRKVTVKQLKEDYFKKIECFDSVEISGVEDRFNASLGTYHDLLKIIKDKDFLDNEENEDILEDIVLTLTLFEDREMIEERLKTYAHLFDDKVMKQLKRRRYTGWGRLSRKLINGIRDKQSGKTILDFLKSDGFANRNFMQLIHDDSLTFKEDIQKAQVSGQGDSLHEHIANLAGSPAIKKGILQTVKVVDELVKVMGRHKPENIVIEMARENQTTQKGQKNSRERMKRIEEGIKELGSQILKEHPVENTQLQNEKLYLYYLQNGRDMYVDQELDINRLSDYDVDHIVPQSFLKDDSIDNKVLTRSDKARGKSDNVPSEEVVKKMKNYWRQLLNAKLITQRKFDNLTKAERGGLSELDKAGFIKRQLVETRQITKHVAQILDSRMNTKYDENDKLIREVKVITLKSKLVSDFRKDFQFYKVREINNYHHAHDAYLNAVVGTALIKKYPKLESEFVYGDYKVYDVRKMIAKSEQEIGKATAKYFFYSNIMNFFKTEITLANGEIRKRPLIETNGETGEIVWDKGRDFATVRKVLSMPQVNIVKKTEVQTGGFSKESILPKRNSDKLIARKKDWDPKKYGGFDSPTVAYSVLVVAKVEKGKSKKLKSVKELLGITIMERSSFEKNPIDFLEAKGYKEVKKDLIIKLPKYSLFELENGRKRMLASAGELQKGNELALPSKYVNFLYLASHYEKLKGSPEDNEQKQLFVEQHKHYLDEIIEQISEFSKRVILADANLDKVLSAYNKHRDKPIREQAENIIHLFTLTNLGAPAAFKYFDTTIDRKRYTSTKEVLDATLIHQSITGLYETRIDLSQLGGDGGGGGGSGGGGSGGLLGRDLLTKLKAQIQFSTEGPQVTWEDRPAMCLVLNLEEEYRLHEKPVPPSIDPSWLQLFPMVWAEKAGMGLANQVPPVVVELKSDASPVAVRQYPMSKEAREGIRPHIQRFLDLGILVPCQSPWNTPLLPVKKPGTNDYRPVQDLREVNKRVQDIHPTVPNPYNLLSSLPPSHTWYSVLDLKDAFFCLKLHPNSQPLFAFEWRDPEKGNTGQLTWTRLPQGFKNSPTLFNEALHRDLASFRALNPQVVMLQYVDDLLVAAPTYRDCKEGTRRLLQELSKLGYRVSAKKAQLCREEVTYLGYLLKGGKRWLTPARKATVMKIPTPTTPRQVREFLGKAGFCRLFIPGFASLAAPLYPLTRPKVPFTWTEAHQEAFGRIKEALLSAPALALPDLTKPFALYVDEKEGVARGVLTQTLGPWRRPVAYLSKKLDPVASGWPTCLKAIAAVALLLKDADKLTLGQNVLVIAPHNLESIVRQPPDRWMTNARMTHYQSLLLNERVSFAPPAILNPATLLPVESDDTPIHICSEILAEETGTRPDLRDQPLPGVPAWYTDGSSFIMDGRRQAGAAIVDNKRTVWASNLPEGTSAQKAELIALTQALRLAEGKSINIYTDSRYAFATAHVHGAIYKQRGWLTSAGKDIKNKEEILALLEAIHLPKRVAIIHCPGHQRGTDPVATGNRKADEAAKQAAQSTRILTETTKNAGKRTADGSEFEKRTADGSEFESPKKKAKVE

SEQ ID NO: 1721 - protein, 2127 aa, synthetic construct
MPAAKRVKLDGGDKKYSIGLDIGTNSVGWAVITDEYKVPSKKFKVLGNTDRHSIKKNLIGALLFDSGETAEATRLKRTARRRYTRRKNRICYLQEIFSNEMAKVDDSFFHRLEESFLVEEDKKHERHPIFGNIVDEVAYHEKYPTIYHLRKKLVDSTDKADLRLIYLALAHMIKFRGHFLIEGDLNPDNSDVDKLFIQLVQTYNQLFEENPINASGVDAKAILSARLSKSRRLENLIAQLPGEKKNGLFGNLIALSLGLTPNFKSNFDLAEDAKLQLSKDTYDDDLDNLLAQIGDQYADLFLAAKNLSDAILLSDILRVNTEITKAPLSASMIKRYDEHHQDLTLLKALVRQQLPEKYKEIFFDQSKNGYAGYIDGGASQEEFYKFIKPILEKMDGTEELLVKLNREDLLRKQRTFDNGSIPHQIHLGELHAILRRQEDFYPFLKDNREKIEKILTFRIPYYVGPLARGNSRFAWMTRKSEETITPWNFEEVVDKGASAQSFIERMTNFDKNLPNEKVLPKHSLLYEYFTVYNELTKVKYVTEGMRKPAFLSGEQKKAIVDLLFKTNRKVTVKQLKEDYFKKIECFDSVEISGVEDRFNASLGTYHDLLKIIKDKDFLDNEENEDILEDIVLTLTLFEDREMIEERLKTYAHLFDDKVMKQLKRRRYTGWGRLSRKLINGIRDKQSGKTILDFLKSDGFANRNFMQLIHDDSLTFKEDIQKAQVSGQGDSLHEHIANLAGSPAIKKGILQTVKVVDELVKVMGRHKPENIVIEMARENQTTQKGQKNSRERMKRIEEGIKELGSQILKEHPVENTQLQNEKLYLYYLQNGRDMYVDQELDINRLSDYDVDHIVPQSFLKDDSIDNKVLTRSDKARGKSDNVPSEEVVKKMKNYWRQLLNAKLITQRKFDNLTKAERGGLSELDKAGFIKRQLVETRQITKHVAQILDSRMNTKYDENDKLIREVKVITLKSKLVSDFRKDFQFYKVREINNYHHAHDAYLNAVVGTALIKKYPKLESEFVYGDYKVYDVRKMIAKSEQEIGKATAKYFFYSNIMNFFKTEITLANGEIRKRPLIETNGETGEIVWDKGRDFATVRKVLSMPQVNIVKKTEVQTGGFSKESILPKRNSDKLIARKKDWDPKKYGGFDSPTVAYSVLVVAKVEKGKSKKLKSVKELLGITIMERSSFEKNPIDFLEAKGYKEVKKDLIIKLPKYSLFELENGRKRMLASAGELQKGNELALPSKYVNFLYLASHYEKLKGSPEDNEQKQLFVEQHKHYLDEIIEQISEFSKRVILADANLDKVLSAYNKHRDKPIREQAENIIHLFTLTNLGAPAAFKYFDTTIDRKRYTSTKEVLDATLIHQSITGLYETRIDLSQLGGDGGGSSPAPEAAAKGGLLGRDLLTKLKAQIQFSTEGPQVTWEDRPAMCLVLNLEEEYRLHEKPVPPSIDPSWLQLFPMVWAEKAGMGLANQVPPVVVELKSDASPVAVRQYPMSKEAREGIRPHIQRFLDLGILVPCQSPWNTPLLPVKKPGTNDYRPVQDLREVNKRVQDIHPTVPNPYNLLSSLPPSHTWYSVLDLKDAFFCLKLHPNSQPLFAFEWRDPEKGNTGQLTWTRLPQGFKNSPTLFNEALHRDLASFRALNPQVVMLQYVDDLLVAAPTYRDCKEGTRRLLQELSKLGYRVSAKKAQLCREEVTYLGYLLKGGKRWLTPARKATVMKIPTPTTPRQVREFLGKAGFCRLFIPGFASLAAPLYPLTRPKVPFTWTEAHQEAFGRIKEALLSAPALALPDLTKPFALYVDEKEGVARGVLTQTLGPWRRPVAYLSKKLDPVASGWPTCLKAIAAVALLLKDADKLTLGQNVLVIAPHNLESIVRQPPDRWMTNARMTHYQSLLLNERVSFAPPAILNPATLLPVESDDTPIHICSEILAEETGTRPDLRDQPLPGVPAWYTDGSSFIMDGRRQAGAAIVDNKRTVWASNLPEGTSAQKAELIALTQALRLAEGKSINIYTDSRYAFATAHVHGAIYKQRGWLTSAGKDIKNKEEILALLEAIHLPKRVAIIHCPGHQRGTDPVATGNRKADEAAKQAAQSTRILTETTKNAGKRTADGSEFEKRTADGSEFESPKKKAKVE

SEQ ID NO: 1722 - protein, 2127 aa, synthetic construct
MPAAKRVKLDGGDKKYSIGLDIGTNSVGWAVITDEYKVPSKKFKVLGNTDRHSIKKNLIGALLFDSGETAEATRLKRTARRRYTRRKNRICYLQEIFSNEMAKVDDSFFHRLEESFLVEEDKKHERHPIFGNIVDEVAYHEKYPTIYHLRKKLVDSTDKADLRLIYLALAHMIKFRGHFLIEGDLNPDNSDVDKLFIQLVQTYNQLFEENPINASGVDAKAILSARLSKSRRLENLIAQLPGEKKNGLFGNLIALSLGLTPNFKSNFDLAEDAKLQLSKDTYDDDLDNLLAQIGDQYADLFLAAKNLSDAILLSDILRVNTEITKAPLSASMIKRYDEHHQDLTLLKALVRQQLPEKYKEIFFDQSKNGYAGYIDGGASQEEFYKFIKPILEKMDGTEELLVKLNREDLLRKQRTFDNGSIPHQIHLGELHAILRRQEDFYPFLKDNREKIEKILTFRIPYYVGPLARGNSRFAWMTRKSEETITPWNFEEVVDKGASAQSFIERMTNFDKNLPNEKVLPKHSLLYEYFTVYNELTKVKYVTEGMRKPAFLSGEQKKAIVDLLFKTNRKVTVKQLKEDYFKKIECFDSVEISGVEDRFNASLGTYHDLLKIIKDKDFLDNEENEDILEDIVLTLTLFEDREMIEERLKTYAHLFDDKVMKQLKRRRYTGWGRLSRKLINGIRDKQSGKTILDFLKSDGFANRNFMQLIHDDSLTFKEDIQKAQVSGQGDSLHEHIANLAGSPAIKKGILQTVKVVDELVKVMGRHKPENIVIEMARENQTTQKGQKNSRERMKRIEEGIKELGSQILKEHPVENTQLQNEKLYLYYLQNGRDMYVDQELDINRLSDYDVDHIVPQSFLKDDSIDNKVLTRSDKARGKSDNVPSEEVVKKMKNYWRQLLNAKLITQRKFDNLTKAERGGLSELDKAGFIKRQLVETRQITKHVAQILDSRMNTKYDENDKLIREVKVITLKSKLVSDFRKDFQFYKVREINNYHHAHDAYLNAVVGTALIKKYPKLESEFVYGDYKVYDVRKMIAKSEQEIGKATAKYFFYSNIMNFFKTEITLANGEIRKRPLIETNGETGEIVWDKGRDFATVRKVLSMPQVNIVKKTEVQTGGFSKESILPKRNSDKLIARKKDWDPKKYGGFDSPTVAYSVLVVAKVEKGKSKKLKSVKELLGITIMERSSFEKNPIDFLEAKGYKEVKKDLIIKLPKYSLFELENGRKRMLASAGELQKGNELALPSKYVNFLYLASHYEKLKGSPEDNEQKQLFVEQHKHYLDEIIEQISEFSKRVILADANLDKVLSAYNKHRDKPIREQAENIIHLFTLTNLGAPAAFKYFDTTIDRKRYTSTKEVLDATLIHQSITGLYETRIDLSQLGGDGGGGSEAAAKGSSGGLLGRDLLTKLKAQIQFSTEGPQVTWEDRPAMCLVLNLEEEYRLHEKPVPPSIDPSWLQLFPMVWAEKAGMGLANQVPPVVVELKSDASPVAVRQYPMSKEAREGIRPHIQRFLDLGILVPCQSPWNTPLLPVKKPGTNDYRPVQDLREVNKRVQDIHPTVPNPYNLLSSLPPSHTWYSVLDLKDAFFCLKLHPNSQPLFAFEWRDPEKGNTGQLTWTRLPQGFKNSPTLFNEALHRDLASFRALNPQVVMLQYVDDLLVAAPTYRDCKEGTRRLLQELSKLGYRVSAKKAQLCREEVTYLGYLLKGGKRWLTPARKATVMKIPTPTTPRQVREFLGKAGFCRLFIPGFASLAAPLYPLTRPKVPFTWTEAHQEAFGRIKEALLSAPALALPDLTKPFALYVDEKEGVARGVLTQTLGPWRRPVAYLSKKLDPVASGWPTCLKAIAAVALLLKDADKLTLGQNVLVIAPHNLESIVRQPPDRWMTNARMTHYQSLLLNERVSFAPPAILNPATLLPVESDDTPIHICSEILAEETGTRPDLRDQPLPGVPAWYTDGSSFIMDGRRQAGAAIVDNKRTVWASNLPEGTSAQKAELIALTQALRLAEGKSINIYTDSRYAFATAHVHGAIYKQRGWLTSAGKDIKNKEEILALLEAIHLPKRVAIIHCPGHQRGTDPVATGNRKADEAAKQAAQSTRILTETTKNAGKRTADGSEFEKRTADGSEFESPKKKAKVE

SEQ ID NO: 1723 - protein, 2127 aa, synthetic construct
MPAAKRVKLDGGDKKYSIGLDIGTNSVGWAVITDEYKVPSKKFKVLGNTDRHSIKKNLIGALLFDSGETAEATRLKRTARRRYTRRKNRICYLQEIFSNEMAKVDDSFFHRLEESFLVEEDKKHERHPIFGNIVDEVAYHEKYPTIYHLRKKLVDSTDKADLRLIYLALAHMIKFRGHFLIEGDLNPDNSDVDKLFIQLVQTYNQLFEENPINASGVDAKAILSARLSKSRRLENLIAQLPGEKKNGLFGNLIALSLGLTPNFKSNFDLAEDAKLQLSKDTYDDDLDNLLAQIGDQYADLFLAAKNLSDAILLSDILRVNTEITKAPLSASMIKRYDEHHQDLTLLKALVRQQLPEKYKEIFFDQSKNGYAGYIDGGASQEEFYKFIKPILEKMDGTEELLVKLNREDLLRKQRTFDNGSIPHQIHLGELHAILRRQEDFYPFLKDNREKIEKILTFRIPYYVGPLARGNSRFAWMTRKSEETITPWNFEEVVDKGASAQSFIERMTNFDKNLPNEKVLPKHSLLYEYFTVYNELTKVKYVTEGMRKPAFLSGEQKKAIVDLLFKTNRKVTVKQLKEDYFKKIECFDSVEISGVEDRFNASLGTYHDLLKIIKDKDFLDNEENEDILEDIVLTLTLFEDREMIEERLKTYAHLFDDKVMKQLKRRRYTGWGRLSRKLINGIRDKQSGKTILDFLKSDGFANRNFMQLIHDDSLTFKEDIQKAQVSGQGDSLHEHIANLAGSPAIKKGILQTVKVVDELVKVMGRHKPENIVIEMARENQTTQKGQKNSRERMKRIEEGIKELGSQILKEHPVENTQLQNEKLYLYYLQNGRDMYVDQELDINRLSDYDVDHIVPQSFLKDDSIDNKVLTRSDKARGKSDNVPSEEVVKKMKNYWRQLLNAKLITQRKFDNLTKAERGGLSELDKAGFIKRQLVETRQITKHVAQILDSRMNTKYDENDKLIREVKVITLKSKLVSDFRKDFQFYKVREINNYHHAHDAYLNAVVGTALIKKYPKLESEFVYGDYKVYDVRKMIAKSEQEIGKATAKYFFYSNIMNFFKTEITLANGEIRKRPLIETNGETGEIVWDKGRDFATVRKVLSMPQVNIVKKTEVQTGGFSKESILPKRNSDKLIARKKDWDPKKYGGFDSPTVAYSVLVVAKVEKGKSKKLKSVKELLGITIMERSSFEKNPIDFLEAKGYKEVKKDLIIKLPKYSLFELENGRKRMLASAGELQKGNELALPSKYVNFLYLASHYEKLKGSPEDNEQKQLFVEQHKHYLDEIIEQISEFSKRVILADANLDKVLSAYNKHRDKPIREQAENIIHLFTLTNLGAPAAFKYFDTTIDRKRYTSTKEVLDATLIHQSITGLYETRIDLSQLGGDGGEAAAKPAPGGSGGLLGRDLLTKLKAQIQFSTEGPQVTWEDRPAMCLVLNLEEEYRLHEKPVPPSIDPSWLQLFPMVWAEKAGMGLANQVPPVVVELKSDASPVAVRQYPMSKEAREGIRPHIQRFLDLGILVPCQSPWNTPLLPVKKPGTNDYRPVQDLREVNKRVQDIHPTVPNPYNLLSSLPPSHTWYSVLDLKDAFFCLKLHPNSQPLFAFEWRDPEKGNTGQLTWTRLPQGFKNSPTLFNEALHRDLASFRALNPQVVMLQYVDDLLVAAPTYRDCKEGTRRLLQELSKLGYRVSAKKAQLCREEVTYLGYLLKGGKRWLTPARKATVMKIPTPTTPRQVREFLGKAGFCRLFIPGFASLAAPLYPLTRPKVPFTWTEAHQEAFGRIKEALLSAPALALPDLTKPFALYVDEKEGVARGVLTQTLGPWRRPVAYLSKKLDPVASGWPTCLKAIAAVALLLKDADKLTLGQNVLVIAPHNLESIVRQPPDRWMTNARMTHYQSLLLNERVSFAPPAILNPATLLPVESDDTPIHICSEILAEETGTRPDLRDQPLPGVPAWYTDGSSFIMDGRRQAGAAIVDNKRTVWASNLPEGTSAQKAELIALTQALRLAEGKSINIYTDSRYAFATAHVHGAIYKQRGWLTSAGKDIKNKEEILALLEAIHLPKRVAIIHCPGHQRGTDPVATGNRKADEAAKQAAQSTRILTETTKNAGKRTADGSEFEKRTADGSEFESPKKKAKVE

SEQ ID NO: 1724 - protein, 2125 aa, synthetic construct
MPAAKRVKLDGGDKKYSIGLDIGTNSVGWAVITDEYKVPSKKFKVLGNTDRHSIKKNLIGALLFDSGETAEATRLKRTARRRYTRRKNRICYLQEIFSNEMAKVDDSFFHRLEESFLVEEDKKHERHPIFGNIVDEVAYHEKYPTIYHLRKKLVDSTDKADLRLIYLALAHMIKFRGHFLIEGDLNPDNSDVDKLFIQLVQTYNQLFEENPINASGVDAKAILSARLSKSRRLENLIAQLPGEKKNGLFGNLIALSLGLTPNFKSNFDLAEDAKLQLSKDTYDDDLDNLLAQIGDQYADLFLAAKNLSDAILLSDILRVNTEITKAPLSASMIKRYDEHHQDLTLLKALVRQQLPEKYKEIFFDQSKNGYAGYIDGGASQEEFYKFIKPILEKMDGTEELLVKLNREDLLRKQRTFDNGSIPHQIHLGELHAILRRQEDFYPFLKDNREKIEKILTFRIPYYVGPLARGNSRFAWMTRKSEETITPWNFEEVVDKGASAQSFIERMTNFDKNLPNEKVLPKHSLLYEYFTVYNELTKVKYVTEGMRKPAFLSGEQKKAIVDLLFKTNRKVTVKQLKEDYFKKIECFDSVEISGVEDRFNASLGTYHDLLKIIKDKDFLDNEENEDILEDIVLTLTLFEDREMIEERLKTYAHLFDDKVMKQLKRRRYTGWGRLSRKLINGIRDKQSGKTILDFLKSDGFANRNFMQLIHDDSLTFKEDIQKAQVSGQGDSLHEHIANLAGSPAIKKGILQTVKVVDELVKVMGRHKPENIVIEMARENQTTQKGQKNSRERMKRIEEGIKELGSQILKEHPVENTQLQNEKLYLYYLQNGRDMYVDQELDINRLSDYDVDHIVPQSFLKDDSIDNKVLTRSDKARGKSDNVPSEEVVKKMKNYWRQLLNAKLITQRKFDNLTKAERGGLSELDKAGFIKRQLVETRQITKHVAQILDSRMNTKYDENDKLIREVKVITLKSKLVSDFRKDFQFYKVREINNYHHAHDAYLNAVVGTALIKKYPKLESEFVYGDYKVYDVRKMIAKSEQEIGKATAKYFFYSNIMNFFKTEITLANGEIRKRPLIETNGETGEIVWDKGRDFATVRKVLSMPQVNIVKKTEVQTGGFSKESILPKRNSDKLIARKKDWDPKKYGGFDSPTVAYSVLVVAKVEKGKSKKLKSVKELLGITIMERSSFEKNPIDFLEAKGYKEVKKDLIIKLPKYSLFELENGRKRMLASAGELQKGNELALPSKYVNFLYLASHYEKLKGSPEDNEQKQLFVEQHKHYLDEIIEQISEFSKRVILADANLDKVLSAYNKHRDKPIREQAENIIHLFTLTNLGAPAAFKYFDTTIDRKRYTSTKEVLDATLIHQSITGLYETRIDLSQLGGDGGGGSGSSGGGGGLLGRDLLTKLKAQIQFSTEGPQVTWEDRPAMCLVLNLEEEYRLHEKPVPPSIDPSWLQLFPMVWAEKAGMGLANQVPPVVVELKSDASPVAVRQYPMSKEAREGIRPHIQRFLDLGILVPCQSPWNTPLLPVKKPGTNDYRPVQDLREVNKRVQDIHPTVPNPYNLLSSLPPSHTWYSVLDLKDAFFCLKLHPNSQPLFAFEWRDPEKGNTGQLTWTRLPQGFKNSPTLFNEALHRDLASFRALNPQVVMLQYVDDLLVAAPTYRDCKEGTRRLLQELSKLGYRVSAKKAQLCREEVTYLGYLLKGGKRWLTPARKATVMKIPTPTTPRQVREFLGKAGFCRLFIPGFASLAAPLYPLTRPKVPFTWTEAHQEAFGRIKEALLSAPALALPDLTKPFALYVDEKEGVARGVLTQTLGPWRRPVAYLSKKLDPVASGWPTCLKAIAAVALLLKDADKLTLGQNVLVIAPHNLESIVRQPPDRWMTNARMTHYQSLLLNERVSFAPPAILNPATLLPVESDDTPIHICSEILAEETGTRPDLRDQPLPGVPAWYTDGSSFIMDGRRQAGAAIVDNKRTVWASNLPEGTSAQKAELIALTQALRLAEGKSINIYTDSRYAFATAHVHGAIYKQRGWLTSAGKDIKNKEEILALLEAIHLPKRVAIIHCPGHQRGTDPVATGNRKADEAAKQAAQSTRILTETTKNAGKRTADGSEFEKRTADGSEFESPKKKAKVE

SEQ ID NO: 1725 - protein, 2127 aa, synthetic construct
MPAAKRVKLDGGDKKYSIGLDIGTNSVGWAVITDEYKVPSKKFKVLGNTDRHSIKKNLIGALLFDSGETAEATRLKRTARRRYTRRKNRICYLQEIFSNEMAKVDDSFFHRLEESFLVEEDKKHERHPIFGNIVDEVAYHEKYPTIYHLRKKLVDSTDKADLRLIYLALAHMIKFRGHFLIEGDLNPDNSDVDKLFIQLVQTYNQLFEENPINASGVDAKAILSARLSKSRRLENLIAQLPGEKKNGLFGNLIALSLGLTPNFKSNFDLAEDAKLQLSKDTYDDDLDNLLAQIGDQYADLFLAAKNLSDAILLSDILRVNTEITKAPLSASMIKRYDEHHQDLTLLKALVRQQLPEKYKEIFFDQSKNGYAGYIDGGASQEEFYKFIKPILEKMDGTEELLVKLNREDLLRKQRTFDNGSIPHQIHLGELHAILRRQEDFYPFLKDNREKIEKILTFRIPYYVGPLARGNSRFAWMTRKSEETITPWNFEEVVDKGASAQSFIERMTNFDKNLPNEKVLPKHSLLYEYFTVYNELTKVKYVTEGMRKPAFLSGEQKKAIVDLLFKTNRKVTVKQLKEDYFKKIECFDSVEISGVEDRFNASLGTYHDLLKIIKDKDFLDNEENEDILEDIVLTLTLFEDREMIEERLKTYAHLFDDKVMKQLKRRRYTGWGRLSRKLINGIRDKQSGKTILDFLKSDGFANRNFMQLIHDDSLTFKEDIQKAQVSGQGDSLHEHIANLAGSPAIKKGILQTVKVVDELVKVMGRHKPENIVIEMARENQTTQKGQKNSRERMKRIEEGIKELGSQILKEHPVENTQLQNEKLYLYYLQNGRDMYVDQELDINRLSDYDVDHIVPQSFLKDDSIDNKVLTRSDKARGKSDNVPSEEVVKKMKNYWRQLLNAKLITQRKFDNLTKAERGGLSELDKAGFIKRQLVETRQITKHVAQILDSRMNTKYDENDKLIREVKVITLKSKLVSDFRKDFQFYKVREINNYHHAHDAYLNAVVGTALIKKYPKLESEFVYGDYKVYDVRKMIAKSEQEIGKATAKYFFYSNIMNFFKTEITLANGEIRKRPLIETNGETGEIVWDKGRDFATVRKVLSMPQVNIVKKTEVQTGGFSKESILPKRNSDKLIARKKDWDPKKYGGFDSPTVAYSVLVVAKVEKGKSKKLKSVKELLGITIMERSSFEKNPIDFLEAKGYKEVKKDLIIKLPKYSLFELENGRKRMLASAGELQKGNELALPSKYVNFLYLASHYEKLKGSPEDNEQKQLFVEQHKHYLDEIIEQISEFSKRVILADANLDKVLSAYNKHRDKPIREQAENIIHLFTLTNLGAPAAFKYFDTTIDRKRYTSTKEVLDATLIHQSITGLYETRIDLSQLGGDGGGSSEAAAKGGSGGLLGRDLLTKLKAQIQFSTEGPQVTWEDRPAMCLVLNLEEEYRLHEKPVPPSIDPSWLQLFPMVWAEKAGMGLANQVPPVVVELKSDASPVAVRQYPMSKEAREGIRPHIQRFLDLGILVPCQSPWNTPLLPVKKPGTNDYRPVQDLREVNKRVQDIHPTVPNPYNLLSSLPPSHTWYSVLDLKDAFFCLKLHPNSQPLFAFEWRDPEKGNTGQLTWTRLPQGFKNSPTLFNEALHRDLASFRALNPQVVMLQYVDDLLVAAPTYRDCKEGTRRLLQELSKLGYRVSAKKAQLCREEVTYLGYLLKGGKRWLTPARKATVMKIPTPTTPRQVREFLGKAGFCRLFIPGFASLAAPLYPLTRPKVPFTWTEAHQEAFGRIKEALLSAPALALPDLTKPFALYVDEKEGVARGVLTQTLGPWRRPVAYLSKKLDPVASGWPTCLKAIAAVALLLKDADKLTLGQNVLVIAPHNLESIVRQPPDRWMTNARMTHYQSLLLNERVSFAPPAILNPATLLPVESDDTPIHICSEILAEETGTRPDLRDQPLPGVPAWYTDGSSFIMDGRRQAGAAIVDNKRTVWASNLPEGTSAQKAELIALTQALRLAEGKSINIYTDSRYAFATAHVHGAIYKQRGWLTSAGKDIKNKEEILALLEAIHLPKRVAIIHCPGHQRGTDPVATGNRKADEAAKQAAQSTRILTETTKNAGKRTADGSEFEKRTADGSEFESPKKKAKVE

SEQ ID NO: 1726 - protein, 2127 aa, synthetic construct
MPAAKRVKLDGGDKKYSIGLDIGTNSVGWAVITDEYKVPSKKFKVLGNTDRHSIKKNLIGALLFDSGETAEATRLKRTARRRYTRRKNRICYLQEIFSNEMAKVDDSFFHRLEESFLVEEDKKHERHPIFGNIVDEVAYHEKYPTIYHLRKKLVDSTDKADLRLIYLALAHMIKFRGHFLIEGDLNPDNSDVDKLFIQLVQTYNQLFEENPINASGVDAKAILSARLSKSRRLENLIAQLPGEKKNGLFGNLIALSLGLTPNFKSNFDLAEDAKLQLSKDTYDDDLDNLLAQIGDQYADLFLAAKNLSDAILLSDILRVNTEITKAPLSASMIKRYDEHHQDLTLLKALVRQQLPEKYKEIFFDQSKNGYAGYIDGGASQEEFYKFIKPILEKMDGTEELLVKLNREDLLRKQRTFDNGSIPHQIHLGELHAILRRQEDFYPFLKDNREKIEKILTFRIPYYVGPLARGNSRFAWMTRKSEETITPWNFEEVVDKGASAQSFIERMTNFDKNLPNEKVLPKHSLLYEYFTVYNELTKVKYVTEGMRKPAFLSGEQKKAIVDLLFKTNRKVTVKQLKEDYFKKIECFDSVEISGVEDRFNASLGTYHDLLKIIKDKDFLDNEENEDILEDIVLTLTLFEDREMIEERLKTYAHLFDDKVMKQLKRRRYTGWGRLSRKLINGIRDKQSGKTILDFLKSDGFANRNFMQLIHDDSLTFKEDIQKAQVSGQGDSLHEHIANLAGSPAIKKGILQTVKVVDELVKVMGRHKPENIVIEMARENQTTQKGQKNSRERMKRIEEGIKELGSQILKEHPVENTQLQNEKLYLYYLQNGRDMYVDQELDINRLSDYDVDHIVPQSFLKDDSIDNKVLTRSDKARGKSDNVPSEEVVKKMKNYWRQLLNAKLITQRKFDNLTKAERGGLSELDKAGFIKRQLVETRQITKHVAQILDSRMNTKYDENDKLIREVKVITLKSKLVSDFRKDFQFYKVREINNYHHAHDAYLNAVVGTALIKKYPKLESEFVYGDYKVYDVRKMIAKSEQEIGKATAKYFFYSNIMNFFKTEITLANGEIRKRPLIETNGETGEIVWDKGRDFATVRKVLSMPQVNIVKKTEVQTGGFSKESILPKRNSDKLIARKKDWDPKKYGGFDSPTVAYSVLVVAKVEKGKSKKLKSVKELLGITIMERSSFEKNPIDFLEAKGYKEVKKDLIIKLPKYSLFELENGRKRMLASAGELQKGNELALPSKYVNFLYLASHYEKLKGSPEDNEQKQLFVEQHKHYLDEIIEQISEFSKRVILADANLDKVLSAYNKHRDKPIREQAENIIHLFTLTNLGAPAAFKYFDTTIDRKRYTSTKEVLDATLIHQSITGLYETRIDLSQLGGDGGGGGGSSEAAAKGGLLGRDLLTKLKAQIQFSTEGPQVTWEDRPAMCLVLNLEEEYRLHEKPVPPSIDPSWLQLFPMVWAEKAGMGLANQVPPVVVELKSDASPVAVRQYPMSKEAREGIRPHIQRFLDLGILVPCQSPWNTPLLPVKKPGTNDYRPVQDLREVNKRVQDIHPTVPNPYNLLSSLPPSHTWYSVLDLKDAFFCLKLHPNSQPLFAFEWRDPEKGNTGQLTWTRLPQGFKNSPTLFNEALHRDLASFRALNPQVVMLQYVDDLLVAAPTYRDCKEGTRRLLQELSKLGYRVSAKKAQLCREEVTYLGYLLKGGKRWLTPARKATVMKIPTPTTPRQVREFLGKAGFCRLFIPGFASLAAPLYPLTRPKVPFTWTEAHQEAFGRIKEALLSAPALALPDLTKPFALYVDEKEGVARGVLTQTLGPWRRPVAYLSKKLDPVASGWPTCLKAIAAVALLLKDADKLTLGQNVLVIAPHNLESIVRQPPDRWMTNARMTHYQSLLLNERVSFAPPAILNPATLLPVESDDTPIHICSEILAEETGTRPDLRDQPLPGVPAWYTDGSSFIMDGRRQAGAAIVDNKRTVWASNLPEGTSAQKAELIALTQALRLAEGKSINIYTDSRYAFATAHVHGAIYKQRGWLTSAGKDIKNKEEILALLEAIHLPKRVAIIHCPGHQRGTDPVATGNRKADEAAKQAAQSTRILTETTKNAGKRTADGSEFEKRTADGSEFESPKKKAKVE

SEQ ID NO: 1727 - protein, 2121 aa, synthetic construct
MPAAKRVKLDGGDKKYSIGLDIGTNSVGWAVITDEYKVPSKKFKVLGNTDRHSIKKNLIGALLFDSGETAEATRLKRTARRRYTRRKNRICYLQEIFSNEMAKVDDSFFHRLEESFLVEEDKKHERHPIFGNIVDEVAYHEKYPTIYHLRKKLVDSTDKADLRLIYLALAHMIKFRGHFLIEGDLNPDNSDVDKLFIQLVQTYNQLFEENPINASGVDAKAILSARLSKSRRLENLIAQLPGEKKNGLFGNLIALSLGLTPNFKSNFDLAEDAKLQLSKDTYDDDLDNLLAQIGDQYADLFLAAKNLSDAILLSDILRVNTEITKAPLSASMIKRYDEHHQDLTLLKALVRQQLPEKYKEIFFDQSKNGYAGYIDGGASQEEFYKFIKPILEKMDGTEELLVKLNREDLLRKQRTFDNGSIPHQIHLGELHAILRRQEDFYPFLKDNREKIEKILTFRIPYYVGPLARGNSRFAWMTRKSEETITPWNFEEVVDKGASAQSFIERMTNFDKNLPNEKVLPKHSLLYEYFTVYNELTKVKYVTEGMRKPAFLSGEQKKAIVDLLFKTNRKVTVKQLKEDYFKKIECFDSVEISGVEDRFNASLGTYHDLLKIIKDKDFLDNEENEDILEDIVLTLTLFEDREMIEERLKTYAHLFDDKVMKQLKRRRYTGWGRLSRKLINGIRDKQSGKTILDFLKSDGFANRNFMQLIHDDSLTFKEDIQKAQVSGQGDSLHEHIANLAGSPAIKKGILQTVKVVDELVKVMGRHKPENIVIEMARENQTTQKGQKNSRERMKRIEEGIKELGSQILKEHPVENTQLQNEKLYLYYLQNGRDMYVDQELDINRLSDYDVDHIVPQSFLKDDSIDNKVLTRSDKARGKSDNVPSEEVVKKMKNYWRQLLNAKLITQRKFDNLTKAERGGLSELDKAGFIKRQLVETRQITKHVAQILDSRMNTKYDENDKLIREVKVITLKSKLVSDFRKDFQFYKVREINNYHHAHDAYLNAVVGTALIKKYPKLESEFVYGDYKVYDVRKMIAKSEQEIGKATAKYFFYSNIMNFFKTEITLANGEIRKRPLIETNGETGEIVWDKGRDFATVRKVLSMPQVNIVKKTEVQTGGFSKESILPKRNSDKLIARKKDWDPKKYGGFDSPTVAYSVLVVAKVEKGKSKKLKSVKELLGITIMERSSFEKNPIDFLEAKGYKEVKKDLIIKLPKYSLFELENGRKRMLASAGELQKGNELALPSKYVNFLYLASHYEKLKGSPEDNEQKQLFVEQHKHYLDEIIEQISEFSKRVILADANLDKVLSAYNKHRDKPIREQAENIIHLFTLTNLGAPAAFKYFDTTIDRKRYTSTKEVLDATLIHQSITGLYETRIDLSQLGGDGGPAPAPGGLLGRDLLTKLKAQIQFSTEGPQVTWEDRPAMCLVLNLEEEYRLHEKPVPPSIDPSWLQLFPMVWAEKAGMGLANQVPPVVVELKSDASPVAVRQYPMSKEAREGIRPHIQRFLDLGILVPCQSPWNTPLLPVKKPGTNDYRPVQDLREVNKRVQDIHPTVPNPYNLLSSLPPSHTWYSVLDLKDAFFCLKLHPNSQPLFAFEWRDPEKGNTGQLTWTRLPQGFKNSPTLFNEALHRDLASFRALNPQVVMLQYVDDLLVAAPTYRDCKEGTRRLLQELSKLGYRVSAKKAQLCREEVTYLGYLLKGGKRWLTPARKATVMKIPTPTTPRQVREFLGKAGFCRLFIPGFASLAAPLYPLTRPKVPFTWTEAHQEAFGRIKEALLSAPALALPDLTKPFALYVDEKEGVARGVLTQTLGPWRRPVAYLSKKLDPVASGWPTCLKAIAAVALLLKDADKLTLGQNVLVIAPHNLESIVRQPPDRWMTNARMTHYQSLLLNERVSFAPPAILNPATLLPVESDDTPIHICSEILAEETGTRPDLRDQPLPGVPAWYTDGSSFIMDGRRQAGAAIVDNKRTVWASNLPEGTSAQKAELIALTQALRLAEGKSINIYTDSRYAFATAHVHGAIYKQRGWLTSAGKDIKNKEEILALLEAIHLPKRVAIIHCPGHQRGTDPVATGNRKADEAAKQAAQSTRILTETTKNAGKRTADGSEFEKRTADGSEFESPKKKAKVE

SEQ ID NO: 1728 - protein, 2122 aa, synthetic construct
MPAAKRVKLDGGDKKYSIGLDIGTNSVGWAVITDEYKVPSKKFKVLGNTDRHSIKKNLIGALLFDSGETAEATRLKRTARRRYTRRKNRICYLQEIFSNEMAKVDDSFFHRLEESFLVEEDKKHERHPIFGNIVDEVAYHEKYPTIYHLRKKLVDSTDKADLRLIYLALAHMIKFRGHFLIEGDLNPDNSDVDKLFIQLVQTYNQLFEENPINASGVDAKAILSARLSKSRRLENLIAQLPGEKKNGLFGNLIALSLGLTPNFKSNFDLAEDAKLQLSKDTYDDDLDNLLAQIGDQYADLFLAAKNLSDAILLSDILRVNTEITKAPLSASMIKRYDEHHQDLTLLKALVRQQLPEKYKEIFFDQSKNGYAGYIDGGASQEEFYKFIKPILEKMDGTEELLVKLNREDLLRKQRTFDNGSIPHQIHLGELHAILRRQEDFYPFLKDNREKIEKILTFRIPYYVGPLARGNSRFAWMTRKSEETITPWNFEEVVDKGASAQSFIERMTNFDKNLPNEKVLPKHSLLYEYFTVYNELTKVKYVTEGMRKPAFLSGEQKKAIVDLLFKTNRKVTVKQLKEDYFKKIECFDSVEISGVEDRFNASLGTYHDLLKIIKDKDFLDNEENEDILEDIVLTLTLFEDREMIEERLKTYAHLFDDKVMKQLKRRRYTGWGRLSRKLINGIRDKQSGKTILDFLKSDGFANRNFMQLIHDDSLTFKEDIQKAQVSGQGDSLHEHIANLAGSPAIKKGILQTVKVVDELVKVMGRHKPENIVIEMARENQTTQKGQKNSRERMKRIEEGIKELGSQILKEHPVENTQLQNEKLYLYYLQNGRDMYVDQELDINRLSDYDVDHIVPQSFLKDDSIDNKVLTRSDKARGKSDNVPSEEVVKKMKNYWRQLLNAKLITQRKFDNLTKAERGGLSELDKAGFIKRQLVETRQITKHVAQILDSRMNTKYDENDKLIREVKVITLKSKLVSDFRKDFQFYKVREINNYHHAHDAYLNAVVGTALIKKYPKLESEFVYGDYKVYDVRKMIAKSEQEIGKATAKYFFYSNIMNFFKTEITLANGEIRKRPLIETNGETGEIVWDKGRDFATVRKVLSMPQVNIVKKTEVQTGGFSKESILPKRNSDKLIARKKDWDPKKYGGFDSPTVAYSVLVVAKVEKGKSKKLKSVKELLGITIMERSSFEKNPIDFLEAKGYKEVKKDLIIKLPKYSLFELENGRKRMLASAGELQKGNELALPSKYVNFLYLASHYEKLKGSPEDNEQKQLFVEQHKHYLDEIIEQISEFSKRVILADANLDKVLSAYNKHRDKPIREQAENIIHLFTLTNLGAPAAFKYFDTTIDRKRYTSTKEVLDATLIHQSITGLYETRIDLSQLGGDGGPAPGGSGGLLGRDLLTKLKAQIQFSTEGPQVTWEDRPAMCLVLNLEEEYRLHEKPVPPSIDPSWLQLFPMVWAEKAGMGLANQVPPVVVELKSDASPVAVRQYPMSKEAREGIRPHIQRFLDLGILVPCQSPWNTPLLPVKKPGTNDYRPVQDLREVNKRVQDIHPTVPNPYNLLSSLPPSHTWYSVLDLKDAFFCLKLHPNSQPLFAFEWRDPEKGNTGQLTWTRLPQGFKNSPTLFNEALHRDLASFRALNPQVVMLQYVDDLLVAAPTYRDCKEGTRRLLQELSKLGYRVSAKKAQLCREEVTYLGYLLKGGKRWLTPARKATVMKIPTPTTPRQVREFLGKAGFCRLFIPGFASLAAPLYPLTRPKVPFTWTEAHQEAFGRIKEALLSAPALALPDLTKPFALYVDEKEGVARGVLTQTLGPWRRPVAYLSKKLDPVASGWPTCLKAIAAVALLLKDADKLTLGQNVLVIAPHNLESIVRQPPDRWMTNARMTHYQSLLLNERVSFAPPAILNPATLLPVESDDTPIHICSEILAEETGTRPDLRDQPLPGVPAWYTDGSSFIMDGRRQAGAAIVDNKRTVWASNLPEGTSAQKAELIALTQALRLAEGKSINIYTDSRYAFATAHVHGAIYKQRGWLTSAGKDIKNKEEILALLEAIHLPKRVAIIHCPGHQRGTDPVATGNRKADEAAKQAAQSTRILTETTKNAGKRTADGSEFEKRTADGSEFESPKKKAKVE

SEQ ID NO: 1729 - protein, 2131 aa, synthetic construct
MPAAKRVKLDGGDKKYSIGLDIGTNSVGWAVITDEYKVPSKKFKVLGNTDRHSIKKNLIGALLFDSGETAEATRLKRTARRRYTRRKNRICYLQEIFSNEMAKVDDSFFHRLEESFLVEEDKKHERHPIFGNIVDEVAYHEKYPTIYHLRKKLVDSTDKADLRLIYLALAHMIKFRGHFLIEGDLNPDNSDVDKLFIQLVQTYNQLFEENPINASGVDAKAILSARLSKSRRLENLIAQLPGEKKNGLFGNLIALSLGLTPNFKSNFDLAEDAKLQLSKDTYDDDLDNLLAQIGDQYADLFLAAKNLSDAILLSDILRVNTEITKAPLSASMIKRYDEHHQDLTLLKALVRQQLPEKYKEIFFDQSKNGYAGYIDGGASQEEFYKFIKPILEKMDGTEELLVKLNREDLLRKQRTFDNGSIPHQIHLGELHAILRRQEDFYPFLKDNREKIEKILTFRIPYYVGPLARGNSRFAWMTRKSEETITPWNFEEVVDKGASAQSFIERMTNFDKNLPNEKVLPKHSLLYEYFTVYNELTKVKYVTEGMRKPAFLSGEQKKAIVDLLFKTNRKVTVKQLKEDYFKKIECFDSVEISGVEDRFNASLGTYHDLLKIIKDKDFLDNEENEDILEDIVLTLTLFEDREMIEERLKTYAHLFDDKVMKQLKRRRYTGWGRLSRKLINGIRDKQSGKTILDFLKSDGFANRNFMQLIHDDSLTFKEDIQKAQVSGQGDSLHEHIANLAGSPAIKKGILQTVKVVDELVKVMGRHKPENIVIEMARENQTTQKGQKNSRERMKRIEEGIKELGSQILKEHPVENTQLQNEKLYLYYLQNGRDMYVDQELDINRLSDYDVDHIVPQSFLKDDSIDNKVLTRSDKARGKSDNVPSEEVVKKMKNYWRQLLNAKLITQRKFDNLTKAERGGLSELDKAGFIKRQLVETRQITKHVAQILDSRMNTKYDENDKLIREVKVITLKSKLVSDFRKDFQFYKVREINNYHHAHDAYLNAVVGTALIKKYPKLESEFVYGDYKVYDVRKMIAKSEQEIGKATAKYFFYSNIMNFFKTEITLANGEIRKRPLIETNGETGEIVWDKGRDFATVRKVLSMPQVNIVKKTEVQTGGFSKESILPKRNSDKLIARKKDWDPKKYGGFDSPTVAYSVLVVAKVEKGKSKKLKSVKELLGITIMERSSFEKNPIDFLEAKGYKEVKKDLIIKLPKYSLFELENGRKRMLASAGELQKGNELALPSKYVNFLYLASHYEKLKGSPEDNEQKQLFVEQHKHYLDEIIEQISEFSKRVILADANLDKVLSAYNKHRDKPIREQAENIIHLFTLTNLGAPAAFKYFDTTIDRKRYTSTKEVLDATLIHQSITGLYETRIDLSQLGGDGGGGGGSGGGGSGGGGSGGLLGRDLLTKLKAQIQFSTEGPQVTWEDRPAMCLVLNLEEEYRLHEKPVPPSIDPSWLQLFPMVWAEKAGMGLANQVPPVVVELKSDASPVAVRQYPMSKEAREGIRPHIQRFLDLGILVPCQSPWNTPLLPVKKPGTNDYRPVQDLREVNKRVQDIHPTVPNPYNLLSSLPPSHTWYSVLDLKDAFFCLKLHPNSQPLFAFEWRDPEKGNTGQLTWTRLPQGFKNSPTLFNEALHRDLASFRALNPQVVMLQYVDDLLVAAPTYRDCKEGTRRLLQELSKLGYRVSAKKAQLCREEVTYLGYLLKGGKRWLTPARKATVMKIPTPTTPRQVREFLGKAGFCRLFIPGFASLAAPLYPLTRPKVPFTWTEAHQEAFGRIKEALLSAPALALPDLTKPFALYVDEKEGVARGVLTQTLGPWRRPVAYLSKKLDPVASGWPTCLKAIAAVALLLKDADKLTLGQNVLVIAPHNLESIVRQPPDRWMTNARMTHYQSLLLNERVSFAPPAILNPATLLPVESDDTPIHICSEILAEETGTRPDLRDQPLPGVPAWYTDGSSFIMDGRRQAGAAIVDNKRTVWASNLPEGTSAQKAELIALTQALRLAEGKSINIYTDSRYAFATAHVHGAIYKQRGWLTSAGKDIKNKEEILALLEAIHLPKRVAIIHCPGHQRGTDPVATGNRKADEAAKQAAQSTRILTETTKNAGKRTADGSEFEKRTADGSEFESPKKKAKVE

SEQ ID NO: 1730 - protein, 2125 aa, synthetic construct
MPAAKRVKLDGGDKKYSIGLDIGTNSVGWAVITDEYKVPSKKFKVLGNTDRHSIKKNLIGALLFDSGETAEATRLKRTARRRYTRRKNRICYLQEIFSNEMAKVDDSFFHRLEESFLVEEDKKHERHPIFGNIVDEVAYHEKYPTIYHLRKKLVDSTDKADLRLIYLALAHMIKFRGHFLIEGDLNPDNSDVDKLFIQLVQTYNQLFEENPINASGVDAKAILSARLSKSRRLENLIAQLPGEKKNGLFGNLIALSLGLTPNFKSNFDLAEDAKLQLSKDTYDDDLDNLLAQIGDQYADLFLAAKNLSDAILLSDILRVNTEITKAPLSASMIKRYDEHHQDLTLLKALVRQQLPEKYKEIFFDQSKNGYAGYIDGGASQEEFYKFIKPILEKMDGTEELLVKLNREDLLRKQRTFDNGSIPHQIHLGELHAILRRQEDFYPFLKDNREKIEKILTFRIPYYVGPLARGNSRFAWMTRKSEETITPWNFEEVVDKGASAQSFIERMTNFDKNLPNEKVLPKHSLLYEYFTVYNELTKVKYVTEGMRKPAFLSGEQKKAIVDLLFKTNRKVTVKQLKEDYFKKIECFDSVEISGVEDRFNASLGTYHDLLKIIKDKDFLDNEENEDILEDIVLTLTLFEDREMIEERLKTYAHLFDDKVMKQLKRRRYTGWGRLSRKLINGIRDKQSGKTILDFLKSDGFANRNFMQLIHDDSLTFKEDIQKAQVSGQGDSLHEHIANLAGSPAIKKGILQTVKVVDELVKVMGRHKPENIVIEMARENQTTQKGQKNSRERMKRIEEGIKELGSQILKEHPVENTQLQNEKLYLYYLQNGRDMYVDQELDINRLSDYDVDHIVPQSFLKDDSIDNKVLTRSDKARGKSDNVPSEEVVKKMKNYWRQLLNAKLITQRKFDNLTKAERGGLSELDKAGFIKRQLVETRQITKHVAQILDSRMNTKYDENDKLIREVKVITLKSKLVSDFRKDFQFYKVREINNYHHAHDAYLNAVVGTALIKKYPKLESEFVYGDYKVYDVRKMIAKSEQEIGKATAKYFFYSNIMNFFKTEITLANGEIRKRPLIETNGETGEIVWDKGRDFATVRKVLSMPQVNIVKKTEVQTGGFSKESILPKRNSDKLIARKKDWDPKKYGGFDSPTVAYSVLVVAKVEKGKSKKLKSVKELLGITIMERSSFEKNPIDFLEAKGYKEVKKDLIIKLPKYSLFELENGRKRMLASAGELQKGNELALPSKYVNFLYLASHYEKLKGSPEDNEQKQLFVEQHKHYLDEIIEQISEFSKRVILADANLDKVLSAYNKHRDKPIREQAENIIHLFTLTNLGAPAAFKYFDTTIDRKRYTSTKEVLDATLIHQSITGLYETRIDLSQLGGDGGGGSPAPGGGGGLLGRDLLTKLKAQIQFSTEGPQVTWEDRPAMCLVLNLEEEYRLHEKPVPPSIDPSWLQLFPMVWAEKAGMGLANQVPPVVVELKSDASPVAVRQYPMSKEAREGIRPHIQRFLDLGILVPCQSPWNTPLLPVKKPGTNDYRPVQDLREVNKRVQDIHPTVPNPYNLLSSLPPSHTWYSVLDLKDAFFCLKLHPNSQPLFAFEWRDPEKGNTGQLTWTRLPQGFKNSPTLFNEALHRDLASFRALNPQVVMLQYVDDLLVAAPTYRDCKEGTRRLLQELSKLGYRVSAKKAQLCREEVTYLGYLLKGGKRWLTPARKATVMKIPTPTTPRQVREFLGKAGFCRLFIPGFASLAAPLYPLTRPKVPFTWTEAHQEAFGRIKEALLSAPALALPDLTKPFALYVDEKEGVARGVLTQTLGPWRRPVAYLSKKLDPVASGWPTCLKAIAAVALLLKDADKLTLGQNVLVIAPHNLESIVRQPPDRWMTNARMTHYQSLLLNERVSFAPPAILNPATLLPVESDDTPIHICSEILAEETGTRPDLRDQPLPGVPAWYTDGSSFIMDGRRQAGAAIVDNKRTVWASNLPEGTSAQKAELIALTQALRLAEGKSINIYTDSRYAFATAHVHGAIYKQRGWLTSAGKDIKNKEEILALLEAIHLPKRVAIIHCPGHQRGTDPVATGNRKADEAAKQAAQSTRILTETTKNAGKRTADGSEFEKRTADGSEFESPKKKAKVE

SEQ ID NO: 1731 - protein, 2122 aa, synthetic construct
MPAAKRVKLDGGDKKYSIGLDIGTNSVGWAVITDEYKVPSKKFKVLGNTDRHSIKKNLIGALLFDSGETAEATRLKRTARRRYTRRKNRICYLQEIFSNEMAKVDDSFFHRLEESFLVEEDKKHERHPIFGNIVDEVAYHEKYPTIYHLRKKLVDSTDKADLRLIYLALAHMIKFRGHFLIEGDLNPDNSDVDKLFIQLVQTYNQLFEENPINASGVDAKAILSARLSKSRRLENLIAQLPGEKKNGLFGNLIALSLGLTPNFKSNFDLAEDAKLQLSKDTYDDDLDNLLAQIGDQYADLFLAAKNLSDAILLSDILRVNTEITKAPLSASMIKRYDEHHQDLTLLKALVRQQLPEKYKEIFFDQSKNGYAGYIDGGASQEEFYKFIKPILEKMDGTEELLVKLNREDLLRKQRTFDNGSIPHQIHLGELHAILRRQEDFYPFLKDNREKIEKILTFRIPYYVGPLARGNSRFAWMTRKSEETITPWNFEEVVDKGASAQSFIERMTNFDKNLPNEKVLPKHSLLYEYFTVYNELTKVKYVTEGMRKPAFLSGEQKKAIVDLLFKTNRKVTVKQLKEDYFKKIECFDSVEISGVEDRFNASLGTYHDLLKIIKDKDFLDNEENEDILEDIVLTLTLFEDREMIEERLKTYAHLFDDKVMKQLKRRRYTGWGRLSRKLINGIRDKQSGKTILDFLKSDGFANRNFMQLIHDDSLTFKEDIQKAQVSGQGDSLHEHIANLAGSPAIKKGILQTVKVVDELVKVMGRHKPENIVIEMARENQTTQKGQKNSRERMKRIEEGIKELGSQILKEHPVENTQLQNEKLYLYYLQNGRDMYVDQELDINRLSDYDVDHIVPQSFLKDDSIDNKVLTRSDKARGKSDNVPSEEVVKKMKNYWRQLLNAKLITQRKFDNLTKAERGGLSELDKAGFIKRQLVETRQITKHVAQILDSRMNTKYDENDKLIREVKVITLKSKLVSDFRKDFQFYKVREINNYHHAHDAYLNAVVGTALIKKYPKLESEFVYGDYKVYDVRKMIAKSEQEIGKATAKYFFYSNIMNFFKTEITLANGEIRKRPLIETNGETGEIVWDKGRDFATVRKVLSMPQVNIVKKTEVQTGGFSKESILPKRNSDKLIARKKDWDPKKYGGFDSPTVAYSVLVVAKVEKGKSKKLKSVKELLGITIMERSSFEKNPIDFLEAKGYKEVKKDLIIKLPKYSLFELENGRKRMLASAGELQKGNELALPSKYVNFLYLASHYEKLKGSPEDNEQKQLFVEQHKHYLDEIIEQISEFSKRVILADANLDKVLSAYNKHRDKPIREQAENIIHLFTLTNLGAPAAFKYFDTTIDRKRYTSTKEVLDATLIHQSITGLYETRIDLSQLGGDGGGSSPAPGGLLGRDLLTKLKAQIQFSTEGPQVTWEDRPAMCLVLNLEEEYRLHEKPVPPSIDPSWLQLFPMVWAEKAGMGLANQVPPVVVELKSDASPVAVRQYPMSKEAREGIRPHIQRFLDLGILVPCQSPWNTPLLPVKKPGTNDYRPVQDLREVNKRVQDIHPTVPNPYNLLSSLPPSHTWYSVLDLKDAFFCLKLHPNSQPLFAFEWRDPEKGNTGQLTWTRLPQGFKNSPTLFNEALHRDLASFRALNPQVVMLQYVDDLLVAAPTYRDCKEGTRRLLQELSKLGYRVSAKKAQLCREEVTYLGYLLKGGKRWLTPARKATVMKIPTPTTPRQVREFLGKAGFCRLFIPGFASLAAPLYPLTRPKVPFTWTEAHQEAFGRIKEALLSAPALALPDLTKPFALYVDEKEGVARGVLTQTLGPWRRPVAYLSKKLDPVASGWPTCLKAIAAVALLLKDADKLTLGQNVLVIAPHNLESIVRQPPDRWMTNARMTHYQSLLLNERVSFAPPAILNPATLLPVESDDTPIHICSEILAEETGTRPDLRDQPLPGVPAWYTDGSSFIMDGRRQAGAAIVDNKRTVWASNLPEGTSAQKAELIALTQALRLAEGKSINIYTDSRYAFATAHVHGAIYKQRGWLTSAGKDIKNKEEILALLEAIHLPKRVAIIHCPGHQRGTDPVATGNRKADEAAKQAAQSTRILTETTKNAGKRTADGSEFEKRTADGSEFESPKKKAKVE

SEQ ID NO: 1732 - protein, 2125 aa, synthetic construct
MPAAKRVKLDGGDKKYSIGLDIGTNSVGWAVITDEYKVPSKKFKVLGNTDRHSIKKNLIGALLFDSGETAEATRLKRTARRRYTRRKNRICYLQEIFSNEMAKVDDSFFHRLEESFLVEEDKKHERHPIFGNIVDEVAYHEKYPTIYHLRKKLVDSTDKADLRLIYLALAHMIKFRGHFLIEGDLNPDNSDVDKLFIQLVQTYNQLFEENPINASGVDAKAILSARLSKSRRLENLIAQLPGEKKNGLFGNLIALSLGLTPNFKSNFDLAEDAKLQLSKDTYDDDLDNLLAQIGDQYADLFLAAKNLSDAILLSDILRVNTEITKAPLSASMIKRYDEHHQDLTLLKALVRQQLPEKYKEIFFDQSKNGYAGYIDGGASQEEFYKFIKPILEKMDGTEELLVKLNREDLLRKQRTFDNGSIPHQIHLGELHAILRRQEDFYPFLKDNREKIEKILTFRIPYYVGPLARGNSRFAWMTRKSEETITPWNFEEVVDKGASAQSFIERMTNFDKNLPNEKVLPKHSLLYEYFTVYNELTKVKYVTEGMRKPAFLSGEQKKAIVDLLFKTNRKVTVKQLKEDYFKKIECFDSVEISGVEDRFNASLGTYHDLLKIIKDKDFLDNEENEDILEDIVLTLTLFEDREMIEERLKTYAHLFDDKVMKQLKRRRYTGWGRLSRKLINGIRDKQSGKTILDFLKSDGFANRNFMQLIHDDSLTFKEDIQKAQVSGQGDSLHEHIANLAGSPAIKKGILQTVKVVDELVKVMGRHKPENIVIEMARENQTTQKGQKNSRERMKRIEEGIKELGSQILKEHPVENTQLQNEKLYLYYLQNGRDMYVDQELDINRLSDYDVDHIVPQSFLKDDSIDNKVLTRSDKARGKSDNVPSEEVVKKMKNYWRQLLNAKLITQRKFDNLTKAERGGLSELDKAGFIKRQLVETRQITKHVAQILDSRMNTKYDENDKLIREVKVITLKSKLVSDFRKDFQFYKVREINNYHHAHDAYLNAVVGTALIKKYPKLESEFVYGDYKVYDVRKMIAKSEQEIGKATAKYFFYSNIMNFFKTEITLANGEIRKRPLIETNGETGEIVWDKGRDFATVRKVLSMPQVNIVKKTEVQTGGFSKESILPKRNSDKLIARKKDWDPKKYGGFDSPTVAYSVLVVAKVEKGKSKKLKSVKELLGITIMERSSFEKNPIDFLEAKGYKEVKKDLIIKLPKYSLFELENGRKRMLASAGELQKGNELALPSKYVNFLYLASHYEKLKGSPEDNEQKQLFVEQHKHYLDEIIEQISEFSKRVILADANLDKVLSAYNKHRDKPIREQAENIIHLFTLTNLGAPAAFKYFDTTIDRKRYTSTKEVLDATLIHQSITGLYETRIDLSQLGGDGGGGSPAPGSSGGLLGRDLLTKLKAQIQFSTEGPQVTWEDRPAMCLVLNLEEEYRLHEKPVPPSIDPSWLQLFPMVWAEKAGMGLANQVPPVVVELKSDASPVAVRQYPMSKEAREGIRPHIQRFLDLGILVPCQSPWNTPLLPVKKPGTNDYRPVQDLREVNKRVQDIHPTVPNPYNLLSSLPPSHTWYSVLDLKDAFFCLKLHPNSQPLFAFEWRDPEKGNTGQLTWTRLPQGFKNSPTLFNEALHRDLASFRALNPQVVMLQYVDDLLVAAPTYRDCKEGTRRLLQELSKLGYRVSAKKAQLCREEVTYLGYLLKGGKRWLTPARKATVMKIPTPTTPRQVREFLGKAGFCRLFIPGFASLAAPLYPLTRPKVPFTWTEAHQEAFGRIKEALLSAPALALPDLTKPFALYVDEKEGVARGVLTQTLGPWRRPVAYLSKKLDPVASGWPTCLKAIAAVALLLKDADKLTLGQNVLVIAPHNLESIVRQPPDRWMTNARMTHYQSLLLNERVSFAPPAILNPATLLPVESDDTPIHICSEILAEETGTRPDLRDQPLPGVPAWYTDGSSFIMDGRRQAGAAIVDNKRTVWASNLPEGTSAQKAELIALTQALRLAEGKSINIYTDSRYAFATAHVHGAIYKQRGWLTSAGKDIKNKEEILALLEAIHLPKRVAIIHCPGHQRGTDPVATGNRKADEAAKQAAQSTRILTETTKNAGKRTADGSEFEKRTADGSEFESPKKKAKVE

SEQ ID NO: 1733 - protein, 2122 aa, synthetic construct
MPAAKRVKLDGGDKKYSIGLDIGTNSVGWAVITDEYKVPSKKFKVLGNTDRHSIKKNLIGALLFDSGETAEATRLKRTARRRYTRRKNRICYLQEIFSNEMAKVDDSFFHRLEESFLVEEDKKHERHPIFGNIVDEVAYHEKYPTIYHLRKKLVDSTDKADLRLIYLALAHMIKFRGHFLIEGDLNPDNSDVDKLFIQLVQTYNQLFEENPINASGVDAKAILSARLSKSRRLENLIAQLPGEKKNGLFGNLIALSLGLTPNFKSNFDLAEDAKLQLSKDTYDDDLDNLLAQIGDQYADLFLAAKNLSDAILLSDILRVNTEITKAPLSASMIKRYDEHHQDLTLLKALVRQQLPEKYKEIFFDQSKNGYAGYIDGGASQEEFYKFIKPILEKMDGTEELLVKLNREDLLRKQRTFDNGSIPHQIHLGELHAILRRQEDFYPFLKDNREKIEKILTFRIPYYVGPLARGNSRFAWMTRKSEETITPWNFEEVVDKGASAQSFIERMTNFDKNLPNEKVLPKHSLLYEYFTVYNELTKVKYVTEGMRKPAFLSGEQKKAIVDLLFKTNRKVTVKQLKEDYFKKIECFDSVEISGVEDRFNASLGTYHDLLKIIKDKDFLDNEENEDILEDIVLTLTLFEDREMIEERLKTYAHLFDDKVMKQLKRRRYTGWGRLSRKLINGIRDKQSGKTILDFLKSDGFANRNFMQLIHDDSLTFKEDIQKAQVSGQGDSLHEHIANLAGSPAIKKGILQTVKVVDELVKVMGRHKPENIVIEMARENQTTQKGQKNSRERMKRIEEGIKELGSQILKEHPVENTQLQNEKLYLYYLQNGRDMYVDQELDINRLSDYDVDHIVPQSFLKDDSIDNKVLTRSDKARGKSDNVPSEEVVKKMKNYWRQLLNAKLITQRKFDNLTKAERGGLSELDKAGFIKRQLVETRQITKHVAQILDSRMNTKYDENDKLIREVKVITLKSKLVSDFRKDFQFYKVREINNYHHAHDAYLNAVVGTALIKKYPKLESEFVYGDYKVYDVRKMIAKSEQEIGKATAKYFFYSNIMNFFKTEITLANGEIRKRPLIETNGETGEIVWDKGRDFATVRKVLSMPQVNIVKKTEVQTGGFSKESILPKRNSDKLIARKKDWDPKKYGGFDSPTVAYSVLVVAKVEKGKSKKLKSVKELLGITIMERSSFEKNPIDFLEAKGYKEVKKDLIIKLPKYSLFELENGRKRMLASAGELQKGNELALPSKYVNFLYLASHYEKLKGSPEDNEQKQLFVEQHKHYLDEIIEQISEFSKRVILADANLDKVLSAYNKHRDKPIREQAENIIHLFTLTNLGAPAAFKYFDTTIDRKRYTSTKEVLDATLIHQSITGLYETRIDLSQLGGDGGGGSGSSGGLLGRDLLTKLKAQIQFSTEGPQVTWEDRPAMCLVLNLEEEYRLHEKPVPPSIDPSWLQLFPMVWAEKAGMGLANQVPPVVVELKSDASPVAVRQYPMSKEAREGIRPHIQRFLDLGILVPCQSPWNTPLLPVKKPGTNDYRPVQDLREVNKRVQDIHPTVPNPYNLLSSLPPSHTWYSVLDLKDAFFCLKLHPNSQPLFAFEWRDPEKGNTGQLTWTRLPQGFKNSPTLFNEALHRDLASFRALNPQVVMLQYVDDLLVAAPTYRDCKEGTRRLLQELSKLGYRVSAKKAQLCREEVTYLGYLLKGGKRWLTPARKATVMKIPTPTTPRQVREFLGKAGFCRLFIPGFASLAAPLYPLTRPKVPFTWTEAHQEAFGRIKEALLSAPALALPDLTKPFALYVDEKEGVARGVLTQTLGPWRRPVAYLSKKLDPVASGWPTCLKAIAAVALLLKDADKLTLGQNVLVIAPHNLESIVRQPPDRWMTNARMTHYQSLLLNERVSFAPPAILNPATLLPVESDDTPIHICSEILAEETGTRPDLRDQPLPGVPAWYTDGSSFIMDGRRQAGAAIVDNKRTVWASNLPEGTSAQKAELIALTQALRLAEGKSINIYTDSRYAFATAHVHGAIYKQRGWLTSAGKDIKNKEEILALLEAIHLPKRVAIIHCPGHQRGTDPVATGNRKADEAAKQAAQSTRILTETTKNAGKRTADGSEFEKRTADGSEFESPKKKAKVE

SEQ ID NO: 1734 - protein, 2125 aa, synthetic construct
MPAAKRVKLDGGDKKYSIGLDIGTNSVGWAVITDEYKVPSKKFKVLGNTDRHSIKKNLIGALLFDSGETAEATRLKRTARRRYTRRKNRICYLQEIFSNEMAKVDDSFFHRLEESFLVEEDKKHERHPIFGNIVDEVAYHEKYPTIYHLRKKLVDSTDKADLRLIYLALAHMIKFRGHFLIEGDLNPDNSDVDKLFIQLVQTYNQLFEENPINASGVDAKAILSARLSKSRRLENLIAQLPGEKKNGLFGNLIALSLGLTPNFKSNFDLAEDAKLQLSKDTYDDDLDNLLAQIGDQYADLFLAAKNLSDAILLSDILRVNTEITKAPLSASMIKRYDEHHQDLTLLKALVRQQLPEKYKEIFFDQSKNGYAGYIDGGASQEEFYKFIKPILEKMDGTEELLVKLNREDLLRKQRTFDNGSIPHQIHLGELHAILRRQEDFYPFLKDNREKIEKILTFRIPYYVGPLARGNSRFAWMTRKSEETITPWNFEEVVDKGASAQSFIERMTNFDKNLPNEKVLPKHSLLYEYFTVYNELTKVKYVTEGMRKPAFLSGEQKKAIVDLLFKTNRKVTVKQLKEDYFKKIECFDSVEISGVEDRFNASLGTYHDLLKIIKDKDFLDNEENEDILEDIVLTLTLFEDREMIEERLKTYAHLFDDKVMKQLKRRRYTGWGRLSRKLINGIRDKQSGKTILDFLKSDGFANRNFMQLIHDDSLTFKEDIQKAQVSGQGDSLHEHIANLAGSPAIKKGILQTVKVVDELVKVMGRHKPENIVIEMARENQTTQKGQKNSRERMKRIEEGIKELGSQILKEHPVENTQLQNEKLYLYYLQNGRDMYVDQELDINRLSDYDVDHIVPQSFLKDDSIDNKVLTRSDKARGKSDNVPSEEVVKKMKNYWRQLLNAKLITQRKFDNLTKAERGGLSELDKAGFIKRQLVETRQITKHVAQILDSRMNTKYDENDKLIREVKVITLKSKLVSDFRKDFQFYKVREINNYHHAHDAYLNAVVGTALIKKYPKLESEFVYGDYKVYDVRKMIAKSEQEIGKATAKYFFYSNIMNFFKTEITLANGEIRKRPLIETNGETGEIVWDKGRDFATVRKVLSMPQVNIVKKTEVQTGGFSKESILPKRNSDKLIARKKDWDPKKYGGFDSPTVAYSVLVVAKVEKGKSKKLKSVKELLGITIMERSSFEKNPIDFLEAKGYKEVKKDLIIKLPKYSLFELENGRKRMLASAGELQKGNELALPSKYVNFLYLASHYEKLKGSPEDNEQKQLFVEQHKHYLDEIIEQISEFSKRVILADANLDKVLSAYNKHRDKPIREQAENIIHLFTLTNLGAPAAFKYFDTTIDRKRYTSTKEVLDATLIHQSITGLYETRIDLSQLGGDGGGGGGSSPAPGGLLGRDLLTKLKAQIQFSTEGPQVTWEDRPAMCLVLNLEEEYRLHEKPVPPSIDPSWLQLFPMVWAEKAGMGLANQVPPVVVELKSDASPVAVRQYPMSKEAREGIRPHIQRFLDLGILVPCQSPWNTPLLPVKKPGTNDYRPVQDLREVNKRVQDIHPTVPNPYNLLSSLPPSHTWYSVLDLKDAFFCLKLHPNSQPLFAFEWRDPEKGNTGQLTWTRLPQGFKNSPTLFNEALHRDLASFRALNPQVVMLQYVDDLLVAAPTYRDCKEGTRRLLQELSKLGYRVSAKKAQLCREEVTYLGYLLKGGKRWLTPARKATVMKIPTPTTPRQVREFLGKAGFCRLFIPGFASLAAPLYPLTRPKVPFTWTEAHQEAFGRIKEALLSAPALALPDLTKPFALYVDEKEGVARGVLTQTLGPWRRPVAYLSKKLDPVASGWPTCLKAIAAVALLLKDADKLTLGQNVLVIAPHNLESIVRQPPDRWMTNARMTHYQSLLLNERVSFAPPAILNPATLLPVESDDTPIHICSEILAEETGTRPDLRDQPLPGVPAWYTDGSSFIMDGRRQAGAAIVDNKRTVWASNLPEGTSAQKAELIALTQALRLAEGKSINIYTDSRYAFATAHVHGAIYKQRGWLTSAGKDIKNKEEILALLEAIHLPKRVAIIHCPGHQRGTDPVATGNRKADEAAKQAAQSTRILTETTKNAGKRTADGSEFEKRTADGSEFESPKKKAKVE

SEQ ID NO: 1735 - protein, 2125 aa, synthetic construct
MPAAKRVKLDGGDKKYSIGLDIGTNSVGWAVITDEYKVPSKKFKVLGNTDRHSIKKNLIGALLFDSGETAEATRLKRTARRRYTRRKNRICYLQEIFSNEMAKVDDSFFHRLEESFLVEEDKKHERHPIFGNIVDEVAYHEKYPTIYHLRKKLVDSTDKADLRLIYLALAHMIKFRGHFLIEGDLNPDNSDVDKLFIQLVQTYNQLFEENPINASGVDAKAILSARLSKSRRLENLIAQLPGEKKNGLFGNLIALSLGLTPNFKSNFDLAEDAKLQLSKDTYDDDLDNLLAQIGDQYADLFLAAKNLSDAILLSDILRVNTEITKAPLSASMIKRYDEHHQDLTLLKALVRQQLPEKYKEIFFDQSKNGYAGYIDGGASQEEFYKFIKPILEKMDGTEELLVKLNREDLLRKQRTFDNGSIPHQIHLGELHAILRRQEDFYPFLKDNREKIEKILTFRIPYYVGPLARGNSRFAWMTRKSEETITPWNFEEVVDKGASAQSFIERMTNFDKNLPNEKVLPKHSLLYEYFTVYNELTKVKYVTEGMRKPAFLSGEQKKAIVDLLFKTNRKVTVKQLKEDYFKKIECFDSVEISGVEDRFNASLGTYHDLLKIIKDKDFLDNEENEDILEDIVLTLTLFEDREMIEERLKTYAHLFDDKVMKQLKRRRYTGWGRLSRKLINGIRDKQSGKTILDFLKSDGFANRNFMQLIHDDSLTFKEDIQKAQVSGQGDSLHEHIANLAGSPAIKKGILQTVKVVDELVKVMGRHKPENIVIEMARENQTTQKGQKNSRERMKRIEEGIKELGSQILKEHPVENTQLQNEKLYLYYLQNGRDMYVDQELDINRLSDYDVDHIVPQSFLKDDSIDNKVLTRSDKARGKSDNVPSEEVVKKMKNYWRQLLNAKLITQRKFDNLTKAERGGLSELDKAGFIKRQLVETRQITKHVAQILDSRMNTKYDENDKLIREVKVITLKSKLVSDFRKDFQFYKVREINNYHHAHDAYLNAVVGTALIKKYPKLESEFVYGDYKVYDVRKMIAKSEQEIGKATAKYFFYSNIMNFFKTEITLANGEIRKRPLIETNGETGEIVWDKGRDFATVRKVLSMPQVNIVKKTEVQTGGFSKESILPKRNSDKLIARKKDWDPKKYGGFDSPTVAYSVLVVAKVEKGKSKKLKSVKELLGITIMERSSFEKNPIDFLEAKGYKEVKKDLIIKLPKYSLFELENGRKRMLASAGELQKGNELALPSKYVNFLYLASHYEKLKGSPEDNEQKQLFVEQHKHYLDEIIEQISEFSKRVILADANLDKVLSAYNKHRDKPIREQAENIIHLFTLTNLGAPAAFKYFDTTIDRKRYTSTKEVLDATLIHQSITGLYETRIDLSQLGGDGGGSSGGSPAPGGLLGRDLLTKLKAQIQFSTEGPQVTWEDRPAMCLVLNLEEEYRLHEKPVPPSIDPSWLQLFPMVWAEKAGMGLANQVPPVVVELKSDASPVAVRQYPMSKEAREGIRPHIQRFLDLGILVPCQSPWNTPLLPVKKPGTNDYRPVQDLREVNKRVQDIHPTVPNPYNLLSSLPPSHTWYSVLDLKDAFFCLKLHPNSQPLFAFEWRDPEKGNTGQLTWTRLPQGFKNSPTLFNEALHRDLASFRALNPQVVMLQYVDDLLVAAPTYRDCKEGTRRLLQELSKLGYRVSAKKAQLCREEVTYLGYLLKGGKRWLTPARKATVMKIPTPTTPRQVREFLGKAGFCRLFIPGFASLAAPLYPLTRPKVPFTWTEAHQEAFGRIKEALLSAPALALPDLTKPFALYVDEKEGVARGVLTQTLGPWRRPVAYLSKKLDPVASGWPTCLKAIAAVALLLKDADKLTLGQNVLVIAPHNLESIVRQPPDRWMTNARMTHYQSLLLNERVSFAPPAILNPATLLPVESDDTPIHICSEILAEETGTRPDLRDQPLPGVPAWYTDGSSFIMDGRRQAGAAIVDNKRTVWASNLPEGTSAQKAELIALTQALRLAEGKSINIYTDSRYAFATAHVHGAIYKQRGWLTSAGKDIKNKEEILALLEAIHLPKRVAIIHCPGHQRGTDPVATGNRKADEAAKQAAQSTRILTETTKNAGKRTADGSEFEKRTADGSEFESPKKKAKVE

SEQ ID NO: 1736 - protein, 2127 aa, synthetic construct
MPAAKRVKLDGGDKKYSIGLDIGTNSVGWAVITDEYKVPSKKFKVLGNTDRHSIKKNLIGALLFDSGETAEATRLKRTARRRYTRRKNRICYLQEIFSNEMAKVDDSFFHRLEESFLVEEDKKHERHPIFGNIVDEVAYHEKYPTIYHLRKKLVDSTDKADLRLIYLALAHMIKFRGHFLIEGDLNPDNSDVDKLFIQLVQTYNQLFEENPINASGVDAKAILSARLSKSRRLENLIAQLPGEKKNGLFGNLIALSLGLTPNFKSNFDLAEDAKLQLSKDTYDDDLDNLLAQIGDQYADLFLAAKNLSDAILLSDILRVNTEITKAPLSASMIKRYDEHHQDLTLLKALVRQQLPEKYKEIFFDQSKNGYAGYIDGGASQEEFYKFIKPILEKMDGTEELLVKLNREDLLRKQRTFDNGSIPHQIHLGELHAILRRQEDFYPFLKDNREKIEKILTFRIPYYVGPLARGNSRFAWMTRKSEETITPWNFEEVVDKGASAQSFIERMTNFDKNLPNEKVLPKHSLLYEYFTVYNELTKVKYVTEGMRKPAFLSGEQKKAIVDLLFKTNRKVTVKQLKEDYFKKIECFDSVEISGVEDRFNASLGTYHDLLKIIKDKDFLDNEENEDILEDIVLTLTLFEDREMIEERLKTYAHLFDDKVMKQLKRRRYTGWGRLSRKLINGIRDKQSGKTILDFLKSDGFANRNFMQLIHDDSLTFKEDIQKAQVSGQGDSLHEHIANLAGSPAIKKGILQTVKVVDELVKVMGRHKPENIVIEMARENQTTQKGQKNSRERMKRIEEGIKELGSQILKEHPVENTQLQNEKLYLYYLQNGRDMYVDQELDINRLSDYDVDHIVPQSFLKDDSIDNKVLTRSDKARGKSDNVPSEEVVKKMKNYWRQLLNAKLITQRKFDNLTKAERGGLSELDKAGFIKRQLVETRQITKHVAQILDSRMNTKYDENDKLIREVKVITLKSKLVSDFRKDFQFYKVREINNYHHAHDAYLNAVVGTALIKKYPKLESEFVYGDYKVYDVRKMIAKSEQEIGKATAKYFFYSNIMNFFKTEITLANGEIRKRPLIETNGETGEIVWDKGRDFATVRKVLSMPQVNIVKKTEVQTGGFSKESILPKRNSDKLIARKKDWDPKKYGGFDSPTVAYSVLVVAKVEKGKSKKLKSVKELLGITIMERSSFEKNPIDFLEAKGYKEVKKDLIIKLPKYSLFELENGRKRMLASAGELQKGNELALPSKYVNFLYLASHYEKLKGSPEDNEQKQLFVEQHKHYLDEIIEQISEFSKRVILADANLDKVLSAYNKHRDKPIREQAENIIHLFTLTNLGAPAAFKYFDTTIDRKRYTSTKEVLDATLIHQSITGLYETRIDLSQLGGDGGEAAAKGGGGGSGGLLGRDLLTKLKAQIQFSTEGPQVTWEDRPAMCLVLNLEEEYRLHEKPVPPSIDPSWLQLFPMVWAEKAGMGLANQVPPVVVELKSDASPVAVRQYPMSKEAREGIRPHIQRFLDLGILVPCQSPWNTPLLPVKKPGTNDYRPVQDLREVNKRVQDIHPTVPNPYNLLSSLPPSHTWYSVLDLKDAFFCLKLHPNSQPLFAFEWRDPEKGNTGQLTWTRLPQGFKNSPTLFNEALHRDLASFRALNPQVVMLQYVDDLLVAAPTYRDCKEGTRRLLQELSKLGYRVSAKKAQLCREEVTYLGYLLKGGKRWLTPARKATVMKIPTPTTPRQVREFLGKAGFCRLFIPGFASLAAPLYPLTRPKVPFTWTEAHQEAFGRIKEALLSAPALALPDLTKPFALYVDEKEGVARGVLTQTLGPWRRPVAYLSKKLDPVASGWPTCLKAIAAVALLLKDADKLTLGQNVLVIAPHNLESIVRQPPDRWMTNARMTHYQSLLLNERVSFAPPAILNPATLLPVESDDTPIHICSEILAEETGTRPDLRDQPLPGVPAWYTDGSSFIMDGRRQAGAAIVDNKRTVWASNLPEGTSAQKAELIALTQALRLAEGKSINIYTDSRYAFATAHVHGAIYKQRGWLTSAGKDIKNKEEILALLEAIHLPKRVAIIHCPGHQRGTDPVATGNRKADEAAKQAAQSTRILTETTKNAGKRTADGSEFEKRTADGSEFESPKKKAKVE

SEQ ID NO: 1737 - protein, 2127 aa, synthetic construct
MPAAKRVKLDGGDKKYSIGLDIGTNSVGWAVITDEYKVPSKKFKVLGNTDRHSIKKNLIGALLFDSGETAEATRLKRTARRRYTRRKNRICYLQEIFSNEMAKVDDSFFHRLEESFLVEEDKKHERHPIFGNIVDEVAYHEKYPTIYHLRKKLVDSTDKADLRLIYLALAHMIKFRGHFLIEGDLNPDNSDVDKLFIQLVQTYNQLFEENPINASGVDAKAILSARLSKSRRLENLIAQLPGEKKNGLFGNLIALSLGLTPNFKSNFDLAEDAKLQLSKDTYDDDLDNLLAQIGDQYADLFLAAKNLSDAILLSDILRVNTEITKAPLSASMIKRYDEHHQDLTLLKALVRQQLPEKYKEIFFDQSKNGYAGYIDGGASQEEFYKFIKPILEKMDGTEELLVKLNREDLLRKQRTFDNGSIPHQIHLGELHAILRRQEDFYPFLKDNREKIEKILTFRIPYYVGPLARGNSRFAWMTRKSEETITPWNFEEVVDKGASAQSFIERMTNFDKNLPNEKVLPKHSLLYEYFTVYNELTKVKYVTEGMRKPAFLSGEQKKAIVDLLFKTNRKVTVKQLKEDYFKKIECFDSVEISGVEDRFNASLGTYHDLLKIIKDKDFLDNEENEDILEDIVLTLTLFEDREMIEERLKTYAHLFDDKVMKQLKRRRYTGWGRLSRKLINGIRDKQSGKTILDFLKSDGFANRNFMQLIHDDSLTFKEDIQKAQVSGQGDSLHEHIANLAGSPAIKKGILQTVKVVDELVKVMGRHKPENIVIEMARENQTTQKGQKNSRERMKRIEEGIKELGSQILKEHPVENTQLQNEKLYLYYLQNGRDMYVDQELDINRLSDYDVDHIVPQSFLKDDSIDNKVLTRSDKARGKSDNVPSEEVVKKMKNYWRQLLNAKLITQRKFDNLTKAERGGLSELDKAGFIKRQLVETRQITKHVAQILDSRMNTKYDENDKLIREVKVITLKSKLVSDFRKDFQFYKVREINNYHHAHDAYLNAVVGTALIKKYPKLESEFVYGDYKVYDVRKMIAKSEQEIGKATAKYFFYSNIMNFFKTEITLANGEIRKRPLIETNGETGEIVWDKGRDFATVRKVLSMPQVNIVKKTEVQTGGFSKESILPKRNSDKLIARKKDWDPKKYGGFDSPTVAYSVLVVAKVEKGKSKKLKSVKELLGITIMERSSFEKNPIDFLEAKGYKEVKKDLIIKLPKYSLFELENGRKRMLASAGELQKGNELALPSKYVNFLYLASHYEKLKGSPEDNEQKQLFVEQHKHYLDEIIEQISEFSKRVILADANLDKVLSAYNKHRDKPIREQAENIIHLFTLTNLGAPAAFKYFDTTIDRKRYTSTKEVLDATLIHQSITGLYETRIDLSQLGGDGGGSSEAAAKGGGGGLLGRDLLTKLKAQIQFSTEGPQVTWEDRPAMCLVLNLEEEYRLHEKPVPPSIDPSWLQLFPMVWAEKAGMGLANQVPPVVVELKSDASPVAVRQYPMSKEAREGIRPHIQRFLDLGILVPCQSPWNTPLLPVKKPGTNDYRPVQDLREVNKRVQDIHPTVPNPYNLLSSLPPSHTWYSVLDLKDAFFCLKLHPNSQPLFAFEWRDPEKGNTGQLTWTRLPQGFKNSPTLFNEALHRDLASFRALNPQVVMLQYVDDLLVAAPTYRDCKEGTRRLLQELSKLGYRVSAKKAQLCREEVTYLGYLLKGGKRWLTPARKATVMKIPTPTTPRQVREFLGKAGFCRLFIPGFASLAAPLYPLTRPKVPFTWTEAHQEAFGRIKEALLSAPALALPDLTKPFALYVDEKEGVARGVLTQTLGPWRRPVAYLSKKLDPVASGWPTCLKAIAAVALLLKDADKLTLGQNVLVIAPHNLESIVRQPPDRWMTNARMTHYQSLLLNERVSFAPPAILNPATLLPVESDDTPIHICSEILAEETGTRPDLRDQPLPGVPAWYTDGSSFIMDGRRQAGAAIVDNKRTVWASNLPEGTSAQKAELIALTQALRLAEGKSINIYTDSRYAFATAHVHGAIYKQRGWLTSAGKDIKNKEEILALLEAIHLPKRVAIIHCPGHQRGTDPVATGNRKADEAAKQAAQSTRILTETTKNAGKRTADGSEFEKRTADGSEFESPKKKAKVE

SEQ ID NO: 1738 - protein, 2125 aa, synthetic construct
MPAAKRVKLDGGDKKYSIGLDIGTNSVGWAVITDEYKVPSKKFKVLGNTDRHSIKKNLIGALLFDSGETAEATRLKRTARRRYTRRKNRICYLQEIFSNEMAKVDDSFFHRLEESFLVEEDKKHERHPIFGNIVDEVAYHEKYPTIYHLRKKLVDSTDKADLRLIYLALAHMIKFRGHFLIEGDLNPDNSDVDKLFIQLVQTYNQLFEENPINASGVDAKAILSARLSKSRRLENLIAQLPGEKKNGLFGNLIALSLGLTPNFKSNFDLAEDAKLQLSKDTYDDDLDNLLAQIGDQYADLFLAAKNLSDAILLSDILRVNTEITKAPLSASMIKRYDEHHQDLTLLKALVRQQLPEKYKEIFFDQSKNGYAGYIDGGASQEEFYKFIKPILEKMDGTEELLVKLNREDLLRKQRTFDNGSIPHQIHLGELHAILRRQEDFYPFLKDNREKIEKILTFRIPYYVGPLARGNSRFAWMTRKSEETITPWNFEEVVDKGASAQSFIERMTNFDKNLPNEKVLPKHSLLYEYFTVYNELTKVKYVTEGMRKPAFLSGEQKKAIVDLLFKTNRKVTVKQLKEDYFKKIECFDSVEISGVEDRFNASLGTYHDLLKIIKDKDFLDNEENEDILEDIVLTLTLFEDREMIEERLKTYAHLFDDKVMKQLKRRRYTGWGRLSRKLINGIRDKQSGKTILDFLKSDGFANRNFMQLIHDDSLTFKEDIQKAQVSGQGDSLHEHIANLAGSPAIKKGILQTVKVVDELVKVMGRHKPENIVIEMARENQTTQKGQKNSRERMKRIEEGIKELGSQILKEHPVENTQLQNEKLYLYYLQNGRDMYVDQELDINRLSDYDVDHIVPQSFLKDDSIDNKVLTRSDKARGKSDNVPSEEVVKKMKNYWRQLLNAKLITQRKFDNLTKAERGGLSELDKAGFIKRQLVETRQITKHVAQILDSRMNTKYDENDKLIREVKVITLKSKLVSDFRKDFQFYKVREINNYHHAHDAYLNAVVGTALIKKYPKLESEFVYGDYKVYDVRKMIAKSEQEIGKATAKYFFYSNIMNFFKTEITLANGEIRKRPLIETNGETGEIVWDKGRDFATVRKVLSMPQVNIVKKTEVQTGGFSKESILPKRNSDKLIARKKDWDPKKYGGFDSPTVAYSVLVVAKVEKGKSKKLKSVKELLGITIMERSSFEKNPIDFLEAKGYKEVKKDLIIKLPKYSLFELENGRKRMLASAGELQKGNELALPSKYVNFLYLASHYEKLKGSPEDNEQKQLFVEQHKHYLDEIIEQISEFSKRVILADANLDKVLSAYNKHRDKPIREQAENIIHLFTLTNLGAPAAFKYFDTTIDRKRYTSTKEVLDATLIHQSITGLYETRIDLSQLGGDGGGSSPAPGGSGGLLGRDLLTKLKAQIQFSTEGPQVTWEDRPAMCLVLNLEEEYRLHEKPVPPSIDPSWLQLFPMVWAEKAGMGLANQVPPVVVELKSDASPVAVRQYPMSKEAREGIRPHIQRFLDLGILVPCQSPWNTPLLPVKKPGTNDYRPVQDLREVNKRVQDIHPTVPNPYNLLSSLPPSHTWYSVLDLKDAFFCLKLHPNSQPLFAFEWRDPEKGNTGQLTWTRLPQGFKNSPTLFNEALHRDLASFRALNPQVVMLQYVDDLLVAAPTYRDCKEGTRRLLQELSKLGYRVSAKKAQLCREEVTYLGYLLKGGKRWLTPARKATVMKIPTPTTPRQVREFLGKAGFCRLFIPGFASLAAPLYPLTRPKVPFTWTEAHQEAFGRIKEALLSAPALALPDLTKPFALYVDEKEGVARGVLTQTLGPWRRPVAYLSKKLDPVASGWPTCLKAIAAVALLLKDADKLTLGQNVLVIAPHNLESIVRQPPDRWMTNARMTHYQSLLLNERVSFAPPAILNPATLLPVESDDTPIHICSEILAEETGTRPDLRDQPLPGVPAWYTDGSSFIMDGRRQAGAAIVDNKRTVWASNLPEGTSAQKAELIALTQALRLAEGKSINIYTDSRYAFATAHVHGAIYKQRGWLTSAGKDIKNKEEILALLEAIHLPKRVAIIHCPGHQRGTDPVATGNRKADEAAKQAAQSTRILTETTKNAGKRTADGSEFEKRTADGSEFESPKKKAKVE

SEQ ID NO: 1739 - protein, 2131 aa, synthetic construct
MPAAKRVKLDGGDKKYSIGLDIGTNSVGWAVITDEYKVPSKKFKVLGNTDRHSIKKNLIGALLFDSGETAEATRLKRTARRRYTRRKNRICYLQEIFSNEMAKVDDSFFHRLEESFLVEEDKKHERHPIFGNIVDEVAYHEKYPTIYHLRKKLVDSTDKADLRLIYLALAHMIKFRGHFLIEGDLNPDNSDVDKLFIQLVQTYNQLFEENPINASGVDAKAILSARLSKSRRLENLIAQLPGEKKNGLFGNLIALSLGLTPNFKSNFDLAEDAKLQLSKDTYDDDLDNLLAQIGDQYADLFLAAKNLSDAILLSDILRVNTEITKAPLSASMIKRYDEHHQDLTLLKALVRQQLPEKYKEIFFDQSKNGYAGYIDGGASQEEFYKFIKPILEKMDGTEELLVKLNREDLLRKQRTFDNGSIPHQIHLGELHAILRRQEDFYPFLKDNREKIEKILTFRIPYYVGPLARGNSRFAWMTRKSEETITPWNFEEVVDKGASAQSFIERMTNFDKNLPNEKVLPKHSLLYEYFTVYNELTKVKYVTEGMRKPAFLSGEQKKAIVDLLFKTNRKVTVKQLKEDYFKKIECFDSVEISGVEDRFNASLGTYHDLLKIIKDKDFLDNEENEDILEDIVLTLTLFEDREMIEERLKTYAHLFDDKVMKQLKRRRYTGWGRLSRKLINGIRDKQSGKTILDFLKSDGFANRNFMQLIHDDSLTFKEDIQKAQVSGQGDSLHEHIANLAGSPAIKKGILQTVKVVDELVKVMGRHKPENIVIEMARENQTTQKGQKNSRERMKRIEEGIKELGSQILKEHPVENTQLQNEKLYLYYLQNGRDMYVDQELDINRLSDYDVDHIVPQSFLKDDSIDNKVLTRSDKARGKSDNVPSEEVVKKMKNYWRQLLNAKLITQRKFDNLTKAERGGLSELDKAGFIKRQLVETRQITKHVAQILDSRMNTKYDENDKLIREVKVITLKSKLVSDFRKDFQFYKVREINNYHHAHDAYLNAVVGTALIKKYPKLESEFVYGDYKVYDVRKMIAKSEQEIGKATAKYFFYSNIMNFFKTEITLANGEIRKRPLIETNGETGEIVWDKGRDFATVRKVLSMPQVNIVKKTEVQTGGFSKESILPKRNSDKLIARKKDWDPKKYGGFDSPTVAYSVLVVAKVEKGKSKKLKSVKELLGITIMERSSFEKNPIDFLEAKGYKEVKKDLIIKLPKYSLFELENGRKRMLASAGELQKGNELALPSKYVNFLYLASHYEKLKGSPEDNEQKQLFVEQHKHYLDEIIEQISEFSKRVILADANLDKVLSAYNKHRDKPIREQAENIIHLFTLTNLGAPAAFKYFDTTIDRKRYTSTKEVLDATLIHQSITGLYETRIDLSQLGGDGGGGGGSEAAAKGGGGSGGLLGRDLLTKLKAQIQFSTEGPQVTWEDRPAMCLVLNLEEEYRLHEKPVPPSIDPSWLQLFPMVWAEKAGMGLANQVPPVVVELKSDASPVAVRQYPMSKEAREGIRPHIQRFLDLGILVPCQSPWNTPLLPVKKPGTNDYRPVQDLREVNKRVQDIHPTVPNPYNLLSSLPPSHTWYSVLDLKDAFFCLKLHPNSQPLFAFEWRDPEKGNTGQLTWTRLPQGFKNSPTLFNEALHRDLASFRALNPQVVMLQYVDDLLVAAPTYRDCKEGTRRLLQELSKLGYRVSAKKAQLCREEVTYLGYLLKGGKRWLTPARKATVMKIPTPTTPRQVREFLGKAGFCRLFIPGFASLAAPLYPLTRPKVPFTWTEAHQEAFGRIKEALLSAPALALPDLTKPFALYVDEKEGVARGVLTQTLGPWRRPVAYLSKKLDPVASGWPTCLKAIAAVALLLKDADKLTLGQNVLVIAPHNLESIVRQPPDRWMTNARMTHYQSLLLNERVSFAPPAILNPATLLPVESDDTPIHICSEILAEETGTRPDLRDQPLPGVPAWYTDGSSFIMDGRRQAGAAIVDNKRTVWASNLPEGTSAQKAELIALTQALRLAEGKSINIYTDSRYAFATAHVHGAIYKQRGWLTSAGKDIKNKEEILALLEAIHLPKRVAIIHCPGHQRGTDPVATGNRKADEAAKQAAQSTRILTETTKNAGKRTADGSEFEKRTADGSEFESPKKKAKVE

SEQ ID NO: 1740 - protein, 2125 aa, synthetic construct
MPAAKRVKLDGGDKKYSIGLDIGTNSVGWAVITDEYKVPSKKFKVLGNTDRHSIKKNLIGALLFDSGETAEATRLKRTARRRYTRRKNRICYLQEIFSNEMAKVDDSFFHRLEESFLVEEDKKHERHPIFGNIVDEVAYHEKYPTIYHLRKKLVDSTDKADLRLIYLALAHMIKFRGHFLIEGDLNPDNSDVDKLFIQLVQTYNQLFEENPINASGVDAKAILSARLSKSRRLENLIAQLPGEKKNGLFGNLIALSLGLTPNFKSNFDLAEDAKLQLSKDTYDDDLDNLLAQIGDQYADLFLAAKNLSDAILLSDILRVNTEITKAPLSASMIKRYDEHHQDLTLLKALVRQQLPEKYKEIFFDQSKNGYAGYIDGGASQEEFYKFIKPILEKMDGTEELLVKLNREDLLRKQRTFDNGSIPHQIHLGELHAILRRQEDFYPFLKDNREKIEKILTFRIPYYVGPLARGNSRFAWMTRKSEETITPWNFEEVVDKGASAQSFIERMTNFDKNLPNEKVLPKHSLLYEYFTVYNELTKVKYVTEGMRKPAFLSGEQKKAIVDLLFKTNRKVTVKQLKEDYFKKIECFDSVEISGVEDRFNASLGTYHDLLKIIKDKDFLDNEENEDILEDIVLTLTLFEDREMIEERLKTYAHLFDDKVMKQLKRRRYTGWGRLSRKLINGIRDKQSGKTILDFLKSDGFANRNFMQLIHDDSLTFKEDIQKAQVSGQGDSLHEHIANLAGSPAIKKGILQTVKVVDELVKVMGRHKPENIVIEMARENQTTQKGQKNSRERMKRIEEGIKELGSQILKEHPVENTQLQNEKLYLYYLQNGRDMYVDQELDINRLSDYDVDHIVPQSFLKDDSIDNKVLTRSDKARGKSDNVPSEEVVKKMKNYWRQLLNAKLITQRKFDNLTKAERGGLSELDKAGFIKRQLVETRQITKHVAQILDSRMNTKYDENDKLIREVKVITLKSKLVSDFRKDFQFYKVREINNYHHAHDAYLNAVVGTALIKKYPKLESEFVYGDYKVYDVRKMIAKSEQEIGKATAKYFFYSNIMNFFKTEITLANGEIRKRPLIETNGETGEIVWDKGRDFATVRKVLSMPQVNIVKKTEVQTGGFSKESILPKRNSDKLIARKKDWDPKKYGGFDSPTVAYSVLVVAKVEKGKSKKLKSVKELLGITIMERSSFEKNPIDFLEAKGYKEVKKDLIIKLPKYSLFELENGRKRMLASAGELQKGNELALPSKYVNFLYLASHYEKLKGSPEDNEQKQLFVEQHKHYLDEIIEQISEFSKRVILADANLDKVLSAYNKHRDKPIREQAENIIHLFTLTNLGAPAAFKYFDTTIDRKRYTSTKEVLDATLIHQSITGLYETRIDLSQLGGDGGPAPGGSGGGGGLLGRDLLTKLKAQIQFSTEGPQVTWEDRPAMCLVLNLEEEYRLHEKPVPPSIDPSWLQLFPMVWAEKAGMGLANQVPPVVVELKSDASPVAVRQYPMSKEAREGIRPHIQRFLDLGILVPCQSPWNTPLLPVKKPGTNDYRPVQDLREVNKRVQDIHPTVPNPYNLLSSLPPSHTWYSVLDLKDAFFCLKLHPNSQPLFAFEWRDPEKGNTGQLTWTRLPQGFKNSPTLFNEALHRDLASFRALNPQVVMLQYVDDLLVAAPTYRDCKEGTRRLLQELSKLGYRVSAKKAQLCREEVTYLGYLLKGGKRWLTPARKATVMKIPTPTTPRQVREFLGKAGFCRLFIPGFASLAAPLYPLTRPKVPFTWTEAHQEAFGRIKEALLSAPALALPDLTKPFALYVDEKEGVARGVLTQTLGPWRRPVAYLSKKLDPVASGWPTCLKAIAAVALLLKDADKLTLGQNVLVIAPHNLESIVRQPPDRWMTNARMTHYQSLLLNERVSFAPPAILNPATLLPVESDDTPIHICSEILAEETGTRPDLRDQPLPGVPAWYTDGSSFIMDGRRQAGAAIVDNKRTVWASNLPEGTSAQKAELIALTQALRLAEGKSINIYTDSRYAFATAHVHGAIYKQRGWLTSAGKDIKNKEEILALLEAIHLPKRVAIIHCPGHQRGTDPVATGNRKADEAAKQAAQSTRILTETTKNAGKRTADGSEFEKRTADGSEFESPKKKAKVE

SEQ ID NO: 1741 - protein, 2127 aa, synthetic construct
MPAAKRVKLDGGDKKYSIGLDIGTNSVGWAVITDEYKVPSKKFKVLGNTDRHSIKKNLIGALLFDSGETAEATRLKRTARRRYTRRKNRICYLQEIFSNEMAKVDDSFFHRLEESFLVEEDKKHERHPIFGNIVDEVAYHEKYPTIYHLRKKLVDSTDKADLRLIYLALAHMIKFRGHFLIEGDLNPDNSDVDKLFIQLVQTYNQLFEENPINASGVDAKAILSARLSKSRRLENLIAQLPGEKKNGLFGNLIALSLGLTPNFKSNFDLAEDAKLQLSKDTYDDDLDNLLAQIGDQYADLFLAAKNLSDAILLSDILRVNTEITKAPLSASMIKRYDEHHQDLTLLKALVRQQLPEKYKEIFFDQSKNGYAGYIDGGASQEEFYKFIKPILEKMDGTEELLVKLNREDLLRKQRTFDNGSIPHQIHLGELHAILRRQEDFYPFLKDNREKIEKILTFRIPYYVGPLARGNSRFAWMTRKSEETITPWNFEEVVDKGASAQSFIERMTNFDKNLPNEKVLPKHSLLYEYFTVYNELTKVKYVTEGMRKPAFLSGEQKKAIVDLLFKTNRKVTVKQLKEDYFKKIECFDSVEISGVEDRFNASLGTYHDLLKIIKDKDFLDNEENEDILEDIVLTLTLFEDREMIEERLKTYAHLFDDKVMKQLKRRRYTGWGRLSRKLINGIRDKQSGKTILDFLKSDGFANRNFMQLIHDDSLTFKEDIQKAQVSGQGDSLHEHIANLAGSPAIKKGILQTVKVVDELVKVMGRHKPENIVIEMARENQTTQKGQKNSRERMKRIEEGIKELGSQILKEHPVENTQLQNEKLYLYYLQNGRDMYVDQELDINRLSDYDVDHIVPQSFLKDDSIDNKVLTRSDKARGKSDNVPSEEVVKKMKNYWRQLLNAKLITQRKFDNLTKAERGGLSELDKAGFIKRQLVETRQITKHVAQILDSRMNTKYDENDKLIREVKVITLKSKLVSDFRKDFQFYKVREINNYHHAHDAYLNAVVGTALIKKYPKLESEFVYGDYKVYDVRKMIAKSEQEIGKATAKYFFYSNIMNFFKTEITLANGEIRKRPLIETNGETGEIVWDKGRDFATVRKVLSMPQVNIVKKTEVQTGGFSKESILPKRNSDKLIARKKDWDPKKYGGFDSPTVAYSVLVVAKVEKGKSKKLKSVKELLGITIMERSSFEKNPIDFLEAKGYKEVKKDLIIKLPKYSLFELENGRKRMLASAGELQKGNELALPSKYVNFLYLASHYEKLKGSPEDNEQKQLFVEQHKHYLDEIIEQISEFSKRVILADANLDKVLSAYNKHRDKPIREQAENIIHLFTLTNLGAPAAFKYFDTTIDRKRYTSTKEVLDATLIHQSITGLYETRIDLSQLGGDGGGGSGGGEAAAKGGLLGRDLLTKLKAQIQFSTEGPQVTWEDRPAMCLVLNLEEEYRLHEKPVPPSIDPSWLQLFPMVWAEKAGMGLANQVPPVVVELKSDASPVAVRQYPMSKEAREGIRPHIQRFLDLGILVPCQSPWNTPLLPVKKPGTNDYRPVQDLREVNKRVQDIHPTVPNPYNLLSSLPPSHTWYSVLDLKDAFFCLKLHPNSQPLFAFEWRDPEKGNTGQLTWTRLPQGFKNSPTLFNEALHRDLASFRALNPQVVMLQYVDDLLVAAPTYRDCKEGTRRLLQELSKLGYRVSAKKAQLCREEVTYLGYLLKGGKRWLTPARKATVMKIPTPTTPRQVREFLGKAGFCRLFIPGFASLAAPLYPLTRPKVPFTWTEAHQEAFGRIKEALLSAPALALPDLTKPFALYVDEKEGVARGVLTQTLGPWRRPVAYLSKKLDPVASGWPTCLKAIAAVALLLKDADKLTLGQNVLVIAPHNLESIVRQPPDRWMTNARMTHYQSLLLNERVSFAPPAILNPATLLPVESDDTPIHICSEILAEETGTRPDLRDQPLPGVPAWYTDGSSFIMDGRRQAGAAIVDNKRTVWASNLPEGTSAQKAELIALTQALRLAEGKSINIYTDSRYAFATAHVHGAIYKQRGWLTSAGKDIKNKEEILALLEAIHLPKRVAIIHCPGHQRGTDPVATGNRKADEAAKQAAQSTRILTETTKNAGKRTADGSEFEKRTADGSEFESPKKKAKVE

SEQ ID NO: 1742 - protein, 2122 aa, synthetic construct
MPAAKRVKLDGGDKKYSIGLDIGTNSVGWAVITDEYKVPSKKFKVLGNTDRHSIKKNLIGALLFDSGETAEATRLKRTARRRYTRRKNRICYLQEIFSNEMAKVDDSFFHRLEESFLVEEDKKHERHPIFGNIVDEVAYHEKYPTIYHLRKKLVDSTDKADLRLIYLALAHMIKFRGHFLIEGDLNPDNSDVDKLFIQLVQTYNQLFEENPINASGVDAKAILSARLSKSRRLENLIAQLPGEKKNGLFGNLIALSLGLTPNFKSNFDLAEDAKLQLSKDTYDDDLDNLLAQIGDQYADLFLAAKNLSDAILLSDILRVNTEITKAPLSASMIKRYDEHHQDLTLLKALVRQQLPEKYKEIFFDQSKNGYAGYIDGGASQEEFYKFIKPILEKMDGTEELLVKLNREDLLRKQRTFDNGSIPHQIHLGELHAILRRQEDFYPFLKDNREKIEKILTFRIPYYVGPLARGNSRFAWMTRKSEETITPWNFEEVVDKGASAQSFIERMTNFDKNLPNEKVLPKHSLLYEYFTVYNELTKVKYVTEGMRKPAFLSGEQKKAIVDLLFKTNRKVTVKQLKEDYFKKIECFDSVEISGVEDRFNASLGTYHDLLKIIKDKDFLDNEENEDILEDIVLTLTLFEDREMIEERLKTYAHLFDDKVMKQLKRRRYTGWGRLSRKLINGIRDKQSGKTILDFLKSDGFANRNFMQLIHDDSLTFKEDIQKAQVSGQGDSLHEHIANLAGSPAIKKGILQTVKVVDELVKVMGRHKPENIVIEMARENQTTQKGQKNSRERMKRIEEGIKELGSQILKEHPVENTQLQNEKLYLYYLQNGRDMYVDQELDINRLSDYDVDHIVPQSFLKDDSIDNKVLTRSDKARGKSDNVPSEEVVKKMKNYWRQLLNAKLITQRKFDNLTKAERGGLSELDKAGFIKRQLVETRQITKHVAQILDSRMNTKYDENDKLIREVKVITLKSKLVSDFRKDFQFYKVREINNYHHAHDAYLNAVVGTALIKKYPKLESEFVYGDYKVYDVRKMIAKSEQEIGKATAKYFFYSNIMNFFKTEITLANGEIRKRPLIETNGETGEIVWDKGRDFATVRKVLSMPQVNIVKKTEVQTGGFSKESILPKRNSDKLIARKKDWDPKKYGGFDSPTVAYSVLVVAKVEKGKSKKLKSVKELLGITIMERSSFEKNPIDFLEAKGYKEVKKDLIIKLPKYSLFELENGRKRMLASAGELQKGNELALPSKYVNFLYLASHYEKLKGSPEDNEQKQLFVEQHKHYLDEIIEQISEFSKRVILADANLDKVLSAYNKHRDKPIREQAENIIHLFTLTNLGAPAAFKYFDTTIDRKRYTSTKEVLDATLIHQSITGLYETRIDLSQLGGDGGGSSGGSGGLLGRDLLTKLKAQIQFSTEGPQVTWEDRPAMCLVLNLEEEYRLHEKPVPPSIDPSWLQLFPMVWAEKAGMGLANQVPPVVVELKSDASPVAVRQYPMSKEAREGIRPHIQRFLDLGILVPCQSPWNTPLLPVKKPGTNDYRPVQDLREVNKRVQDIHPTVPNPYNLLSSLPPSHTWYSVLDLKDAFFCLKLHPNSQPLFAFEWRDPEKGNTGQLTWTRLPQGFKNSPTLFNEALHRDLASFRALNPQVVMLQYVDDLLVAAPTYRDCKEGTRRLLQELSKLGYRVSAKKAQLCREEVTYLGYLLKGGKRWLTPARKATVMKIPTPTTPRQVREFLGKAGFCRLFIPGFASLAAPLYPLTRPKVPFTWTEAHQEAFGRIKEALLSAPALALPDLTKPFALYVDEKEGVARGVLTQTLGPWRRPVAYLSKKLDPVASGWPTCLKAIAAVALLLKDADKLTLGQNVLVIAPHNLESIVRQPPDRWMTNARMTHYQSLLLNERVSFAPPAILNPATLLPVESDDTPIHICSEILAEETGTRPDLRDQPLPGVPAWYTDGSSFIMDGRRQAGAAIVDNKRTVWASNLPEGTSAQKAELIALTQALRLAEGKSINIYTDSRYAFATAHVHGAIYKQRGWLTSAGKDIKNKEEILALLEAIHLPKRVAIIHCPGHQRGTDPVATGNRKADEAAKQAAQSTRILTETTKNAGKRTADGSEFEKRTADGSEFESPKKKAKVE

SEQ ID NO: 1743 - protein, 2124 aa, synthetic construct
MPAAKRVKLDGGDKKYSIGLDIGTNSVGWAVITDEYKVPSKKFKVLGNTDRHSIKKNLIGALLFDSGETAEATRLKRTARRRYTRRKNRICYLQEIFSNEMAKVDDSFFHRLEESFLVEEDKKHERHPIFGNIVDEVAYHEKYPTIYHLRKKLVDSTDKADLRLIYLALAHMIKFRGHFLIEGDLNPDNSDVDKLFIQLVQTYNQLFEENPINASGVDAKAILSARLSKSRRLENLIAQLPGEKKNGLFGNLIALSLGLTPNFKSNFDLAEDAKLQLSKDTYDDDLDNLLAQIGDQYADLFLAAKNLSDAILLSDILRVNTEITKAPLSASMIKRYDEHHQDLTLLKALVRQQLPEKYKEIFFDQSKNGYAGYIDGGASQEEFYKFIKPILEKMDGTEELLVKLNREDLLRKQRTFDNGSIPHQIHLGELHAILRRQEDFYPFLKDNREKIEKILTFRIPYYVGPLARGNSRFAWMTRKSEETITPWNFEEVVDKGASAQSFIERMTNFDKNLPNEKVLPKHSLLYEYFTVYNELTKVKYVTEGMRKPAFLSGEQKKAIVDLLFKTNRKVTVKQLKEDYFKKIECFDSVEISGVEDRFNASLGTYHDLLKIIKDKDFLDNEENEDILEDIVLTLTLFEDREMIEERLKTYAHLFDDKVMKQLKRRRYTGWGRLSRKLINGIRDKQSGKTILDFLKSDGFANRNFMQLIHDDSLTFKEDIQKAQVSGQGDSLHEHIANLAGSPAIKKGILQTVKVVDELVKVMGRHKPENIVIEMARENQTTQKGQKNSRERMKRIEEGIKELGSQILKEHPVENTQLQNEKLYLYYLQNGRDMYVDQELDINRLSDYDVDHIVPQSFLKDDSIDNKVLTRSDKARGKSDNVPSEEVVKKMKNYWRQLLNAKLITQRKFDNLTKAERGGLSELDKAGFIKRQLVETRQITKHVAQILDSRMNTKYDENDKLIREVKVITLKSKLVSDFRKDFQFYKVREINNYHHAHDAYLNAVVGTALIKKYPKLESEFVYGDYKVYDVRKMIAKSEQEIGKATAKYFFYSNIMNFFKTEITLANGEIRKRPLIETNGETGEIVWDKGRDFATVRKVLSMPQVNIVKKTEVQTGGFSKESILPKRNSDKLIARKKDWDPKKYGGFDSPTVAYSVLVVAKVEKGKSKKLKSVKELLGITIMERSSFEKNPIDFLEAKGYKEVKKDLIIKLPKYSLFELENGRKRMLASAGELQKGNELALPSKYVNFLYLASHYEKLKGSPEDNEQKQLFVEQHKHYLDEIIEQISEFSKRVILADANLDKVLSAYNKHRDKPIREQAENIIHLFTLTNLGAPAAFKYFDTTIDRKRYTSTKEVLDATLIHQSITGLYETRIDLSQLGGDGGGGSEAAAKGGLLGRDLLTKLKAQIQFSTEGPQVTWEDRPAMCLVLNLEEEYRLHEKPVPPSIDPSWLQLFPMVWAEKAGMGLANQVPPVVVELKSDASPVAVRQYPMSKEAREGIRPHIQRFLDLGILVPCQSPWNTPLLPVKKPGTNDYRPVQDLREVNKRVQDIHPTVPNPYNLLSSLPPSHTWYSVLDLKDAFFCLKLHPNSQPLFAFEWRDPEKGNTGQLTWTRLPQGFKNSPTLFNEALHRDLASFRALNPQVVMLQYVDDLLVAAPTYRDCKEGTRRLLQELSKLGYRVSAKKAQLCREEVTYLGYLLKGGKRWLTPARKATVMKIPTPTTPRQVREFLGKAGFCRLFIPGFASLAAPLYPLTRPKVPFTWTEAHQEAFGRIKEALLSAPALALPDLTKPFALYVDEKEGVARGVLTQTLGPWRRPVAYLSKKLDPVASGWPTCLKAIAAVALLLKDADKLTLGQNVLVIAPHNLESIVRQPPDRWMTNARMTHYQSLLLNERVSFAPPAILNPATLLPVESDDTPIHICSEILAEETGTRPDLRDQPLPGVPAWYTDGSSFIMDGRRQAGAAIVDNKRTVWASNLPEGTSAQKAELIALTQALRLAEGKSINIYTDSRYAFATAHVHGAIYKQRGWLTSAGKDIKNKEEILALLEAIHLPKRVAIIHCPGHQRGTDPVATGNRKADEAAKQAAQSTRILTETTKNAGKRTADGSEFEKRTADGSEFESPKKKAKVE

SEQ ID NO: 1744 - protein, 2141 aa, synthetic construct
MPAAKRVKLDGGDKKYSIGLDIGTNSVGWAVITDEYKVPSKKFKVLGNTDRHSIKKNLIGALLFDSGETAEATRLKRTARRRYTRRKNRICYLQEIFSNEMAKVDDSFFHRLEESFLVEEDKKHERHPIFGNIVDEVAYHEKYPTIYHLRKKLVDSTDKADLRLIYLALAHMIKFRGHFLIEGDLNPDNSDVDKLFIQLVQTYNQLFEENPINASGVDAKAILSARLSKSRRLENLIAQLPGEKKNGLFGNLIALSLGLTPNFKSNFDLAEDAKLQLSKDTYDDDLDNLLAQIGDQYADLFLAAKNLSDAILLSDILRVNTEITKAPLSASMIKRYDEHHQDLTLLKALVRQQLPEKYKEIFFDQSKNGYAGYIDGGASQEEFYKFIKPILEKMDGTEELLVKLNREDLLRKQRTFDNGSIPHQIHLGELHAILRRQEDFYPFLKDNREKIEKILTFRIPYYVGPLARGNSRFAWMTRKSEETITPWNFEEVVDKGASAQSFIERMTNFDKNLPNEKVLPKHSLLYEYFTVYNELTKVKYVTEGMRKPAFLSGEQKKAIVDLLFKTNRKVTVKQLKEDYFKKIECFDSVEISGVEDRFNASLGTYHDLLKIIKDKDFLDNEENEDILEDIVLTLTLFEDREMIEERLKTYAHLFDDKVMKQLKRRRYTGWGRLSRKLINGIRDKQSGKTILDFLKSDGFANRNFMQLIHDDSLTFKEDIQKAQVSGQGDSLHEHIANLAGSPAIKKGILQTVKVVDELVKVMGRHKPENIVIEMARENQTTQKGQKNSRERMKRIEEGIKELGSQILKEHPVENTQLQNEKLYLYYLQNGRDMYVDQELDINRLSDYDVDHIVPQSFLKDDSIDNKVLTRSDKARGKSDNVPSEEVVKKMKNYWRQLLNAKLITQRKFDNLTKAERGGLSELDKAGFIKRQLVETRQITKHVAQILDSRMNTKYDENDKLIREVKVITLKSKLVSDFRKDFQFYKVREINNYHHAHDAYLNAVVGTALIKKYPKLESEFVYGDYKVYDVRKMIAKSEQEIGKATAKYFFYSNIMNFFKTEITLANGEIRKRPLIETNGETGEIVWDKGRDFATVRKVLSMPQVNIVKKTEVQTGGFSKESILPKRNSDKLIARKKDWDPKKYGGFDSPTVAYSVLVVAKVEKGKSKKLKSVKELLGITIMERSSFEKNPIDFLEAKGYKEVKKDLIIKLPKYSLFELENGRKRMLASAGELQKGNELALPSKYVNFLYLASHYEKLKGSPEDNEQKQLFVEQHKHYLDEIIEQISEFSKRVILADANLDKVLSAYNKHRDKPIREQAENIIHLFTLTNLGAPAAFKYFDTTIDRKRYTSTKEVLDATLIHQSITGLYETRIDLSQLGGDGGEAAAKEAAAKEAAAKEAAAKEAAAKGGLLGRDLLTKLKAQIQFSTEGPQVTWEDRPAMCLVLNLEEEYRLHEKPVPPSIDPSWLQLFPMVWAEKAGMGLANQVPPVVVELKSDASPVAVRQYPMSKEAREGIRPHIQRFLDLGILVPCQSPWNTPLLPVKKPGTNDYRPVQDLREVNKRVQDIHPTVPNPYNLLSSLPPSHTWYSVLDLKDAFFCLKLHPNSQPLFAFEWRDPEKGNTGQLTWTRLPQGFKNSPTLFNEALHRDLASFRALNPQVVMLQYVDDLLVAAPTYRDCKEGTRRLLQELSKLGYRVSAKKAQLCREEVTYLGYLLKGGKRWLTPARKATVMKIPTPTTPRQVREFLGKAGFCRLFIPGFASLAAPLYPLTRPKVPFTWTEAHQEAFGRIKEALLSAPALALPDLTKPFALYVDEKEGVARGVLTQTLGPWRRPVAYLSKKLDPVASGWPTCLKAIAAVALLLKDADKLTLGQNVLVIAPHNLESIVRQPPDRWMTNARMTHYQSLLLNERVSFAPPAILNPATLLPVESDDTPIHICSEILAEETGTRPDLRDQPLPGVPAWYTDGSSFIMDGRRQAGAAIVDNKRTVWASNLPEGTSAQKAELIALTQALRLAEGKSINIYTDSRYAFATAHVHGAIYKQRGWLTSAGKDIKNKEEILALLEAIHLPKRVAIIHCPGHQRGTDPVATGNRKADEAAKQAAQSTRILTETTKNAGKRTADGSEFEKRTADGSEFESPKKKAKVE

SEQ ID NO: 1745 - protein, 2125 aa, synthetic construct
MPAAKRVKLDGGDKKYSIGLDIGTNSVGWAVITDEYKVPSKKFKVLGNTDRHSIKKNLIGALLFDSGETAEATRLKRTARRRYTRRKNRICYLQEIFSNEMAKVDDSFFHRLEESFLVEEDKKHERHPIFGNIVDEVAYHEKYPTIYHLRKKLVDSTDKADLRLIYLALAHMIKFRGHFLIEGDLNPDNSDVDKLFIQLVQTYNQLFEENPINASGVDAKAILSARLSKSRRLENLIAQLPGEKKNGLFGNLIALSLGLTPNFKSNFDLAEDAKLQLSKDTYDDDLDNLLAQIGDQYADLFLAAKNLSDAILLSDILRVNTEITKAPLSASMIKRYDEHHQDLTLLKALVRQQLPEKYKEIFFDQSKNGYAGYIDGGASQEEFYKFIKPILEKMDGTEELLVKLNREDLLRKQRTFDNGSIPHQIHLGELHAILRRQEDFYPFLKDNREKIEKILTFRIPYYVGPLARGNSRFAWMTRKSEETITPWNFEEVVDKGASAQSFIERMTNFDKNLPNEKVLPKHSLLYEYFTVYNELTKVKYVTEGMRKPAFLSGEQKKAIVDLLFKTNRKVTVKQLKEDYFKKIECFDSVEISGVEDRFNASLGTYHDLLKIIKDKDFLDNEENEDILEDIVLTLTLFEDREMIEERLKTYAHLFDDKVMKQLKRRRYTGWGRLSRKLINGIRDKQSGKTILDFLKSDGFANRNFMQLIHDDSLTFKEDIQKAQVSGQGDSLHEHIANLAGSPAIKKGILQTVKVVDELVKVMGRHKPENIVIEMARENQTTQKGQKNSRERMKRIEEGIKELGSQILKEHPVENTQLQNEKLYLYYLQNGRDMYVDQELDINRLSDYDVDHIVPQSFLKDDSIDNKVLTRSDKARGKSDNVPSEEVVKKMKNYWRQLLNAKLITQRKFDNLTKAERGGLSELDKAGFIKRQLVETRQITKHVAQILDSRMNTKYDENDKLIREVKVITLKSKLVSDFRKDFQFYKVREINNYHHAHDAYLNAVVGTALIKKYPKLESEFVYGDYKVYDVRKMIAKSEQEIGKATAKYFFYSNIMNFFKTEITLANGEIRKRPLIETNGETGEIVWDKGRDFATVRKVLSMPQVNIVKKTEVQTGGFSKESILPKRNSDKLIARKKDWDPKKYGGFDSPTVAYSVLVVAKVEKGKSKKLKSVKELLGITIMERSSFEKNPIDFLEAKGYKEVKKDLIIKLPKYSLFELENGRKRMLASAGELQKGNELALPSKYVNFLYLASHYEKLKGSPEDNEQKQLFVEQHKHYLDEIIEQISEFSKRVILADANLDKVLSAYNKHRDKPIREQAENIIHLFTLTNLGAPAAFKYFDTTIDRKRYTSTKEVLDATLIHQSITGLYETRIDLSQLGGDGGGGGGGSPAPGGLLGRDLLTKLKAQIQFSTEGPQVTWEDRPAMCLVLNLEEEYRLHEKPVPPSIDPSWLQLFPMVWAEKAGMGLANQVPPVVVELKSDASPVAVRQYPMSKEAREGIRPHIQRFLDLGILVPCQSPWNTPLLPVKKPGTNDYRPVQDLREVNKRVQDIHPTVPNPYNLLSSLPPSHTWYSVLDLKDAFFCLKLHPNSQPLFAFEWRDPEKGNTGQLTWTRLPQGFKNSPTLFNEALHRDLASFRALNPQVVMLQYVDDLLVAAPTYRDCKEGTRRLLQELSKLGYRVSAKKAQLCREEVTYLGYLLKGGKRWLTPARKATVMKIPTPTTPRQVREFLGKAGFCRLFIPGFASLAAPLYPLTRPKVPFTWTEAHQEAFGRIKEALLSAPALALPDLTKPFALYVDEKEGVARGVLTQTLGPWRRPVAYLSKKLDPVASGWPTCLKAIAAVALLLKDADKLTLGQNVLVIAPHNLESIVRQPPDRWMTNARMTHYQSLLLNERVSFAPPAILNPATLLPVESDDTPIHICSEILAEETGTRPDLRDQPLPGVPAWYTDGSSFIMDGRRQAGAAIVDNKRTVWASNLPEGTSAQKAELIALTQALRLAEGKSINIYTDSRYAFATAHVHGAIYKQRGWLTSAGKDIKNKEEILALLEAIHLPKRVAIIHCPGHQRGTDPVATGNRKADEAAKQAAQSTRILTETTKNAGKRTADGSEFEKRTADGSEFESPKKKAKVE

SEQ ID NO: 1746 - protein, 2124 aa, synthetic construct
MPAAKRVKLDGGDKKYSIGLDIGTNSVGWAVITDEYKVPSKKFKVLGNTDRHSIKKNLIGALLFDSGETAEATRLKRTARRRYTRRKNRICYLQEIFSNEMAKVDDSFFHRLEESFLVEEDKKHERHPIFGNIVDEVAYHEKYPTIYHLRKKLVDSTDKADLRLIYLALAHMIKFRGHFLIEGDLNPDNSDVDKLFIQLVQTYNQLFEENPINASGVDAKAILSARLSKSRRLENLIAQLPGEKKNGLFGNLIALSLGLTPNFKSNFDLAEDAKLQLSKDTYDDDLDNLLAQIGDQYADLFLAAKNLSDAILLSDILRVNTEITKAPLSASMIKRYDEHHQDLTLLKALVRQQLPEKYKEIFFDQSKNGYAGYIDGGASQEEFYKFIKPILEKMDGTEELLVKLNREDLLRKQRTFDNGSIPHQIHLGELHAILRRQEDFYPFLKDNREKIEKILTFRIPYYVGPLARGNSRFAWMTRKSEETITPWNFEEVVDKGASAQSFIERMTNFDKNLPNEKVLPKHSLLYEYFTVYNELTKVKYVTEGMRKPAFLSGEQKKAIVDLLFKTNRKVTVKQLKEDYFKKIECFDSVEISGVEDRFNASLGTYHDLLKIIKDKDFLDNEENEDILEDIVLTLTLFEDREMIEERLKTYAHLFDDKVMKQLKRRRYTGWGRLSRKLINGIRDKQSGKTILDFLKSDGFANRNFMQLIHDDSLTFKEDIQKAQVSGQGDSLHEHIANLAGSPAIKKGILQTVKVVDELVKVMGRHKPENIVIEMARENQTTQKGQKNSRERMKRIEEGIKELGSQILKEHPVENTQLQNEKLYLYYLQNGRDMYVDQELDINRLSDYDVDHIVPQSFLKDDSIDNKVLTRSDKARGKSDNVPSEEVVKKMKNYWRQLLNAKLITQRKFDNLTKAERGGLSELDKAGFIKRQLVETRQITKHVAQILDSRMNTKYDENDKLIREVKVITLKSKLVSDFRKDFQFYKVREINNYHHAHDAYLNAVVGTALIKKYPKLESEFVYGDYKVYDVRKMIAKSEQEIGKATAKYFFYSNIMNFFKTEITLANGEIRKRPLIETNGETGEIVWDKGRDFATVRKVLSMPQVNIVKKTEVQTGGFSKESILPKRNSDKLIARKKDWDPKKYGGFDSPTVAYSVLVVAKVEKGKSKKLKSVKELLGITIMERSSFEKNPIDFLEAKGYKEVKKDLIIKLPKYSLFELENGRKRMLASAGELQKGNELALPSKYVNFLYLASHYEKLKGSPEDNEQKQLFVEQHKHYLDEIIEQISEFSKRVILADANLDKVLSAYNKHRDKPIREQAENIIHLFTLTNLGAPAAFKYFDTTIDRKRYTSTKEVLDATLIHQSITGLYETRIDLSQLGGDGGEAAAKGGGGGLLGRDLLTKLKAQIQFSTEGPQVTWEDRPAMCLVLNLEEEYRLHEKPVPPSIDPSWLQLFPMVWAEKAGMGLANQVPPVVVELKSDASPVAVRQYPMSKEAREGIRPHIQRFLDLGILVPCQSPWNTPLLPVKKPGTNDYRPVQDLREVNKRVQDIHPTVPNPYNLLSSLPPSHTWYSVLDLKDAFFCLKLHPNSQPLFAFEWRDPEKGNTGQLTWTRLPQGFKNSPTLFNEALHRDLASFRALNPQVVMLQYVDDLLVAAPTYRDCKEGTRRLLQELSKLGYRVSAKKAQLCREEVTYLGYLLKGGKRWLTPARKATVMKIPTPTTPRQVREFLGKAGFCRLFIPGFASLAAPLYPLTRPKVPFTWTEAHQEAFGRIKEALLSAPALALPDLTKPFALYVDEKEGVARGVLTQTLGPWRRPVAYLSKKLDPVASGWPTCLKAIAAVALLLKDADKLTLGQNVLVIAPHNLESIVRQPPDRWMTNARMTHYQSLLLNERVSFAPPAILNPATLLPVESDDTPIHICSEILAEETGTRPDLRDQPLPGVPAWYTDGSSFIMDGRRQAGAAIVDNKRTVWASNLPEGTSAQKAELIALTQALRLAEGKSINIYTDSRYAFATAHVHGAIYKQRGWLTSAGKDIKNKEEILALLEAIHLPKRVAIIHCPGHQRGTDPVATGNRKADEAAKQAAQSTRILTETTKNAGKRTADGSEFEKRTADGSEFESPKKKAKVE

SEQ ID NO: 1747 - protein, 2122 aa, synthetic construct
MPAAKRVKLDGGDKKYSIGLDIGTNSVGWAVITDEYKVPSKKFKVLGNTDRHSIKKNLIGALLFDSGETAEATRLKRTARRRYTRRKNRICYLQEIFSNEMAKVDDSFFHRLEESFLVEEDKKHERHPIFGNIVDEVAYHEKYPTIYHLRKKLVDSTDKADLRLIYLALAHMIKFRGHFLIEGDLNPDNSDVDKLFIQLVQTYNQLFEENPINASGVDAKAILSARLSKSRRLENLIAQLPGEKKNGLFGNLIALSLGLTPNFKSNFDLAEDAKLQLSKDTYDDDLDNLLAQIGDQYADLFLAAKNLSDAILLSDILRVNTEITKAPLSASMIKRYDEHHQDLTLLKALVRQQLPEKYKEIFFDQSKNGYAGYIDGGASQEEFYKFIKPILEKMDGTEELLVKLNREDLLRKQRTFDNGSIPHQIHLGELHAILRRQEDFYPFLKDNREKIEKILTFRIPYYVGPLARGNSRFAWMTRKSEETITPWNFEEVVDKGASAQSFIERMTNFDKNLPNEKVLPKHSLLYEYFTVYNELTKVKYVTEGMRKPAFLSGEQKKAIVDLLFKTNRKVTVKQLKEDYFKKIECFDSVEISGVEDRFNASLGTYHDLLKIIKDKDFLDNEENEDILEDIVLTLTLFEDREMIEERLKTYAHLFDDKVMKQLKRRRYTGWGRLSRKLINGIRDKQSGKTILDFLKSDGFANRNFMQLIHDDSLTFKEDIQKAQVSGQGDSLHEHIANLAGSPAIKKGILQTVKVVDELVKVMGRHKPENIVIEMARENQTTQKGQKNSRERMKRIEEGIKELGSQILKEHPVENTQLQNEKLYLYYLQNGRDMYVDQELDINRLSDYDVDHIVPQSFLKDDSIDNKVLTRSDKARGKSDNVPSEEVVKKMKNYWRQLLNAKLITQRKFDNLTKAERGGLSELDKAGFIKRQLVETRQITKHVAQILDSRMNTKYDENDKLIREVKVITLKSKLVSDFRKDFQFYKVREINNYHHAHDAYLNAVVGTALIKKYPKLESEFVYGDYKVYDVRKMIAKSEQEIGKATAKYFFYSNIMNFFKTEITLANGEIRKRPLIETNGETGEIVWDKGRDFATVRKVLSMPQVNIVKKTEVQTGGFSKESILPKRNSDKLIARKKDWDPKKYGGFDSPTVAYSVLVVAKVEKGKSKKLKSVKELLGITIMERSSFEKNPIDFLEAKGYKEVKKDLIIKLPKYSLFELENGRKRMLASAGELQKGNELALPSKYVNFLYLASHYEKLKGSPEDNEQKQLFVEQHKHYLDEIIEQISEFSKRVILADANLDKVLSAYNKHRDKPIREQAENIIHLFTLTNLGAPAAFKYFDTTIDRKRYTSTKEVLDATLIHQSITGLYETRIDLSQLGGDGGGSSGSSGGLLGRDLLTKLKAQIQFSTEGPQVTWEDRPAMCLVLNLEEEYRLHEKPVPPSIDPSWLQLFPMVWAEKAGMGLANQVPPVVVELKSDASPVAVRQYPMSKEAREGIRPHIQRFLDLGILVPCQSPWNTPLLPVKKPGTNDYRPVQDLREVNKRVQDIHPTVPNPYNLLSSLPPSHTWYSVLDLKDAFFCLKLHPNSQPLFAFEWRDPEKGNTGQLTWTRLPQGFKNSPTLFNEALHRDLASFRALNPQVVMLQYVDDLLVAAPTYRDCKEGTRRLLQELSKLGYRVSAKKAQLCREEVTYLGYLLKGGKRWLTPARKATVMKIPTPTTPRQVREFLGKAGFCRLFIPGFASLAAPLYPLTRPKVPFTWTEAHQEAFGRIKEALLSAPALALPDLTKPFALYVDEKEGVARGVLTQTLGPWRRPVAYLSKKLDPVASGWPTCLKAIAAVALLLKDADKLTLGQNVLVIAPHNLESIVRQPPDRWMTNARMTHYQSLLLNERVSFAPPAILNPATLLPVESDDTPIHICSEILAEETGTRPDLRDQPLPGVPAWYTDGSSFIMDGRRQAGAAIVDNKRTVWASNLPEGTSAQKAELIALTQALRLAEGKSINIYTDSRYAFATAHVHGAIYKQRGWLTSAGKDIKNKEEILALLEAIHLPKRVAIIHCPGHQRGTDPVATGNRKADEAAKQAAQSTRILTETTKNAGKRTADGSEFEKRTADGSEFESPKKKAKVE

SEQ ID NO: 1748 - protein, 2122 aa, synthetic construct
MPAAKRVKLDGGDKKYSIGLDIGTNSVGWAVITDEYKVPSKKFKVLGNTDRHSIKKNLIGALLFDSGETAEATRLKRTARRRYTRRKNRICYLQEIFSNEMAKVDDSFFHRLEESFLVEEDKKHERHPIFGNIVDEVAYHEKYPTIYHLRKKLVDSTDKADLRLIYLALAHMIKFRGHFLIEGDLNPDNSDVDKLFIQLVQTYNQLFEENPINASGVDAKAILSARLSKSRRLENLIAQLPGEKKNGLFGNLIALSLGLTPNFKSNFDLAEDAKLQLSKDTYDDDLDNLLAQIGDQYADLFLAAKNLSDAILLSDILRVNTEITKAPLSASMIKRYDEHHQDLTLLKALVRQQLPEKYKEIFFDQSKNGYAGYIDGGASQEEFYKFIKPILEKMDGTEELLVKLNREDLLRKQRTFDNGSIPHQIHLGELHAILRRQEDFYPFLKDNREKIEKILTFRIPYYVGPLARGNSRFAWMTRKSEETITPWNFEEVVDKGASAQSFIERMTNFDKNLPNEKVLPKHSLLYEYFTVYNELTKVKYVTEGMRKPAFLSGEQKKAIVDLLFKTNRKVTVKQLKEDYFKKIECFDSVEISGVEDRFNASLGTYHDLLKIIKDKDFLDNEENEDILEDIVLTLTLFEDREMIEERLKTYAHLFDDKVMKQLKRRRYTGWGRLSRKLINGIRDKQSGKTILDFLKSDGFANRNFMQLIHDDSLTFKEDIQKAQVSGQGDSLHEHIANLAGSPAIKKGILQTVKVVDELVKVMGRHKPENIVIEMARENQTTQKGQKNSRERMKRIEEGIKELGSQILKEHPVENTQLQNEKLYLYYLQNGRDMYVDQELDINRLSDYDVDHIVPQSFLKDDSIDNKVLTRSDKARGKSDNVPSEEVVKKMKNYWRQLLNAKLITQRKFDNLTKAERGGLSELDKAGFIKRQLVETRQITKHVAQILDSRMNTKYDENDKLIREVKVITLKSKLVSDFRKDFQFYKVREINNYHHAHDAYLNAVVGTALIKKYPKLESEFVYGDYKVYDVRKMIAKSEQEIGKATAKYFFYSNIMNFFKTEITLANGEIRKRPLIETNGETGEIVWDKGRDFATVRKVLSMPQVNIVKKTEVQTGGFSKESILPKRNSDKLIARKKDWDPKKYGGFDSPTVAYSVLVVAKVEKGKSKKLKSVKELLGITIMERSSFEKNPIDFLEAKGYKEVKKDLIIKLPKYSLFELENGRKRMLASAGELQKGNELALPSKYVNFLYLASHYEKLKGSPEDNEQKQLFVEQHKHYLDEIIEQISEFSKRVILADANLDKVLSAYNKHRDKPIREQAENIIHLFTLTNLGAPAAFKYFDTTIDRKRYTSTKEVLDATLIHQSITGLYETRIDLSQLGGDGGGGGGGSGGLLGRDLLTKLKAQIQFSTEGPQVTWEDRPAMCLVLNLEEEYRLHEKPVPPSIDPSWLQLFPMVWAEKAGMGLANQVPPVVVELKSDASPVAVRQYPMSKEAREGIRPHIQRFLDLGILVPCQSPWNTPLLPVKKPGTNDYRPVQDLREVNKRVQDIHPTVPNPYNLLSSLPPSHTWYSVLDLKDAFFCLKLHPNSQPLFAFEWRDPEKGNTGQLTWTRLPQGFKNSPTLFNEALHRDLASFRALNPQVVMLQYVDDLLVAAPTYRDCKEGTRRLLQELSKLGYRVSAKKAQLCREEVTYLGYLLKGGKRWLTPARKATVMKIPTPTTPRQVREFLGKAGFCRLFIPGFASLAAPLYPLTRPKVPFTWTEAHQEAFGRIKEALLSAPALALPDLTKPFALYVDEKEGVARGVLTQTLGPWRRPVAYLSKKLDPVASGWPTCLKAIAAVALLLKDADKLTLGQNVLVIAPHNLESIVRQPPDRWMTNARMTHYQSLLLNERVSFAPPAILNPATLLPVESDDTPIHICSEILAEETGTRPDLRDQPLPGVPAWYTDGSSFIMDGRRQAGAAIVDNKRTVWASNLPEGTSAQKAELIALTQALRLAEGKSINIYTDSRYAFATAHVHGAIYKQRGWLTSAGKDIKNKEEILALLEAIHLPKRVAIIHCPGHQRGTDPVATGNRKADEAAKQAAQSTRILTETTKNAGKRTADGSEFEKRTADGSEFESPKKKAKVE

SEQ ID NO: 1749 - protein, 2125 aa, synthetic construct
MPAAKRVKLDGGDKKYSIGLDIGTNSVGWAVITDEYKVPSKKFKVLGNTDRHSIKKNLIGALLFDSGETAEATRLKRTARRRYTRRKNRICYLQEIFSNEMAKVDDSFFHRLEESFLVEEDKKHERHPIFGNIVDEVAYHEKYPTIYHLRKKLVDSTDKADLRLIYLALAHMIKFRGHFLIEGDLNPDNSDVDKLFIQLVQTYNQLFEENPINASGVDAKAILSARLSKSRRLENLIAQLPGEKKNGLFGNLIALSLGLTPNFKSNFDLAEDAKLQLSKDTYDDDLDNLLAQIGDQYADLFLAAKNLSDAILLSDILRVNTEITKAPLSASMIKRYDEHHQDLTLLKALVRQQLPEKYKEIFFDQSKNGYAGYIDGGASQEEFYKFIKPILEKMDGTEELLVKLNREDLLRKQRTFDNGSIPHQIHLGELHAILRRQEDFYPFLKDNREKIEKILTFRIPYYVGPLARGNSRFAWMTRKSEETITPWNFEEVVDKGASAQSFIERMTNFDKNLPNEKVLPKHSLLYEYFTVYNELTKVKYVTEGMRKPAFLSGEQKKAIVDLLFKTNRKVTVKQLKEDYFKKIECFDSVEISGVEDRFNASLGTYHDLLKIIKDKDFLDNEENEDILEDIVLTLTLFEDREMIEERLKTYAHLFDDKVMKQLKRRRYTGWGRLSRKLINGIRDKQSGKTILDFLKSDGFANRNFMQLIHDDSLTFKEDIQKAQVSGQGDSLHEHIANLAGSPAIKKGILQTVKVVDELVKVMGRHKPENIVIEMARENQTTQKGQKNSRERMKRIEEGIKELGSQILKEHPVENTQLQNEKLYLYYLQNGRDMYVDQELDINRLSDYDVDHIVPQSFLKDDSIDNKVLTRSDKARGKSDNVPSEEVVKKMKNYWRQLLNAKLITQRKFDNLTKAERGGLSELDKAGFIKRQLVETRQITKHVAQILDSRMNTKYDENDKLIREVKVITLKSKLVSDFRKDFQFYKVREINNYHHAHDAYLNAVVGTALIKKYPKLESEFVYGDYKVYDVRKMIAKSEQEIGKATAKYFFYSNIMNFFKTEITLANGEIRKRPLIETNGETGEIVWDKGRDFATVRKVLSMPQVNIVKKTEVQTGGFSKESILPKRNSDKLIARKKDWDPKKYGGFDSPTVAYSVLVVAKVEKGKSKKLKSVKELLGITIMERSSFEKNPIDFLEAKGYKEVKKDLIIKLPKYSLFELENGRKRMLASAGELQKGNELALPSKYVNFLYLASHYEKLKGSPEDNEQKQLFVEQHKHYLDEIIEQISEFSKRVILADANLDKVLSAYNKHRDKPIREQAENIIHLFTLTNLGAPAAFKYFDTTIDRKRYTSTKEVLDATLIHQSITGLYETRIDLSQLGGDGGPAPGSSGGSGGLLGRDLLTKLKAQIQFSTEGPQVTWEDRPAMCLVLNLEEEYRLHEKPVPPSIDPSWLQLFPMVWAEKAGMGLANQVPPVVVELKSDASPVAVRQYPMSKEAREGIRPHIQRFLDLGILVPCQSPWNTPLLPVKKPGTNDYRPVQDLREVNKRVQDIHPTVPNPYNLLSSLPPSHTWYSVLDLKDAFFCLKLHPNSQPLFAFEWRDPEKGNTGQLTWTRLPQGFKNSPTLFNEALHRDLASFRALNPQVVMLQYVDDLLVAAPTYRDCKEGTRRLLQELSKLGYRVSAKKAQLCREEVTYLGYLLKGGKRWLTPARKATVMKIPTPTTPRQVREFLGKAGFCRLFIPGFASLAAPLYPLTRPKVPFTWTEAHQEAFGRIKEALLSAPALALPDLTKPFALYVDEKEGVARGVLTQTLGPWRRPVAYLSKKLDPVASGWPTCLKAIAAVALLLKDADKLTLGQNVLVIAPHNLESIVRQPPDRWMTNARMTHYQSLLLNERVSFAPPAILNPATLLPVESDDTPIHICSEILAEETGTRPDLRDQPLPGVPAWYTDGSSFIMDGRRQAGAAIVDNKRTVWASNLPEGTSAQKAELIALTQALRLAEGKSINIYTDSRYAFATAHVHGAIYKQRGWLTSAGKDIKNKEEILALLEAIHLPKRVAIIHCPGHQRGTDPVATGNRKADEAAKQAAQSTRILTETTKNAGKRTADGSEFEKRTADGSEFESPKKKAKVE

SEQ ID NO: 1750 - protein, 2122 aa, synthetic construct
MPAAKRVKLDGGDKKYSIGLDIGTNSVGWAVITDEYKVPSKKFKVLGNTDRHSIKKNLIGALLFDSGETAEATRLKRTARRRYTRRKNRICYLQEIFSNEMAKVDDSFFHRLEESFLVEEDKKHERHPIFGNIVDEVAYHEKYPTIYHLRKKLVDSTDKADLRLIYLALAHMIKFRGHFLIEGDLNPDNSDVDKLFIQLVQTYNQLFEENPINASGVDAKAILSARLSKSRRLENLIAQLPGEKKNGLFGNLIALSLGLTPNFKSNFDLAEDAKLQLSKDTYDDDLDNLLAQIGDQYADLFLAAKNLSDAILLSDILRVNTEITKAPLSASMIKRYDEHHQDLTLLKALVRQQLPEKYKEIFFDQSKNGYAGYIDGGASQEEFYKFIKPILEKMDGTEELLVKLNREDLLRKQRTFDNGSIPHQIHLGELHAILRRQEDFYPFLKDNREKIEKILTFRIPYYVGPLARGNSRFAWMTRKSEETITPWNFEEVVDKGASAQSFIERMTNFDKNLPNEKVLPKHSLLYEYFTVYNELTKVKYVTEGMRKPAFLSGEQKKAIVDLLFKTNRKVTVKQLKEDYFKKIECFDSVEISGVEDRFNASLGTYHDLLKIIKDKDFLDNEENEDILEDIVLTLTLFEDREMIEERLKTYAHLFDDKVMKQLKRRRYTGWGRLSRKLINGIRDKQSGKTILDFLKSDGFANRNFMQLIHDDSLTFKEDIQKAQVSGQGDSLHEHIANLAGSPAIKKGILQTVKVVDELVKVMGRHKPENIVIEMARENQTTQKGQKNSRERMKRIEEGIKELGSQILKEHPVENTQLQNEKLYLYYLQNGRDMYVDQELDINRLSDYDVDHIVPQSFLKDDSIDNKVLTRSDKARGKSDNVPSEEVVKKMKNYWRQLLNAKLITQRKFDNLTKAERGGLSELDKAGFIKRQLVETRQITKHVAQILDSRMNTKYDENDKLIREVKVITLKSKLVSDFRKDFQFYKVREINNYHHAHDAYLNAVVGTALIKKYPKLESEFVYGDYKVYDVRKMIAKSEQEIGKATAKYFFYSNIMNFFKTEITLANGEIRKRPLIETNGETGEIVWDKGRDFATVRKVLSMPQVNIVKKTEVQTGGFSKESILPKRNSDKLIARKKDWDPKKYGGFDSPTVAYSVLVVAKVEKGKSKKLKSVKELLGITIMERSSFEKNPIDFLEAKGYKEVKKDLIIKLPKYSLFELENGRKRMLASAGELQKGNELALPSKYVNFLYLASHYEKLKGSPEDNEQKQLFVEQHKHYLDEIIEQISEFSKRVILADANLDKVLSAYNKHRDKPIREQAENIIHLFTLTNLGAPAAFKYFDTTIDRKRYTSTKEVLDATLIHQSITGLYETRIDLSQLGGDGGGGSGGSGGLLGRDLLTKLKAQIQFSTEGPQVTWEDRPAMCLVLNLEEEYRLHEKPVPPSIDPSWLQLFPMVWAEKAGMGLANQVPPVVVELKSDASPVAVRQYPMSKEAREGIRPHIQRFLDLGILVPCQSPWNTPLLPVKKPGTNDYRPVQDLREVNKRVQDIHPTVPNPYNLLSSLPPSHTWYSVLDLKDAFFCLKLHPNSQPLFAFEWRDPEKGNTGQLTWTRLPQGFKNSPTLFNEALHRDLASFRALNPQVVMLQYVDDLLVAAPTYRDCKEGTRRLLQELSKLGYRVSAKKAQLCREEVTYLGYLLKGGKRWLTPARKATVMKIPTPTTPRQVREFLGKAGFCRLFIPGFASLAAPLYPLTRPKVPFTWTEAHQEAFGRIKEALLSAPALALPDLTKPFALYVDEKEGVARGVLTQTLGPWRRPVAYLSKKLDPVASGWPTCLKAIAAVALLLKDADKLTLGQNVLVIAPHNLESIVRQPPDRWMTNARMTHYQSLLLNERVSFAPPAILNPATLLPVESDDTPIHICSEILAEETGTRPDLRDQPLPGVPAWYTDGSSFIMDGRRQAGAAIVDNKRTVWASNLPEGTSAQKAELIALTQALRLAEGKSINIYTDSRYAFATAHVHGAIYKQRGWLTSAGKDIKNKEEILALLEAIHLPKRVAIIHCPGHQRGTDPVATGNRKADEAAKQAAQSTRILTETTKNAGKRTADGSEFEKRTADGSEFESPKKKAKVE

SEQ ID NO: 1751 - protein, 2216 aa, synthetic construct
MPAAKRVKLDGGDKKYSIGLDIGTNSVGWAVITDEYKVPSKKFKVLGNTDRHSIKKNLIGALLFDSGETAEATRLKRTARRRYTRRKNRICYLQEIFSNEMAKVDDSFFHRLEESFLVEEDKKHERHPIFGNIVDEVAYHEKYPTIYHLRKKLVDSTDKADLRLIYLALAHMIKFRGHFLIEGDLNPDNSDVDKLFIQLVQTYNQLFEENPINASGVDAKAILSARLSKSRRLENLIAQLPGEKKNGLFGNLIALSLGLTPNFKSNFDLAEDAKLQLSKDTYDDDLDNLLAQIGDQYADLFLAAKNLSDAILLSDILRVNTEITKAPLSASMIKRYDEHHQDLTLLKALVRQQLPEKYKEIFFDQSKNGYAGYIDGGASQEEFYKFIKPILEKMDGTEELLVKLNREDLLRKQRTFDNGSIPHQIHLGELHAILRRQEDFYPFLKDNREKIEKILTFRIPYYVGPLARGNSRFAWMTRKSEETITPWNFEEVVDKGASAQSFIERMTNFDKNLPNEKVLPKHSLLYEYFTVYNELTKVKYVTEGMRKPAFLSGEQKKAIVDLLFKTNRKVTVKQLKEDYFKKIECFDSVEISGVEDRFNASLGTYHDLLKIIKDKDFLDNEENEDILEDIVLTLTLFEDREMIEERLKTYAHLFDDKVMKQLKRRRYTGWGRLSRKLINGIRDKQSGKTILDFLKSDGFANRNFMQLIHDDSLTFKEDIQKAQVSGQGDSLHEHIANLAGSPAIKKGILQTVKVVDELVKVMGRHKPENIVIEMARENQTTQKGQKNSRERMKRIEEGIKELGSQILKEHPVENTQLQNEKLYLYYLQNGRDMYVDQELDINRLSDYDVDHIVPQSFLKDDSIDNKVLTRSDKARGKSDNVPSEEVVKKMKNYWRQLLNAKLITQRKFDNLTKAERGGLSELDKAGFIKRQLVETRQITKHVAQILDSRMNTKYDENDKLIREVKVITLKSKLVSDFRKDFQFYKVREINNYHHAHDAYLNAVVGTALIKKYPKLESEFVYGDYKVYDVRKMIAKSEQEIGKATAKYFFYSNIMNFFKTEITLANGEIRKRPLIETNGETGEIVWDKGRDFATVRKVLSMPQVNIVKKTEVQTGGFSKESILPKRNSDKLIARKKDWDPKKYGGFDSPTVAYSVLVVAKVEKGKSKKLKSVKELLGITIMERSSFEKNPIDFLEAKGYKEVKKDLIIKLPKYSLFELENGRKRMLASAGELQKGNELALPSKYVNFLYLASHYEKLKGSPEDNEQKQLFVEQHKHYLDEIIEQISEFSKRVILADANLDKVLSAYNKHRDKPIREQAENIIHLFTLTNLGAPAAFKYFDTTIDRKRYTSTKEVLDATLIHQSITGLYETRIDLSQLGGDGGGGGGGSGSSGGTLGDQGSRGSDPLPEPRVTLTVEGIPTEFLVNTGAEHSVLTKPMGKMGSKRTVVAGATGSKVYPWTTKRLLKIGQKQVTHSFLVIPECPAPLLGRDLLTKLKAQIQFSTEGPQVTWEDRPAMCLVLNLEEEYRLHEKPVPPSIDPSWLQLFPMVWAEKAGMGLANQVPPVVVELKSDASPVAVRQYPMSKEAREGIRPHIQRFLDLGILVPCQSPWNTPLLPVKKPGTNDYRPVQDLREVNKRVQDIHPTVPNPYNLLSSLPPSHTWYSVLDLKDAFFCLKLHPNSQPLFAFEWRDPEKGNTGQLTWTRLPQGFKNSPTLFNEALHRDLASFRALNPQVVMLQYVDDLLVAAPTYRDCKEGTRRLLQELSKLGYRVSAKKAQLCREEVTYLGYLLKGGKRWLTPARKATVMKIPTPTTPRQVREFLGTAGFCRLWIPGFASLAAPLYPLTRPKVPFTWTEAHQEAFGRIKEALLSAPALALPDLTKPFALYVDEKEGVARGVLTQTLGPWRRPVAYLSKKLDPVASGWPTCLKAIAAVALLLKDADKLTLGQNVLVIAPHNLESIVRQPPDRWMTNARMTHYQSLLLNERVSFAPPAILNPATLLPVESDDTPIHICSEILAEETGTRPDLRDQPLPGVPAWYTDGSSFIMDGRRQAGAAIVDNKRTVWASNLPEGTSAQKAELIALTQALRLAEGKSINIYTDSRYAFATAHVHGAIYKQRGWLTSAGKDIKNKEEILALLEAIHLPKRVAIIHCPGHQRGTDPVATGNRKADEAAKQAAQSTRILTETTKNAGKRTADGSEFEKRTADGSEFESPKKKAKVE

SEQ ID NO: 1752 - protein, 2237 aa, synthetic construct
MPAAKRVKLDGGDKKYSIGLDIGTNSVGWAVITDEYKVPSKKFKVLGNTDRHSIKKNLIGALLFDSGETAEATRLKRTARRRYTRRKNRICYLQEIFSNEMAKVDDSFFHRLEESFLVEEDKKHERHPIFGNIVDEVAYHEKYPTIYHLRKKLVDSTDKADLRLIYLALAHMIKFRGHFLIEGDLNPDNSDVDKLFIQLVQTYNQLFEENPINASGVDAKAILSARLSKSRRLENLIAQLPGEKKNGLFGNLIALSLGLTPNFKSNFDLAEDAKLQLSKDTYDDDLDNLLAQIGDQYADLFLAAKNLSDAILLSDILRVNTEITKAPLSASMIKRYDEHHQDLTLLKALVRQQLPEKYKEIFFDQSKNGYAGYIDGGASQEEFYKFIKPILEKMDGTEELLVKLNREDLLRKQRTFDNGSIPHQIHLGELHAILRRQEDFYPFLKDNREKIEKILTFRIPYYVGPLARGNSRFAWMTRKSEETITPWNFEEVVDKGASAQSFIERMTNFDKNLPNEKVLPKHSLLYEYFTVYNELTKVKYVTEGMRKPAFLSGEQKKAIVDLLFKTNRKVTVKQLKEDYFKKIECFDSVEISGVEDRFNASLGTYHDLLKIIKDKDFLDNEENEDILEDIVLTLTLFEDREMIEERLKTYAHLFDDKVMKQLKRRRYTGWGRLSRKLINGIRDKQSGKTILDFLKSDGFANRNFMQLIHDDSLTFKEDIQKAQVSGQGDSLHEHIANLAGSPAIKKGILQTVKVVDELVKVMGRHKPENIVIEMARENQTTQKGQKNSRERMKRIEEGIKELGSQILKEHPVENTQLQNEKLYLYYLQNGRDMYVDQELDINRLSDYDVDHIVPQSFLKDDSIDNKVLTRSDKARGKSDNVPSEEVVKKMKNYWRQLLNAKLITQRKFDNLTKAERGGLSELDKAGFIKRQLVETRQITKHVAQILDSRMNTKYDENDKLIREVKVITLKSKLVSDFRKDFQFYKVREINNYHHAHDAYLNAVVGTALIKKYPKLESEFVYGDYKVYDVRKMIAKSEQEIGKATAKYFFYSNIMNFFKTEITLANGEIRKRPLIETNGETGEIVWDKGRDFATVRKVLSMPQVNIVKKTEVQTGGFSKESILPKRNSDKLIARKKDWDPKKYGGFDSPTVAYSVLVVAKVEKGKSKKLKSVKELLGITIMERSSFEKNPIDFLEAKGYKEVKKDLIIKLPKYSLFELENGRKRMLASAGELQKGNELALPSKYVNFLYLASHYEKLKGSPEDNEQKQLFVEQHKHYLDEIIEQISEFSKRVILADANLDKVLSAYNKHRDKPIREQAENIIHLFTLTNLGAPAAFKYFDTTIDRKRYTSTKEVLDATLIHQSITGLYETRIDLSQLGGDGGGGGGSGGGGSGGGGSGGGGSGGGGSGGGGSGGTLGDQGSRGSDPLPEPRVTLTVEGIPTEFLVNTGAEHSVLTKPMGKMGSKRTVVAGATGSKVYPWTTKRLLKIGQKQVTHSFLVIPECPAPLLGRDLLTKLKAQIQFSTEGPQVTWEDRPAMCLVLNLEEEYRLHEKPVPPSIDPSWLQLFPMVWAEKAGMGLANQVPPVVVELKSDASPVAVRQYPMSKEAREGIRPHIQRFLDLGILVPCQSPWNTPLLPVKKPGTNDYRPVQDLREVNKRVQDIHPTVPNPYNLLSSLPPSHTWYSVLDLKDAFFCLKLHPNSQPLFAFEWRDPEKGNTGQLTWTRLPQGFKNSPTLFNEALHRDLASFRALNPQVVMLQYVDDLLVAAPTYRDCKEGTRRLLQELSKLGYRVSAKKAQLCREEVTYLGYLLKGGKRWLTPARKATVMKIPTPTTPRQVREFLGTAGFCRLWIPGFASLAAPLYPLTRPKVPFTWTEAHQEAFGRIKEALLSAPALALPDLTKPFALYVDEKEGVARGVLTQTLGPWRRPVAYLSKKLDPVASGWPTCLKAIAAVALLLKDADKLTLGQNVLVIAPHNLESIVRQPPDRWMTNARMTHYQSLLLNERVSFAPPAILNPATLLPVESDDTPIHICSEILAEETGTRPDLRDQPLPGVPAWYTDGSSFIMDGRRQAGAAIVDNKRTVWASNLPEGTSAQKAELIALTQALRLAEGKSINIYTDSRYAFATAHVHGAIYKQRGWLTSAGKDIKNKEEILALLEAIHLPKRVAIIHCPGHQRGTDPVATGNRKADEAAKQAAQSTRILTETTKNAGKRTADGSEFEKRTADGSEFESPKKKAKVE

SEQ ID NO: 1753 - protein, 2218 aa, synthetic construct
MPAAKRVKLDGGDKKYSIGLDIGTNSVGWAVITDEYKVPSKKFKVLGNTDRHSIKKNLIGALLFDSGETAEATRLKRTARRRYTRRKNRICYLQEIFSNEMAKVDDSFFHRLEESFLVEEDKKHERHPIFGNIVDEVAYHEKYPTIYHLRKKLVDSTDKADLRLIYLALAHMIKFRGHFLIEGDLNPDNSDVDKLFIQLVQTYNQLFEENPINASGVDAKAILSARLSKSRRLENLIAQLPGEKKNGLFGNLIALSLGLTPNFKSNFDLAEDAKLQLSKDTYDDDLDNLLAQIGDQYADLFLAAKNLSDAILLSDILRVNTEITKAPLSASMIKRYDEHHQDLTLLKALVRQQLPEKYKEIFFDQSKNGYAGYIDGGASQEEFYKFIKPILEKMDGTEELLVKLNREDLLRKQRTFDNGSIPHQIHLGELHAILRRQEDFYPFLKDNREKIEKILTFRIPYYVGPLARGNSRFAWMTRKSEETITPWNFEEVVDKGASAQSFIERMTNFDKNLPNEKVLPKHSLLYEYFTVYNELTKVKYVTEGMRKPAFLSGEQKKAIVDLLFKTNRKVTVKQLKEDYFKKIECFDSVEISGVEDRFNASLGTYHDLLKIIKDKDFLDNEENEDILEDIVLTLTLFEDREMIEERLKTYAHLFDDKVMKQLKRRRYTGWGRLSRKLINGIRDKQSGKTILDFLKSDGFANRNFMQLIHDDSLTFKEDIQKAQVSGQGDSLHEHIANLAGSPAIKKGILQTVKVVDELVKVMGRHKPENIVIEMARENQTTQKGQKNSRERMKRIEEGIKELGSQILKEHPVENTQLQNEKLYLYYLQNGRDMYVDQELDINRLSDYDVDHIVPQSFLKDDSIDNKVLTRSDKARGKSDNVPSEEVVKKMKNYWRQLLNAKLITQRKFDNLTKAERGGLSELDKAGFIKRQLVETRQITKHVAQILDSRMNTKYDENDKLIREVKVITLKSKLVSDFRKDFQFYKVREINNYHHAHDAYLNAVVGTALIKKYPKLESEFVYGDYKVYDVRKMIAKSEQEIGKATAKYFFYSNIMNFFKTEITLANGEIRKRPLIETNGETGEIVWDKGRDFATVRKVLSMPQVNIVKKTEVQTGGFSKESILPKRNSDKLIARKKDWDPKKYGGFDSPTVAYSVLVVAKVEKGKSKKLKSVKELLGITIMERSSFEKNPIDFLEAKGYKEVKKDLIIKLPKYSLFELENGRKRMLASAGELQKGNELALPSKYVNFLYLASHYEKLKGSPEDNEQKQLFVEQHKHYLDEIIEQISEFSKRVILADANLDKVLSAYNKHRDKPIREQAENIIHLFTLTNLGAPAAFKYFDTTIDRKRYTSTKEVLDATLIHQSITGLYETRIDLSQLGGDGGEAAAKGGGPAPGGTLGDQGSRGSDPLPEPRVTLTVEGIPTEFLVNTGAEHSVLTKPMGKMGSKRTVVAGATGSKVYPWTTKRLLKIGQKQVTHSFLVIPECPAPLLGRDLLTKLKAQIQFSTEGPQVTWEDRPAMCLVLNLEEEYRLHEKPVPPSIDPSWLQLFPMVWAEKAGMGLANQVPPVVVELKSDASPVAVRQYPMSKEAREGIRPHIQRFLDLGILVPCQSPWNTPLLPVKKPGTNDYRPVQDLREVNKRVQDIHPTVPNPYNLLSSLPPSHTWYSVLDLKDAFFCLKLHPNSQPLFAFEWRDPEKGNTGQLTWTRLPQGFKNSPTLFNEALHRDLASFRALNPQVVMLQYVDDLLVAAPTYRDCKEGTRRLLQELSKLGYRVSAKKAQLCREEVTYLGYLLKGGKRWLTPARKATVMKIPTPTTPRQVREFLGTAGFCRLWIPGFASLAAPLYPLTRPKVPFTWTEAHQEAFGRIKEALLSAPALALPDLTKPFALYVDEKEGVARGVLTQTLGPWRRPVAYLSKKLDPVASGWPTCLKAIAAVALLLKDADKLTLGQNVLVIAPHNLESIVRQPPDRWMTNARMTHYQSLLLNERVSFAPPAILNPATLLPVESDDTPIHICSEILAEETGTRPDLRDQPLPGVPAWYTDGSSFIMDGRRQAGAAIVDNKRTVWASNLPEGTSAQKAELIALTQALRLAEGKSINIYTDSRYAFATAHVHGAIYKQRGWLTSAGKDIKNKEEILALLEAIHLPKRVAIIHCPGHQRGTDPVATGNRKADEAAKQAAQSTRILTETTKNAGKRTADGSEFEKRTADGSEFESPKKKAKVE

SEQ ID NO: 1754 - protein, 2218 aa, synthetic construct
MPAAKRVKLDGGDKKYSIGLDIGTNSVGWAVITDEYKVPSKKFKVLGNTDRHSIKKNLIGALLFDSGETAEATRLKRTARRRYTRRKNRICYLQEIFSNEMAKVDDSFFHRLEESFLVEEDKKHERHPIFGNIVDEVAYHEKYPTIYHLRKKLVDSTDKADLRLIYLALAHMIKFRGHFLIEGDLNPDNSDVDKLFIQLVQTYNQLFEENPINASGVDAKAILSARLSKSRRLENLIAQLPGEKKNGLFGNLIALSLGLTPNFKSNFDLAEDAKLQLSKDTYDDDLDNLLAQIGDQYADLFLAAKNLSDAILLSDILRVNTEITKAPLSASMIKRYDEHHQDLTLLKALVRQQLPEKYKEIFFDQSKNGYAGYIDGGASQEEFYKFIKPILEKMDGTEELLVKLNREDLLRKQRTFDNGSIPHQIHLGELHAILRRQEDFYPFLKDNREKIEKILTFRIPYYVGPLARGNSRFAWMTRKSEETITPWNFEEVVDKGASAQSFIERMTNFDKNLPNEKVLPKHSLLYEYFTVYNELTKVKYVTEGMRKPAFLSGEQKKAIVDLLFKTNRKVTVKQLKEDYFKKIECFDSVEISGVEDRFNASLGTYHDLLKIIKDKDFLDNEENEDILEDIVLTLTLFEDREMIEERLKTYAHLFDDKVMKQLKRRRYTGWGRLSRKLINGIRDKQSGKTILDFLKSDGFANRNFMQLIHDDSLTFKEDIQKAQVSGQGDSLHEHIANLAGSPAIKKGILQTVKVVDELVKVMGRHKPENIVIEMARENQTTQKGQKNSRERMKRIEEGIKELGSQILKEHPVENTQLQNEKLYLYYLQNGRDMYVDQELDINRLSDYDVDHIVPQSFLKDDSIDNKVLTRSDKARGKSDNVPSEEVVKKMKNYWRQLLNAKLITQRKFDNLTKAERGGLSELDKAGFIKRQLVETRQITKHVAQILDSRMNTKYDENDKLIREVKVITLKSKLVSDFRKDFQFYKVREINNYHHAHDAYLNAVVGTALIKKYPKLESEFVYGDYKVYDVRKMIAKSEQEIGKATAKYFFYSNIMNFFKTEITLANGEIRKRPLIETNGETGEIVWDKGRDFATVRKVLSMPQVNIVKKTEVQTGGFSKESILPKRNSDKLIARKKDWDPKKYGGFDSPTVAYSVLVVAKVEKGKSKKLKSVKELLGITIMERSSFEKNPIDFLEAKGYKEVKKDLIIKLPKYSLFELENGRKRMLASAGELQKGNELALPSKYVNFLYLASHYEKLKGSPEDNEQKQLFVEQHKHYLDEIIEQISEFSKRVILADANLDKVLSAYNKHRDKPIREQAENIIHLFTLTNLGAPAAFKYFDTTIDRKRYTSTKEVLDATLIHQSITGLYETRIDLSQLGGDGGPAPGGSEAAAKGGTLGDQGSRGSDPLPEPRVTLTVEGIPTEFLVNTGAEHSVLTKPMGKMGSKRTVVAGATGSKVYPWTTKRLLKIGQKQVTHSFLVIPECPAPLLGRDLLTKLKAQIQFSTEGPQVTWEDRPAMCLVLNLEEEYRLHEKPVPPSIDPSWLQLFPMVWAEKAGMGLANQVPPVVVELKSDASPVAVRQYPMSKEAREGIRPHIQRFLDLGILVPCQSPWNTPLLPVKKPGTNDYRPVQDLREVNKRVQDIHPTVPNPYNLLSSLPPSHTWYSVLDLKDAFFCLKLHPNSQPLFAFEWRDPEKGNTGQLTWTRLPQGFKNSPTLFNEALHRDLASFRALNPQVVMLQYVDDLLVAAPTYRDCKEGTRRLLQELSKLGYRVSAKKAQLCREEVTYLGYLLKGGKRWLTPARKATVMKIPTPTTPRQVREFLGTAGFCRLWIPGFASLAAPLYPLTRPKVPFTWTEAHQEAFGRIKEALLSAPALALPDLTKPFALYVDEKEGVARGVLTQTLGPWRRPVAYLSKKLDPVASGWPTCLKAIAAVALLLKDADKLTLGQNVLVIAPHNLESIVRQPPDRWMTNARMTHYQSLLLNERVSFAPPAILNPATLLPVESDDTPIHICSEILAEETGTRPDLRDQPLPGVPAWYTDGSSFIMDGRRQAGAAIVDNKRTVWASNLPEGTSAQKAELIALTQALRLAEGKSINIYTDSRYAFATAHVHGAIYKQRGWLTSAGKDIKNKEEILALLEAIHLPKRVAIIHCPGHQRGTDPVATGNRKADEAAKQAAQSTRILTETTKNAGKRTADGSEFEKRTADGSEFESPKKKAKVE

SEQ ID NO: 1755 - protein, 2219 aa, synthetic construct
MPAAKRVKLDGGDKKYSIGLDIGTNSVGWAVITDEYKVPSKKFKVLGNTDRHSIKKNLIGALLFDSGETAEATRLKRTARRRYTRRKNRICYLQEIFSNEMAKVDDSFFHRLEESFLVEEDKKHERHPIFGNIVDEVAYHEKYPTIYHLRKKLVDSTDKADLRLIYLALAHMIKFRGHFLIEGDLNPDNSDVDKLFIQLVQTYNQLFEENPINASGVDAKAILSARLSKSRRLENLIAQLPGEKKNGLFGNLIALSLGLTPNFKSNFDLAEDAKLQLSKDTYDDDLDNLLAQIGDQYADLFLAAKNLSDAILLSDILRVNTEITKAPLSASMIKRYDEHHQDLTLLKALVRQQLPEKYKEIFFDQSKNGYAGYIDGGASQEEFYKFIKPILEKMDGTEELLVKLNREDLLRKQRTFDNGSIPHQIHLGELHAILRRQEDFYPFLKDNREKIEKILTFRIPYYVGPLARGNSRFAWMTRKSEETITPWNFEEVVDKGASAQSFIERMTNFDKNLPNEKVLPKHSLLYEYFTVYNELTKVKYVTEGMRKPAFLSGEQKKAIVDLLFKTNRKVTVKQLKEDYFKKIECFDSVEISGVEDRFNASLGTYHDLLKIIKDKDFLDNEENEDILEDIVLTLTLFEDREMIEERLKTYAHLFDDKVMKQLKRRRYTGWGRLSRKLINGIRDKQSGKTILDFLKSDGFANRNFMQLIHDDSLTFKEDIQKAQVSGQGDSLHEHIANLAGSPAIKKGILQTVKVVDELVKVMGRHKPENIVIEMARENQTTQKGQKNSRERMKRIEEGIKELGSQILKEHPVENTQLQNEKLYLYYLQNGRDMYVDQELDINRLSDYDVDHIVPQSFLKDDSIDNKVLTRSDKARGKSDNVPSEEVVKKMKNYWRQLLNAKLITQRKFDNLTKAERGGLSELDKAGFIKRQLVETRQITKHVAQILDSRMNTKYDENDKLIREVKVITLKSKLVSDFRKDFQFYKVREINNYHHAHDAYLNAVVGTALIKKYPKLESEFVYGDYKVYDVRKMIAKSEQEIGKATAKYFFYSNIMNFFKTEITLANGEIRKRPLIETNGETGEIVWDKGRDFATVRKVLSMPQVNIVKKTEVQTGGFSKESILPKRNSDKLIARKKDWDPKKYGGFDSPTVAYSVLVVAKVEKGKSKKLKSVKELLGITIMERSSFEKNPIDFLEAKGYKEVKKDLIIKLPKYSLFELENGRKRMLASAGELQKGNELALPSKYVNFLYLASHYEKLKGSPEDNEQKQLFVEQHKHYLDEIIEQISEFSKRVILADANLDKVLSAYNKHRDKPIREQAENIIHLFTLTNLGAPAAFKYFDTTIDRKRYTSTKEVLDATLIHQSITGLYETRIDLSQLGGDGGGGSGGSGGSGGSGGTLGDQGSRGSDPLPEPRVTLTVEGIPTEFLVNTGAEHSVLTKPMGKMGSKRTVVAGATGSKVYPWTTKRLLKIGQKQVTHSFLVIPECPAPLLGRDLLTKLKAQIQFSTEGPQVTWEDRPAMCLVLNLEEEYRLHEKPVPPSIDPSWLQLFPMVWAEKAGMGLANQVPPVVVELKSDASPVAVRQYPMSKEAREGIRPHIQRFLDLGILVPCQSPWNTPLLPVKKPGTNDYRPVQDLREVNKRVQDIHPTVPNPYNLLSSLPPSHTWYSVLDLKDAFFCLKLHPNSQPLFAFEWRDPEKGNTGQLTWTRLPQGFKNSPTLFNEALHRDLASFRALNPQVVMLQYVDDLLVAAPTYRDCKEGTRRLLQELSKLGYRVSAKKAQLCREEVTYLGYLLKGGKRWLTPARKATVMKIPTPTTPRQVREFLGTAGFCRLWIPGFASLAAPLYPLTRPKVPFTWTEAHQEAFGRIKEALLSAPALALPDLTKPFALYVDEKEGVARGVLTQTLGPWRRPVAYLSKKLDPVASGWPTCLKAIAAVALLLKDADKLTLGQNVLVIAPHNLESIVRQPPDRWMTNARMTHYQSLLLNERVSFAPPAILNPATLLPVESDDTPIHICSEILAEETGTRPDLRDQPLPGVPAWYTDGSSFIMDGRRQAGAAIVDNKRTVWASNLPEGTSAQKAELIALTQALRLAEGKSINIYTDSRYAFATAHVHGAIYKQRGWLTSAGKDIKNKEEILALLEAIHLPKRVAIIHCPGHQRGTDPVATGNRKADEAAKQAAQSTRILTETTKNAGKRTADGSEFEKRTADGSEFESPKKKAKVE

SEQ ID NO: 1756 - protein, 2218 aa, synthetic construct
MPAAKRVKLDGGDKKYSIGLDIGTNSVGWAVITDEYKVPSKKFKVLGNTDRHSIKKNLIGALLFDSGETAEATRLKRTARRRYTRRKNRICYLQEIFSNEMAKVDDSFFHRLEESFLVEEDKKHERHPIFGNIVDEVAYHEKYPTIYHLRKKLVDSTDKADLRLIYLALAHMIKFRGHFLIEGDLNPDNSDVDKLFIQLVQTYNQLFEENPINASGVDAKAILSARLSKSRRLENLIAQLPGEKKNGLFGNLIALSLGLTPNFKSNFDLAEDAKLQLSKDTYDDDLDNLLAQIGDQYADLFLAAKNLSDAILLSDILRVNTEITKAPLSASMIKRYDEHHQDLTLLKALVRQQLPEKYKEIFFDQSKNGYAGYIDGGASQEEFYKFIKPILEKMDGTEELLVKLNREDLLRKQRTFDNGSIPHQIHLGELHAILRRQEDFYPFLKDNREKIEKILTFRIPYYVGPLARGNSRFAWMTRKSEETITPWNFEEVVDKGASAQSFIERMTNFDKNLPNEKVLPKHSLLYEYFTVYNELTKVKYVTEGMRKPAFLSGEQKKAIVDLLFKTNRKVTVKQLKEDYFKKIECFDSVEISGVEDRFNASLGTYHDLLKIIKDKDFLDNEENEDILEDIVLTLTLFEDREMIEERLKTYAHLFDDKVMKQLKRRRYTGWGRLSRKLINGIRDKQSGKTILDFLKSDGFANRNFMQLIHDDSLTFKEDIQKAQVSGQGDSLHEHIANLAGSPAIKKGILQTVKVVDELVKVMGRHKPENIVIEMARENQTTQKGQKNSRERMKRIEEGIKELGSQILKEHPVENTQLQNEKLYLYYLQNGRDMYVDQELDINRLSDYDVDHIVPQSFLKDDSIDNKVLTRSDKARGKSDNVPSEEVVKKMKNYWRQLLNAKLITQRKFDNLTKAERGGLSELDKAGFIKRQLVETRQITKHVAQILDSRMNTKYDENDKLIREVKVITLKSKLVSDFRKDFQFYKVREINNYHHAHDAYLNAVVGTALIKKYPKLESEFVYGDYKVYDVRKMIAKSEQEIGKATAKYFFYSNIMNFFKTEITLANGEIRKRPLIETNGETGEIVWDKGRDFATVRKVLSMPQVNIVKKTEVQTGGFSKESILPKRNSDKLIARKKDWDPKKYGGFDSPTVAYSVLVVAKVEKGKSKKLKSVKELLGITIMERSSFEKNPIDFLEAKGYKEVKKDLIIKLPKYSLFELENGRKRMLASAGELQKGNELALPSKYVNFLYLASHYEKLKGSPEDNEQKQLFVEQHKHYLDEIIEQISEFSKRVILADANLDKVLSAYNKHRDKPIREQAENIIHLFTLTNLGAPAAFKYFDTTIDRKRYTSTKEVLDATLIHQSITGLYETRIDLSQLGGDGGEAAAKGSSGGGGGTLGDQGSRGSDPLPEPRVTLTVEGIPTEFLVNTGAEHSVLTKPMGKMGSKRTVVAGATGSKVYPWTTKRLLKIGQKQVTHSFLVIPECPAPLLGRDLLTKLKAQIQFSTEGPQVTWEDRPAMCLVLNLEEEYRLHEKPVPPSIDPSWLQLFPMVWAEKAGMGLANQVPPVVVELKSDASPVAVRQYPMSKEAREGIRPHIQRFLDLGILVPCQSPWNTPLLPVKKPGTNDYRPVQDLREVNKRVQDIHPTVPNPYNLLSSLPPSHTWYSVLDLKDAFFCLKLHPNSQPLFAFEWRDPEKGNTGQLTWTRLPQGFKNSPTLFNEALHRDLASFRALNPQVVMLQYVDDLLVAAPTYRDCKEGTRRLLQELSKLGYRVSAKKAQLCREEVTYLGYLLKGGKRWLTPARKATVMKIPTPTTPRQVREFLGTAGFCRLWIPGFASLAAPLYPLTRPKVPFTWTEAHQEAFGRIKEALLSAPALALPDLTKPFALYVDEKEGVARGVLTQTLGPWRRPVAYLSKKLDPVASGWPTCLKAIAAVALLLKDADKLTLGQNVLVIAPHNLESIVRQPPDRWMTNARMTHYQSLLLNERVSFAPPAILNPATLLPVESDDTPIHICSEILAEETGTRPDLRDQPLPGVPAWYTDGSSFIMDGRRQAGAAIVDNKRTVWASNLPEGTSAQKAELIALTQALRLAEGKSINIYTDSRYAFATAHVHGAIYKQRGWLTSAGKDIKNKEEILALLEAIHLPKRVAIIHCPGHQRGTDPVATGNRKADEAAKQAAQSTRILTETTKNAGKRTADGSEFEKRTADGSEFESPKKKAKVE

SEQ ID NO: 1757 - protein, 2216 aa, synthetic construct
MPAAKRVKLDGGDKKYSIGLDIGTNSVGWAVITDEYKVPSKKFKVLGNTDRHSIKKNLIGALLFDSGETAEATRLKRTARRRYTRRKNRICYLQEIFSNEMAKVDDSFFHRLEESFLVEEDKKHERHPIFGNIVDEVAYHEKYPTIYHLRKKLVDSTDKADLRLIYLALAHMIKFRGHFLIEGDLNPDNSDVDKLFIQLVQTYNQLFEENPINASGVDAKAILSARLSKSRRLENLIAQLPGEKKNGLFGNLIALSLGLTPNFKSNFDLAEDAKLQLSKDTYDDDLDNLLAQIGDQYADLFLAAKNLSDAILLSDILRVNTEITKAPLSASMIKRYDEHHQDLTLLKALVRQQLPEKYKEIFFDQSKNGYAGYIDGGASQEEFYKFIKPILEKMDGTEELLVKLNREDLLRKQRTFDNGSIPHQIHLGELHAILRRQEDFYPFLKDNREKIEKILTFRIPYYVGPLARGNSRFAWMTRKSEETITPWNFEEVVDKGASAQSFIERMTNFDKNLPNEKVLPKHSLLYEYFTVYNELTKVKYVTEGMRKPAFLSGEQKKAIVDLLFKTNRKVTVKQLKEDYFKKIECFDSVEISGVEDRFNASLGTYHDLLKIIKDKDFLDNEENEDILEDIVLTLTLFEDREMIEERLKTYAHLFDDKVMKQLKRRRYTGWGRLSRKLINGIRDKQSGKTILDFLKSDGFANRNFMQLIHDDSLTFKEDIQKAQVSGQGDSLHEHIANLAGSPAIKKGILQTVKVVDELVKVMGRHKPENIVIEMARENQTTQKGQKNSRERMKRIEEGIKELGSQILKEHPVENTQLQNEKLYLYYLQNGRDMYVDQELDINRLSDYDVDHIVPQSFLKDDSIDNKVLTRSDKARGKSDNVPSEEVVKKMKNYWRQLLNAKLITQRKFDNLTKAERGGLSELDKAGFIKRQLVETRQITKHVAQILDSRMNTKYDENDKLIREVKVITLKSKLVSDFRKDFQFYKVREINNYHHAHDAYLNAVVGTALIKKYPKLESEFVYGDYKVYDVRKMIAKSEQEIGKATAKYFFYSNIMNFFKTEITLANGEIRKRPLIETNGETGEIVWDKGRDFATVRKVLSMPQVNIVKKTEVQTGGFSKESILPKRNSDKLIARKKDWDPKKYGGFDSPTVAYSVLVVAKVEKGKSKKLKSVKELLGITIMERSSFEKNPIDFLEAKGYKEVKKDLIIKLPKYSLFELENGRKRMLASAGELQKGNELALPSKYVNFLYLASHYEKLKGSPEDNEQKQLFVEQHKHYLDEIIEQISEFSKRVILADANLDKVLSAYNKHRDKPIREQAENIIHLFTLTNLGAPAAFKYFDTTIDRKRYTSTKEVLDATLIHQSITGLYETRIDLSQLGGDGGGGSPAPGSSGGTLGDQGSRGSDPLPEPRVTLTVEGIPTEFLVNTGAEHSVLTKPMGKMGSKRTVVAGATGSKVYPWTTKRLLKIGQKQVTHSFLVIPECPAPLLGRDLLTKLKAQIQFSTEGPQVTWEDRPAMCLVLNLEEEYRLHEKPVPPSIDPSWLQLFPMVWAEKAGMGLANQVPPVVVELKSDASPVAVRQYPMSKEAREGIRPHIQRFLDLGILVPCQSPWNTPLLPVKKPGTNDYRPVQDLREVNKRVQDIHPTVPNPYNLLSSLPPSHTWYSVLDLKDAFFCLKLHPNSQPLFAFEWRDPEKGNTGQLTWTRLPQGFKNSPTLFNEALHRDLASFRALNPQVVMLQYVDDLLVAAPTYRDCKEGTRRLLQELSKLGYRVSAKKAQLCREEVTYLGYLLKGGKRWLTPARKATVMKIPTPTTPRQVREFLGTAGFCRLWIPGFASLAAPLYPLTRPKVPFTWTEAHQEAFGRIKEALLSAPALALPDLTKPFALYVDEKEGVARGVLTQTLGPWRRPVAYLSKKLDPVASGWPTCLKAIAAVALLLKDADKLTLGQNVLVIAPHNLESIVRQPPDRWMTNARMTHYQSLLLNERVSFAPPAILNPATLLPVESDDTPIHICSEILAEETGTRPDLRDQPLPGVPAWYTDGSSFIMDGRRQAGAAIVDNKRTVWASNLPEGTSAQKAELIALTQALRLAEGKSINIYTDSRYAFATAHVHGAIYKQRGWLTSAGKDIKNKEEILALLEAIHLPKRVAIIHCPGHQRGTDPVATGNRKADEAAKQAAQSTRILTETTKNAGKRTADGSEFEKRTADGSEFESPKKKAKVE

SEQ ID NO: 1758 - protein, 2222 aa, synthetic construct
MPAAKRVKLDGGDKKYSIGLDIGTNSVGWAVITDEYKVPSKKFKVLGNTDRHSIKKNLIGALLFDSGETAEATRLKRTARRRYTRRKNRICYLQEIFSNEMAKVDDSFFHRLEESFLVEEDKKHERHPIFGNIVDEVAYHEKYPTIYHLRKKLVDSTDKADLRLIYLALAHMIKFRGHFLIEGDLNPDNSDVDKLFIQLVQTYNQLFEENPINASGVDAKAILSARLSKSRRLENLIAQLPGEKKNGLFGNLIALSLGLTPNFKSNFDLAEDAKLQLSKDTYDDDLDNLLAQIGDQYADLFLAAKNLSDAILLSDILRVNTEITKAPLSASMIKRYDEHHQDLTLLKALVRQQLPEKYKEIFFDQSKNGYAGYIDGGASQEEFYKFIKPILEKMDGTEELLVKLNREDLLRKQRTFDNGSIPHQIHLGELHAILRRQEDFYPFLKDNREKIEKILTFRIPYYVGPLARGNSRFAWMTRKSEETITPWNFEEVVDKGASAQSFIERMTNFDKNLPNEKVLPKHSLLYEYFTVYNELTKVKYVTEGMRKPAFLSGEQKKAIVDLLFKTNRKVTVKQLKEDYFKKIECFDSVEISGVEDRFNASLGTYHDLLKIIKDKDFLDNEENEDILEDIVLTLTLFEDREMIEERLKTYAHLFDDKVMKQLKRRRYTGWGRLSRKLINGIRDKQSGKTILDFLKSDGFANRNFMQLIHDDSLTFKEDIQKAQVSGQGDSLHEHIANLAGSPAIKKGILQTVKVVDELVKVMGRHKPENIVIEMARENQTTQKGQKNSRERMKRIEEGIKELGSQILKEHPVENTQLQNEKLYLYYLQNGRDMYVDQELDINRLSDYDVDHIVPQSFLKDDSIDNKVLTRSDKARGKSDNVPSEEVVKKMKNYWRQLLNAKLITQRKFDNLTKAERGGLSELDKAGFIKRQLVETRQITKHVAQILDSRMNTKYDENDKLIREVKVITLKSKLVSDFRKDFQFYKVREINNYHHAHDAYLNAVVGTALIKKYPKLESEFVYGDYKVYDVRKMIAKSEQEIGKATAKYFFYSNIMNFFKTEITLANGEIRKRPLIETNGETGEIVWDKGRDFATVRKVLSMPQVNIVKKTEVQTGGFSKESILPKRNSDKLIARKKDWDPKKYGGFDSPTVAYSVLVVAKVEKGKSKKLKSVKELLGITIMERSSFEKNPIDFLEAKGYKEVKKDLIIKLPKYSLFELENGRKRMLASAGELQKGNELALPSKYVNFLYLASHYEKLKGSPEDNEQKQLFVEQHKHYLDEIIEQISEFSKRVILADANLDKVLSAYNKHRDKPIREQAENIIHLFTLTNLGAPAAFKYFDTTIDRKRYTSTKEVLDATLIHQSITGLYETRIDLSQLGGDGGGGGGSGGGGSGGGGSGGTLGDQGSRGSDPLPEPRVTLTVEGIPTEFLVNTGAEHSVLTKPMGKMGSKRTVVAGATGSKVYPWTTKRLLKIGQKQVTHSFLVIPECPAPLLGRDLLTKLKAQIQFSTEGPQVTWEDRPAMCLVLNLEEEYRLHEKPVPPSIDPSWLQLFPMVWAEKAGMGLANQVPPVVVELKSDASPVAVRQYPMSKEAREGIRPHIQRFLDLGILVPCQSPWNTPLLPVKKPGTNDYRPVQDLREVNKRVQDIHPTVPNPYNLLSSLPPSHTWYSVLDLKDAFFCLKLHPNSQPLFAFEWRDPEKGNTGQLTWTRLPQGFKNSPTLFNEALHRDLASFRALNPQVVMLQYVDDLLVAAPTYRDCKEGTRRLLQELSKLGYRVSAKKAQLCREEVTYLGYLLKGGKRWLTPARKATVMKIPTPTTPRQVREFLGTAGFCRLWIPGFASLAAPLYPLTRPKVPFTWTEAHQEAFGRIKEALLSAPALALPDLTKPFALYVDEKEGVARGVLTQTLGPWRRPVAYLSKKLDPVASGWPTCLKAIAAVALLLKDADKLTLGQNVLVIAPHNLESIVRQPPDRWMTNARMTHYQSLLLNERVSFAPPAILNPATLLPVESDDTPIHICSEILAEETGTRPDLRDQPLPGVPAWYTDGSSFIMDGRRQAGAAIVDNKRTVWASNLPEGTSAQKAELIALTQALRLAEGKSINIYTDSRYAFATAHVHGAIYKQRGWLTSAGKDIKNKEEILALLEAIHLPKRVAIIHCPGHQRGTDPVATGNRKADEAAKQAAQSTRILTETTKNAGKRTADGSEFEKRTADGSEFESPKKKAKVE

SEQ ID NO: 1759 - protein, 2218 aa, synthetic construct
MPAAKRVKLDGGDKKYSIGLDIGTNSVGWAVITDEYKVPSKKFKVLGNTDRHSIKKNLIGALLFDSGETAEATRLKRTARRRYTRRKNRICYLQEIFSNEMAKVDDSFFHRLEESFLVEEDKKHERHPIFGNIVDEVAYHEKYPTIYHLRKKLVDSTDKADLRLIYLALAHMIKFRGHFLIEGDLNPDNSDVDKLFIQLVQTYNQLFEENPINASGVDAKAILSARLSKSRRLENLIAQLPGEKKNGLFGNLIALSLGLTPNFKSNFDLAEDAKLQLSKDTYDDDLDNLLAQIGDQYADLFLAAKNLSDAILLSDILRVNTEITKAPLSASMIKRYDEHHQDLTLLKALVRQQLPEKYKEIFFDQSKNGYAGYIDGGASQEEFYKFIKPILEKMDGTEELLVKLNREDLLRKQRTFDNGSIPHQIHLGELHAILRRQEDFYPFLKDNREKIEKILTFRIPYYVGPLARGNSRFAWMTRKSEETITPWNFEEVVDKGASAQSFIERMTNFDKNLPNEKVLPKHSLLYEYFTVYNELTKVKYVTEGMRKPAFLSGEQKKAIVDLLFKTNRKVTVKQLKEDYFKKIECFDSVEISGVEDRFNASLGTYHDLLKIIKDKDFLDNEENEDILEDIVLTLTLFEDREMIEERLKTYAHLFDDKVMKQLKRRRYTGWGRLSRKLINGIRDKQSGKTILDFLKSDGFANRNFMQLIHDDSLTFKEDIQKAQVSGQGDSLHEHIANLAGSPAIKKGILQTVKVVDELVKVMGRHKPENIVIEMARENQTTQKGQKNSRERMKRIEEGIKELGSQILKEHPVENTQLQNEKLYLYYLQNGRDMYVDQELDINRLSDYDVDHIVPQSFLKDDSIDNKVLTRSDKARGKSDNVPSEEVVKKMKNYWRQLLNAKLITQRKFDNLTKAERGGLSELDKAGFIKRQLVETRQITKHVAQILDSRMNTKYDENDKLIREVKVITLKSKLVSDFRKDFQFYKVREINNYHHAHDAYLNAVVGTALIKKYPKLESEFVYGDYKVYDVRKMIAKSEQEIGKATAKYFFYSNIMNFFKTEITLANGEIRKRPLIETNGETGEIVWDKGRDFATVRKVLSMPQVNIVKKTEVQTGGFSKESILPKRNSDKLIARKKDWDPKKYGGFDSPTVAYSVLVVAKVEKGKSKKLKSVKELLGITIMERSSFEKNPIDFLEAKGYKEVKKDLIIKLPKYSLFELENGRKRMLASAGELQKGNELALPSKYVNFLYLASHYEKLKGSPEDNEQKQLFVEQHKHYLDEIIEQISEFSKRVILADANLDKVLSAYNKHRDKPIREQAENIIHLFTLTNLGAPAAFKYFDTTIDRKRYTSTKEVLDATLIHQSITGLYETRIDLSQLGGDGGGSSGGGEAAAKGGTLGDQGSRGSDPLPEPRVTLTVEGIPTEFLVNTGAEHSVLTKPMGKMGSKRTVVAGATGSKVYPWTTKRLLKIGQKQVTHSFLVIPECPAPLLGRDLLTKLKAQIQFSTEGPQVTWEDRPAMCLVLNLEEEYRLHEKPVPPSIDPSWLQLFPMVWAEKAGMGLANQVPPVVVELKSDASPVAVRQYPMSKEAREGIRPHIQRFLDLGILVPCQSPWNTPLLPVKKPGTNDYRPVQDLREVNKRVQDIHPTVPNPYNLLSSLPPSHTWYSVLDLKDAFFCLKLHPNSQPLFAFEWRDPEKGNTGQLTWTRLPQGFKNSPTLFNEALHRDLASFRALNPQVVMLQYVDDLLVAAPTYRDCKEGTRRLLQELSKLGYRVSAKKAQLCREEVTYLGYLLKGGKRWLTPARKATVMKIPTPTTPRQVREFLGTAGFCRLWIPGFASLAAPLYPLTRPKVPFTWTEAHQEAFGRIKEALLSAPALALPDLTKPFALYVDEKEGVARGVLTQTLGPWRRPVAYLSKKLDPVASGWPTCLKAIAAVALLLKDADKLTLGQNVLVIAPHNLESIVRQPPDRWMTNARMTHYQSLLLNERVSFAPPAILNPATLLPVESDDTPIHICSEILAEETGTRPDLRDQPLPGVPAWYTDGSSFIMDGRRQAGAAIVDNKRTVWASNLPEGTSAQKAELIALTQALRLAEGKSINIYTDSRYAFATAHVHGAIYKQRGWLTSAGKDIKNKEEILALLEAIHLPKRVAIIHCPGHQRGTDPVATGNRKADEAAKQAAQSTRILTETTKNAGKRTADGSEFEKRTADGSEFESPKKKAKVE

SEQ ID NO: 1760 - protein, 2215 aa, synthetic construct
MPAAKRVKLDGGDKKYSIGLDIGTNSVGWAVITDEYKVPSKKFKVLGNTDRHSIKKNLIGALLFDSGETAEATRLKRTARRRYTRRKNRICYLQEIFSNEMAKVDDSFFHRLEESFLVEEDKKHERHPIFGNIVDEVAYHEKYPTIYHLRKKLVDSTDKADLRLIYLALAHMIKFRGHFLIEGDLNPDNSDVDKLFIQLVQTYNQLFEENPINASGVDAKAILSARLSKSRRLENLIAQLPGEKKNGLFGNLIALSLGLTPNFKSNFDLAEDAKLQLSKDTYDDDLDNLLAQIGDQYADLFLAAKNLSDAILLSDILRVNTEITKAPLSASMIKRYDEHHQDLTLLKALVRQQLPEKYKEIFFDQSKNGYAGYIDGGASQEEFYKFIKPILEKMDGTEELLVKLNREDLLRKQRTFDNGSIPHQIHLGELHAILRRQEDFYPFLKDNREKIEKILTFRIPYYVGPLARGNSRFAWMTRKSEETITPWNFEEVVDKGASAQSFIERMTNFDKNLPNEKVLPKHSLLYEYFTVYNELTKVKYVTEGMRKPAFLSGEQKKAIVDLLFKTNRKVTVKQLKEDYFKKIECFDSVEISGVEDRFNASLGTYHDLLKIIKDKDFLDNEENEDILEDIVLTLTLFEDREMIEERLKTYAHLFDDKVMKQLKRRRYTGWGRLSRKLINGIRDKQSGKTILDFLKSDGFANRNFMQLIHDDSLTFKEDIQKAQVSGQGDSLHEHIANLAGSPAIKKGILQTVKVVDELVKVMGRHKPENIVIEMARENQTTQKGQKNSRERMKRIEEGIKELGSQILKEHPVENTQLQNEKLYLYYLQNGRDMYVDQELDINRLSDYDVDHIVPQSFLKDDSIDNKVLTRSDKARGKSDNVPSEEVVKKMKNYWRQLLNAKLITQRKFDNLTKAERGGLSELDKAGFIKRQLVETRQITKHVAQILDSRMNTKYDENDKLIREVKVITLKSKLVSDFRKDFQFYKVREINNYHHAHDAYLNAVVGTALIKKYPKLESEFVYGDYKVYDVRKMIAKSEQEIGKATAKYFFYSNIMNFFKTEITLANGEIRKRPLIETNGETGEIVWDKGRDFATVRKVLSMPQVNIVKKTEVQTGGFSKESILPKRNSDKLIARKKDWDPKKYGGFDSPTVAYSVLVVAKVEKGKSKKLKSVKELLGITIMERSSFEKNPIDFLEAKGYKEVKKDLIIKLPKYSLFELENGRKRMLASAGELQKGNELALPSKYVNFLYLASHYEKLKGSPEDNEQKQLFVEQHKHYLDEIIEQISEFSKRVILADANLDKVLSAYNKHRDKPIREQAENIIHLFTLTNLGAPAAFKYFDTTIDRKRYTSTKEVLDATLIHQSITGLYETRIDLSQLGGDGGEAAAKGGGGGTLGDQGSRGSDPLPEPRVTLTVEGIPTEFLVNTGAEHSVLTKPMGKMGSKRTVVAGATGSKVYPWTTKRLLKIGQKQVTHSFLVIPECPAPLLGRDLLTKLKAQIQFSTEGPQVTWEDRPAMCLVLNLEEEYRLHEKPVPPSIDPSWLQLFPMVWAEKAGMGLANQVPPVVVELKSDASPVAVRQYPMSKEAREGIRPHIQRFLDLGILVPCQSPWNTPLLPVKKPGTNDYRPVQDLREVNKRVQDIHPTVPNPYNLLSSLPPSHTWYSVLDLKDAFFCLKLHPNSQPLFAFEWRDPEKGNTGQLTWTRLPQGFKNSPTLFNEALHRDLASFRALNPQVVMLQYVDDLLVAAPTYRDCKEGTRRLLQELSKLGYRVSAKKAQLCREEVTYLGYLLKGGKRWLTPARKATVMKIPTPTTPRQVREFLGTAGFCRLWIPGFASLAAPLYPLTRPKVPFTWTEAHQEAFGRIKEALLSAPALALPDLTKPFALYVDEKEGVARGVLTQTLGPWRRPVAYLSKKLDPVASGWPTCLKAIAAVALLLKDADKLTLGQNVLVIAPHNLESIVRQPPDRWMTNARMTHYQSLLLNERVSFAPPAILNPATLLPVESDDTPIHICSEILAEETGTRPDLRDQPLPGVPAWYTDGSSFIMDGRRQAGAAIVDNKRTVWASNLPEGTSAQKAELIALTQALRLAEGKSINIYTDSRYAFATAHVHGAIYKQRGWLTSAGKDIKNKEEILALLEAIHLPKRVAIIHCPGHQRGTDPVATGNRKADEAAKQAAQSTRILTETTKNAGKRTADGSEFEKRTADGSEFESPKKKAKVE

SEQ ID NO: 1761 - protein, 2213 aa, synthetic construct
MPAAKRVKLDGGDKKYSIGLDIGTNSVGWAVITDEYKVPSKKFKVLGNTDRHSIKKNLIGALLFDSGETAEATRLKRTARRRYTRRKNRICYLQEIFSNEMAKVDDSFFHRLEESFLVEEDKKHERHPIFGNIVDEVAYHEKYPTIYHLRKKLVDSTDKADLRLIYLALAHMIKFRGHFLIEGDLNPDNSDVDKLFIQLVQTYNQLFEENPINASGVDAKAILSARLSKSRRLENLIAQLPGEKKNGLFGNLIALSLGLTPNFKSNFDLAEDAKLQLSKDTYDDDLDNLLAQIGDQYADLFLAAKNLSDAILLSDILRVNTEITKAPLSASMIKRYDEHHQDLTLLKALVRQQLPEKYKEIFFDQSKNGYAGYIDGGASQEEFYKFIKPILEKMDGTEELLVKLNREDLLRKQRTFDNGSIPHQIHLGELHAILRRQEDFYPFLKDNREKIEKILTFRIPYYVGPLARGNSRFAWMTRKSEETITPWNFEEVVDKGASAQSFIERMTNFDKNLPNEKVLPKHSLLYEYFTVYNELTKVKYVTEGMRKPAFLSGEQKKAIVDLLFKTNRKVTVKQLKEDYFKKIECFDSVEISGVEDRFNASLGTYHDLLKIIKDKDFLDNEENEDILEDIVLTLTLFEDREMIEERLKTYAHLFDDKVMKQLKRRRYTGWGRLSRKLINGIRDKQSGKTILDFLKSDGFANRNFMQLIHDDSLTFKEDIQKAQVSGQGDSLHEHIANLAGSPAIKKGILQTVKVVDELVKVMGRHKPENIVIEMARENQTTQKGQKNSRERMKRIEEGIKELGSQILKEHPVENTQLQNEKLYLYYLQNGRDMYVDQELDINRLSDYDVDHIVPQSFLKDDSIDNKVLTRSDKARGKSDNVPSEEVVKKMKNYWRQLLNAKLITQRKFDNLTKAERGGLSELDKAGFIKRQLVETRQITKHVAQILDSRMNTKYDENDKLIREVKVITLKSKLVSDFRKDFQFYKVREINNYHHAHDAYLNAVVGTALIKKYPKLESEFVYGDYKVYDVRKMIAKSEQEIGKATAKYFFYSNIMNFFKTEITLANGEIRKRPLIETNGETGEIVWDKGRDFATVRKVLSMPQVNIVKKTEVQTGGFSKESILPKRNSDKLIARKKDWDPKKYGGFDSPTVAYSVLVVAKVEKGKSKKLKSVKELLGITIMERSSFEKNPIDFLEAKGYKEVKKDLIIKLPKYSLFELENGRKRMLASAGELQKGNELALPSKYVNFLYLASHYEKLKGSPEDNEQKQLFVEQHKHYLDEIIEQISEFSKRVILADANLDKVLSAYNKHRDKPIREQAENIIHLFTLTNLGAPAAFKYFDTTIDRKRYTSTKEVLDATLIHQSITGLYETRIDLSQLGGDGGGGSGGGGGTLGDQGSRGSDPLPEPRVTLTVEGIPTEFLVNTGAEHSVLTKPMGKMGSKRTVVAGATGSKVYPWTTKRLLKIGQKQVTHSFLVIPECPAPLLGRDLLTKLKAQIQFSTEGPQVTWEDRPAMCLVLNLEEEYRLHEKPVPPSIDPSWLQLFPMVWAEKAGMGLANQVPPVVVELKSDASPVAVRQYPMSKEAREGIRPHIQRFLDLGILVPCQSPWNTPLLPVKKPGTNDYRPVQDLREVNKRVQDIHPTVPNPYNLLSSLPPSHTWYSVLDLKDAFFCLKLHPNSQPLFAFEWRDPEKGNTGQLTWTRLPQGFKNSPTLFNEALHRDLASFRALNPQVVMLQYVDDLLVAAPTYRDCKEGTRRLLQELSKLGYRVSAKKAQLCREEVTYLGYLLKGGKRWLTPARKATVMKIPTPTTPRQVREFLGTAGFCRLWIPGFASLAAPLYPLTRPKVPFTWTEAHQEAFGRIKEALLSAPALALPDLTKPFALYVDEKEGVARGVLTQTLGPWRRPVAYLSKKLDPVASGWPTCLKAIAAVALLLKDADKLTLGQNVLVIAPHNLESIVRQPPDRWMTNARMTHYQSLLLNERVSFAPPAILNPATLLPVESDDTPIHICSEILAEETGTRPDLRDQPLPGVPAWYTDGSSFIMDGRRQAGAAIVDNKRTVWASNLPEGTSAQKAELIALTQALRLAEGKSINIYTDSRYAFATAHVHGAIYKQRGWLTSAGKDIKNKEEILALLEAIHLPKRVAIIHCPGHQRGTDPVATGNRKADEAAKQAAQSTRILTETTKNAGKRTADGSEFEKRTADGSEFESPKKKAKVE

SEQ ID NO: 1762 - protein, 2218 aa, synthetic construct
MPAAKRVKLDGGDKKYSIGLDIGTNSVGWAVITDEYKVPSKKFKVLGNTDRHSIKKNLIGALLFDSGETAEATRLKRTARRRYTRRKNRICYLQEIFSNEMAKVDDSFFHRLEESFLVEEDKKHERHPIFGNIVDEVAYHEKYPTIYHLRKKLVDSTDKADLRLIYLALAHMIKFRGHFLIEGDLNPDNSDVDKLFIQLVQTYNQLFEENPINASGVDAKAILSARLSKSRRLENLIAQLPGEKKNGLFGNLIALSLGLTPNFKSNFDLAEDAKLQLSKDTYDDDLDNLLAQIGDQYADLFLAAKNLSDAILLSDILRVNTEITKAPLSASMIKRYDEHHQDLTLLKALVRQQLPEKYKEIFFDQSKNGYAGYIDGGASQEEFYKFIKPILEKMDGTEELLVKLNREDLLRKQRTFDNGSIPHQIHLGELHAILRRQEDFYPFLKDNREKIEKILTFRIPYYVGPLARGNSRFAWMTRKSEETITPWNFEEVVDKGASAQSFIERMTNFDKNLPNEKVLPKHSLLYEYFTVYNELTKVKYVTEGMRKPAFLSGEQKKAIVDLLFKTNRKVTVKQLKEDYFKKIECFDSVEISGVEDRFNASLGTYHDLLKIIKDKDFLDNEENEDILEDIVLTLTLFEDREMIEERLKTYAHLFDDKVMKQLKRRRYTGWGRLSRKLINGIRDKQSGKTILDFLKSDGFANRNFMQLIHDDSLTFKEDIQKAQVSGQGDSLHEHIANLAGSPAIKKGILQTVKVVDELVKVMGRHKPENIVIEMARENQTTQKGQKNSRERMKRIEEGIKELGSQILKEHPVENTQLQNEKLYLYYLQNGRDMYVDQELDINRLSDYDVDHIVPQSFLKDDSIDNKVLTRSDKARGKSDNVPSEEVVKKMKNYWRQLLNAKLITQRKFDNLTKAERGGLSELDKAGFIKRQLVETRQITKHVAQILDSRMNTKYDENDKLIREVKVITLKSKLVSDFRKDFQFYKVREINNYHHAHDAYLNAVVGTALIKKYPKLESEFVYGDYKVYDVRKMIAKSEQEIGKATAKYFFYSNIMNFFKTEITLANGEIRKRPLIETNGETGEIVWDKGRDFATVRKVLSMPQVNIVKKTEVQTGGFSKESILPKRNSDKLIARKKDWDPKKYGGFDSPTVAYSVLVVAKVEKGKSKKLKSVKELLGITIMERSSFEKNPIDFLEAKGYKEVKKDLIIKLPKYSLFELENGRKRMLASAGELQKGNELALPSKYVNFLYLASHYEKLKGSPEDNEQKQLFVEQHKHYLDEIIEQISEFSKRVILADANLDKVLSAYNKHRDKPIREQAENIIHLFTLTNLGAPAAFKYFDTTIDRKRYTSTKEVLDATLIHQSITGLYETRIDLSQLGGDGGPAPEAAAKGSSGGTLGDQGSRGSDPLPEPRVTLTVEGIPTEFLVNTGAEHSVLTKPMGKMGSKRTVVAGATGSKVYPWTTKRLLKIGQKQVTHSFLVIPECPAPLLGRDLLTKLKAQIQFSTEGPQVTWEDRPAMCLVLNLEEEYRLHEKPVPPSIDPSWLQLFPMVWAEKAGMGLANQVPPVVVELKSDASPVAVRQYPMSKEAREGIRPHIQRFLDLGILVPCQSPWNTPLLPVKKPGTNDYRPVQDLREVNKRVQDIHPTVPNPYNLLSSLPPSHTWYSVLDLKDAFFCLKLHPNSQPLFAFEWRDPEKGNTGQLTWTRLPQGFKNSPTLFNEALHRDLASFRALNPQVVMLQYVDDLLVAAPTYRDCKEGTRRLLQELSKLGYRVSAKKAQLCREEVTYLGYLLKGGKRWLTPARKATVMKIPTPTTPRQVREFLGTAGFCRLWIPGFASLAAPLYPLTRPKVPFTWTEAHQEAFGRIKEALLSAPALALPDLTKPFALYVDEKEGVARGVLTQTLGPWRRPVAYLSKKLDPVASGWPTCLKAIAAVALLLKDADKLTLGQNVLVIAPHNLESIVRQPPDRWMTNARMTHYQSLLLNERVSFAPPAILNPATLLPVESDDTPIHICSEILAEETGTRPDLRDQPLPGVPAWYTDGSSFIMDGRRQAGAAIVDNKRTVWASNLPEGTSAQKAELIALTQALRLAEGKSINIYTDSRYAFATAHVHGAIYKQRGWLTSAGKDIKNKEEILALLEAIHLPKRVAIIHCPGHQRGTDPVATGNRKADEAAKQAAQSTRILTETTKNAGKRTADGSEFEKRTADGSEFESPKKKAKVE

SEQ ID NO: 1763 - protein, 2215 aa, synthetic construct
MPAAKRVKLDGGDKKYSIGLDIGTNSVGWAVITDEYKVPSKKFKVLGNTDRHSIKKNLIGALLFDSGETAEATRLKRTARRRYTRRKNRICYLQEIFSNEMAKVDDSFFHRLEESFLVEEDKKHERHPIFGNIVDEVAYHEKYPTIYHLRKKLVDSTDKADLRLIYLALAHMIKFRGHFLIEGDLNPDNSDVDKLFIQLVQTYNQLFEENPINASGVDAKAILSARLSKSRRLENLIAQLPGEKKNGLFGNLIALSLGLTPNFKSNFDLAEDAKLQLSKDTYDDDLDNLLAQIGDQYADLFLAAKNLSDAILLSDILRVNTEITKAPLSASMIKRYDEHHQDLTLLKALVRQQLPEKYKEIFFDQSKNGYAGYIDGGASQEEFYKFIKPILEKMDGTEELLVKLNREDLLRKQRTFDNGSIPHQIHLGELHAILRRQEDFYPFLKDNREKIEKILTFRIPYYVGPLARGNSRFAWMTRKSEETITPWNFEEVVDKGASAQSFIERMTNFDKNLPNEKVLPKHSLLYEYFTVYNELTKVKYVTEGMRKPAFLSGEQKKAIVDLLFKTNRKVTVKQLKEDYFKKIECFDSVEISGVEDRFNASLGTYHDLLKIIKDKDFLDNEENEDILEDIVLTLTLFEDREMIEERLKTYAHLFDDKVMKQLKRRRYTGWGRLSRKLINGIRDKQSGKTILDFLKSDGFANRNFMQLIHDDSLTFKEDIQKAQVSGQGDSLHEHIANLAGSPAIKKGILQTVKVVDELVKVMGRHKPENIVIEMARENQTTQKGQKNSRERMKRIEEGIKELGSQILKEHPVENTQLQNEKLYLYYLQNGRDMYVDQELDINRLSDYDVDHIVPQSFLKDDSIDNKVLTRSDKARGKSDNVPSEEVVKKMKNYWRQLLNAKLITQRKFDNLTKAERGGLSELDKAGFIKRQLVETRQITKHVAQILDSRMNTKYDENDKLIREVKVITLKSKLVSDFRKDFQFYKVREINNYHHAHDAYLNAVVGTALIKKYPKLESEFVYGDYKVYDVRKMIAKSEQEIGKATAKYFFYSNIMNFFKTEITLANGEIRKRPLIETNGETGEIVWDKGRDFATVRKVLSMPQVNIVKKTEVQTGGFSKESILPKRNSDKLIARKKDWDPKKYGGFDSPTVAYSVLVVAKVEKGKSKKLKSVKELLGITIMERSSFEKNPIDFLEAKGYKEVKKDLIIKLPKYSLFELENGRKRMLASAGELQKGNELALPSKYVNFLYLASHYEKLKGSPEDNEQKQLFVEQHKHYLDEIIEQISEFSKRVILADANLDKVLSAYNKHRDKPIREQAENIIHLFTLTNLGAPAAFKYFDTTIDRKRYTSTKEVLDATLIHQSITGLYETRIDLSQLGGDGGEAAAKGGSGGTLGDQGSRGSDPLPEPRVTLTVEGIPTEFLVNTGAEHSVLTKPMGKMGSKRTVVAGATGSKVYPWTTKRLLKIGQKQVTHSFLVIPECPAPLLGRDLLTKLKAQIQFSTEGPQVTWEDRPAMCLVLNLEEEYRLHEKPVPPSIDPSWLQLFPMVWAEKAGMGLANQVPPVVVELKSDASPVAVRQYPMSKEAREGIRPHIQRFLDLGILVPCQSPWNTPLLPVKKPGTNDYRPVQDLREVNKRVQDIHPTVPNPYNLLSSLPPSHTWYSVLDLKDAFFCLKLHPNSQPLFAFEWRDPEKGNTGQLTWTRLPQGFKNSPTLFNEALHRDLASFRALNPQVVMLQYVDDLLVAAPTYRDCKEGTRRLLQELSKLGYRVSAKKAQLCREEVTYLGYLLKGGKRWLTPARKATVMKIPTPTTPRQVREFLGTAGFCRLWIPGFASLAAPLYPLTRPKVPFTWTEAHQEAFGRIKEALLSAPALALPDLTKPFALYVDEKEGVARGVLTQTLGPWRRPVAYLSKKLDPVASGWPTCLKAIAAVALLLKDADKLTLGQNVLVIAPHNLESIVRQPPDRWMTNARMTHYQSLLLNERVSFAPPAILNPATLLPVESDDTPIHICSEILAEETGTRPDLRDQPLPGVPAWYTDGSSFIMDGRRQAGAAIVDNKRTVWASNLPEGTSAQKAELIALTQALRLAEGKSINIYTDSRYAFATAHVHGAIYKQRGWLTSAGKDIKNKEEILALLEAIHLPKRVAIIHCPGHQRGTDPVATGNRKADEAAKQAAQSTRILTETTKNAGKRTADGSEFEKRTADGSEFESPKKKAKVE

SEQ ID NO: 1764 - protein, 2216 aa, synthetic construct
MPAAKRVKLDGGDKKYSIGLDIGTNSVGWAVITDEYKVPSKKFKVLGNTDRHSIKKNLIGALLFDSGETAEATRLKRTARRRYTRRKNRICYLQEIFSNEMAKVDDSFFHRLEESFLVEEDKKHERHPIFGNIVDEVAYHEKYPTIYHLRKKLVDSTDKADLRLIYLALAHMIKFRGHFLIEGDLNPDNSDVDKLFIQLVQTYNQLFEENPINASGVDAKAILSARLSKSRRLENLIAQLPGEKKNGLFGNLIALSLGLTPNFKSNFDLAEDAKLQLSKDTYDDDLDNLLAQIGDQYADLFLAAKNLSDAILLSDILRVNTEITKAPLSASMIKRYDEHHQDLTLLKALVRQQLPEKYKEIFFDQSKNGYAGYIDGGASQEEFYKFIKPILEKMDGTEELLVKLNREDLLRKQRTFDNGSIPHQIHLGELHAILRRQEDFYPFLKDNREKIEKILTFRIPYYVGPLARGNSRFAWMTRKSEETITPWNFEEVVDKGASAQSFIERMTNFDKNLPNEKVLPKHSLLYEYFTVYNELTKVKYVTEGMRKPAFLSGEQKKAIVDLLFKTNRKVTVKQLKEDYFKKIECFDSVEISGVEDRFNASLGTYHDLLKIIKDKDFLDNEENEDILEDIVLTLTLFEDREMIEERLKTYAHLFDDKVMKQLKRRRYTGWGRLSRKLINGIRDKQSGKTILDFLKSDGFANRNFMQLIHDDSLTFKEDIQKAQVSGQGDSLHEHIANLAGSPAIKKGILQTVKVVDELVKVMGRHKPENIVIEMARENQTTQKGQKNSRERMKRIEEGIKELGSQILKEHPVENTQLQNEKLYLYYLQNGRDMYVDQELDINRLSDYDVDHIVPQSFLKDDSIDNKVLTRSDKARGKSDNVPSEEVVKKMKNYWRQLLNAKLITQRKFDNLTKAERGGLSELDKAGFIKRQLVETRQITKHVAQILDSRMNTKYDENDKLIREVKVITLKSKLVSDFRKDFQFYKVREINNYHHAHDAYLNAVVGTALIKKYPKLESEFVYGDYKVYDVRKMIAKSEQEIGKATAKYFFYSNIMNFFKTEITLANGEIRKRPLIETNGETGEIVWDKGRDFATVRKVLSMPQVNIVKKTEVQTGGFSKESILPKRNSDKLIARKKDWDPKKYGGFDSPTVAYSVLVVAKVEKGKSKKLKSVKELLGITIMERSSFEKNPIDFLEAKGYKEVKKDLIIKLPKYSLFELENGRKRMLASAGELQKGNELALPSKYVNFLYLASHYEKLKGSPEDNEQKQLFVEQHKHYLDEIIEQISEFSKRVILADANLDKVLSAYNKHRDKPIREQAENIIHLFTLTNLGAPAAFKYFDTTIDRKRYTSTKEVLDATLIHQSITGLYETRIDLSQLGGDGGGGGGSSGGSGGTLGDQGSRGSDPLPEPRVTLTVEGIPTEFLVNTGAEHSVLTKPMGKMGSKRTVVAGATGSKVYPWTTKRLLKIGQKQVTHSFLVIPECPAPLLGRDLLTKLKAQIQFSTEGPQVTWEDRPAMCLVLNLEEEYRLHEKPVPPSIDPSWLQLFPMVWAEKAGMGLANQVPPVVVELKSDASPVAVRQYPMSKEAREGIRPHIQRFLDLGILVPCQSPWNTPLLPVKKPGTNDYRPVQDLREVNKRVQDIHPTVPNPYNLLSSLPPSHTWYSVLDLKDAFFCLKLHPNSQPLFAFEWRDPEKGNTGQLTWTRLPQGFKNSPTLFNEALHRDLASFRALNPQVVMLQYVDDLLVAAPTYRDCKEGTRRLLQELSKLGYRVSAKKAQLCREEVTYLGYLLKGGKRWLTPARKATVMKIPTPTTPRQVREFLGTAGFCRLWIPGFASLAAPLYPLTRPKVPFTWTEAHQEAFGRIKEALLSAPALALPDLTKPFALYVDEKEGVARGVLTQTLGPWRRPVAYLSKKLDPVASGWPTCLKAIAAVALLLKDADKLTLGQNVLVIAPHNLESIVRQPPDRWMTNARMTHYQSLLLNERVSFAPPAILNPATLLPVESDDTPIHICSEILAEETGTRPDLRDQPLPGVPAWYTDGSSFIMDGRRQAGAAIVDNKRTVWASNLPEGTSAQKAELIALTQALRLAEGKSINIYTDSRYAFATAHVHGAIYKQRGWLTSAGKDIKNKEEILALLEAIHLPKRVAIIHCPGHQRGTDPVATGNRKADEAAKQAAQSTRILTETTKNAGKRTADGSEFEKRTADGSEFESPKKKAKVE

SEQ ID NO: 1765 - protein, 2216 aa, synthetic construct
MPAAKRVKLDGGDKKYSIGLDIGTNSVGWAVITDEYKVPSKKFKVLGNTDRHSIKKNLIGALLFDSGETAEATRLKRTARRRYTRRKNRICYLQEIFSNEMAKVDDSFFHRLEESFLVEEDKKHERHPIFGNIVDEVAYHEKYPTIYHLRKKLVDSTDKADLRLIYLALAHMIKFRGHFLIEGDLNPDNSDVDKLFIQLVQTYNQLFEENPINASGVDAKAILSARLSKSRRLENLIAQLPGEKKNGLFGNLIALSLGLTPNFKSNFDLAEDAKLQLSKDTYDDDLDNLLAQIGDQYADLFLAAKNLSDAILLSDILRVNTEITKAPLSASMIKRYDEHHQDLTLLKALVRQQLPEKYKEIFFDQSKNGYAGYIDGGASQEEFYKFIKPILEKMDGTEELLVKLNREDLLRKQRTFDNGSIPHQIHLGELHAILRRQEDFYPFLKDNREKIEKILTFRIPYYVGPLARGNSRFAWMTRKSEETITPWNFEEVVDKGASAQSFIERMTNFDKNLPNEKVLPKHSLLYEYFTVYNELTKVKYVTEGMRKPAFLSGEQKKAIVDLLFKTNRKVTVKQLKEDYFKKIECFDSVEISGVEDRFNASLGTYHDLLKIIKDKDFLDNEENEDILEDIVLTLTLFEDREMIEERLKTYAHLFDDKVMKQLKRRRYTGWGRLSRKLINGIRDKQSGKTILDFLKSDGFANRNFMQLIHDDSLTFKEDIQKAQVSGQGDSLHEHIANLAGSPAIKKGILQTVKVVDELVKVMGRHKPENIVIEMARENQTTQKGQKNSRERMKRIEEGIKELGSQILKEHPVENTQLQNEKLYLYYLQNGRDMYVDQELDINRLSDYDVDHIVPQSFLKDDSIDNKVLTRSDKARGKSDNVPSEEVVKKMKNYWRQLLNAKLITQRKFDNLTKAERGGLSELDKAGFIKRQLVETRQITKHVAQILDSRMNTKYDENDKLIREVKVITLKSKLVSDFRKDFQFYKVREINNYHHAHDAYLNAVVGTALIKKYPKLESEFVYGDYKVYDVRKMIAKSEQEIGKATAKYFFYSNIMNFFKTEITLANGEIRKRPLIETNGETGEIVWDKGRDFATVRKVLSMPQVNIVKKTEVQTGGFSKESILPKRNSDKLIARKKDWDPKKYGGFDSPTVAYSVLVVAKVEKGKSKKLKSVKELLGITIMERSSFEKNPIDFLEAKGYKEVKKDLIIKLPKYSLFELENGRKRMLASAGELQKGNELALPSKYVNFLYLASHYEKLKGSPEDNEQKQLFVEQHKHYLDEIIEQISEFSKRVILADANLDKVLSAYNKHRDKPIREQAENIIHLFTLTNLGAPAAFKYFDTTIDRKRYTSTKEVLDATLIHQSITGLYETRIDLSQLGGDGGPAPGSSGGSGGTLGDQGSRGSDPLPEPRVTLTVEGIPTEFLVNTGAEHSVLTKPMGKMGSKRTVVAGATGSKVYPWTTKRLLKIGQKQVTHSFLVIPECPAPLLGRDLLTKLKAQIQFSTEGPQVTWEDRPAMCLVLNLEEEYRLHEKPVPPSIDPSWLQLFPMVWAEKAGMGLANQVPPVVVELKSDASPVAVRQYPMSKEAREGIRPHIQRFLDLGILVPCQSPWNTPLLPVKKPGTNDYRPVQDLREVNKRVQDIHPTVPNPYNLLSSLPPSHTWYSVLDLKDAFFCLKLHPNSQPLFAFEWRDPEKGNTGQLTWTRLPQGFKNSPTLFNEALHRDLASFRALNPQVVMLQYVDDLLVAAPTYRDCKEGTRRLLQELSKLGYRVSAKKAQLCREEVTYLGYLLKGGKRWLTPARKATVMKIPTPTTPRQVREFLGTAGFCRLWIPGFASLAAPLYPLTRPKVPFTWTEAHQEAFGRIKEALLSAPALALPDLTKPFALYVDEKEGVARGVLTQTLGPWRRPVAYLSKKLDPVASGWPTCLKAIAAVALLLKDADKLTLGQNVLVIAPHNLESIVRQPPDRWMTNARMTHYQSLLLNERVSFAPPAILNPATLLPVESDDTPIHICSEILAEETGTRPDLRDQPLPGVPAWYTDGSSFIMDGRRQAGAAIVDNKRTVWASNLPEGTSAQKAELIALTQALRLAEGKSINIYTDSRYAFATAHVHGAIYKQRGWLTSAGKDIKNKEEILALLEAIHLPKRVAIIHCPGHQRGTDPVATGNRKADEAAKQAAQSTRILTETTKNAGKRTADGSEFEKRTADGSEFESPKKKAKVE

SEQ ID NO: 1766 - protein, 2216 aa, synthetic construct
MPAAKRVKLDGGDKKYSIGLDIGTNSVGWAVITDEYKVPSKKFKVLGNTDRHSIKKNLIGALLFDSGETAEATRLKRTARRRYTRRKNRICYLQEIFSNEMAKVDDSFFHRLEESFLVEEDKKHERHPIFGNIVDEVAYHEKYPTIYHLRKKLVDSTDKADLRLIYLALAHMIKFRGHFLIEGDLNPDNSDVDKLFIQLVQTYNQLFEENPINASGVDAKAILSARLSKSRRLENLIAQLPGEKKNGLFGNLIALSLGLTPNFKSNFDLAEDAKLQLSKDTYDDDLDNLLAQIGDQYADLFLAAKNLSDAILLSDILRVNTEITKAPLSASMIKRYDEHHQDLTLLKALVRQQLPEKYKEIFFDQSKNGYAGYIDGGASQEEFYKFIKPILEKMDGTEELLVKLNREDLLRKQRTFDNGSIPHQIHLGELHAILRRQEDFYPFLKDNREKIEKILTFRIPYYVGPLARGNSRFAWMTRKSEETITPWNFEEVVDKGASAQSFIERMTNFDKNLPNEKVLPKHSLLYEYFTVYNELTKVKYVTEGMRKPAFLSGEQKKAIVDLLFKTNRKVTVKQLKEDYFKKIECFDSVEISGVEDRFNASLGTYHDLLKIIKDKDFLDNEENEDILEDIVLTLTLFEDREMIEERLKTYAHLFDDKVMKQLKRRRYTGWGRLSRKLINGIRDKQSGKTILDFLKSDGFANRNFMQLIHDDSLTFKEDIQKAQVSGQGDSLHEHIANLAGSPAIKKGILQTVKVVDELVKVMGRHKPENIVIEMARENQTTQKGQKNSRERMKRIEEGIKELGSQILKEHPVENTQLQNEKLYLYYLQNGRDMYVDQELDINRLSDYDVDHIVPQSFLKDDSIDNKVLTRSDKARGKSDNVPSEEVVKKMKNYWRQLLNAKLITQRKFDNLTKAERGGLSELDKAGFIKRQLVETRQITKHVAQILDSRMNTKYDENDKLIREVKVITLKSKLVSDFRKDFQFYKVREINNYHHAHDAYLNAVVGTALIKKYPKLESEFVYGDYKVYDVRKMIAKSEQEIGKATAKYFFYSNIMNFFKTEITLANGEIRKRPLIETNGETGEIVWDKGRDFATVRKVLSMPQVNIVKKTEVQTGGFSKESILPKRNSDKLIARKKDWDPKKYGGFDSPTVAYSVLVVAKVEKGKSKKLKSVKELLGITIMERSSFEKNPIDFLEAKGYKEVKKDLIIKLPKYSLFELENGRKRMLASAGELQKGNELALPSKYVNFLYLASHYEKLKGSPEDNEQKQLFVEQHKHYLDEIIEQISEFSKRVILADANLDKVLSAYNKHRDKPIREQAENIIHLFTLTNLGAPAAFKYFDTTIDRKRYTSTKEVLDATLIHQSITGLYETRIDLSQLGGDGGGGSGGSGGSGGTLGDQGSRGSDPLPEPRVTLTVEGIPTEFLVNTGAEHSVLTKPMGKMGSKRTVVAGATGSKVYPWTTKRLLKIGQKQVTHSFLVIPECPAPLLGRDLLTKLKAQIQFSTEGPQVTWEDRPAMCLVLNLEEEYRLHEKPVPPSIDPSWLQLFPMVWAEKAGMGLANQVPPVVVELKSDASPVAVRQYPMSKEAREGIRPHIQRFLDLGILVPCQSPWNTPLLPVKKPGTNDYRPVQDLREVNKRVQDIHPTVPNPYNLLSSLPPSHTWYSVLDLKDAFFCLKLHPNSQPLFAFEWRDPEKGNTGQLTWTRLPQGFKNSPTLFNEALHRDLASFRALNPQVVMLQYVDDLLVAAPTYRDCKEGTRRLLQELSKLGYRVSAKKAQLCREEVTYLGYLLKGGKRWLTPARKATVMKIPTPTTPRQVREFLGTAGFCRLWIPGFASLAAPLYPLTRPKVPFTWTEAHQEAFGRIKEALLSAPALALPDLTKPFALYVDEKEGVARGVLTQTLGPWRRPVAYLSKKLDPVASGWPTCLKAIAAVALLLKDADKLTLGQNVLVIAPHNLESIVRQPPDRWMTNARMTHYQSLLLNERVSFAPPAILNPATLLPVESDDTPIHICSEILAEETGTRPDLRDQPLPGVPAWYTDGSSFIMDGRRQAGAAIVDNKRTVWASNLPEGTSAQKAELIALTQALRLAEGKSINIYTDSRYAFATAHVHGAIYKQRGWLTSAGKDIKNKEEILALLEAIHLPKRVAIIHCPGHQRGTDPVATGNRKADEAAKQAAQSTRILTETTKNAGKRTADGSEFEKRTADGSEFESPKKKAKVE

SEQ ID NO: 1767 - protein, 2222 aa, synthetic construct
MPAAKRVKLDGGDKKYSIGLDIGTNSVGWAVITDEYKVPSKKFKVLGNTDRHSIKKNLIGALLFDSGETAEATRLKRTARRRYTRRKNRICYLQEIFSNEMAKVDDSFFHRLEESFLVEEDKKHERHPIFGNIVDEVAYHEKYPTIYHLRKKLVDSTDKADLRLIYLALAHMIKFRGHFLIEGDLNPDNSDVDKLFIQLVQTYNQLFEENPINASGVDAKAILSARLSKSRRLENLIAQLPGEKKNGLFGNLIALSLGLTPNFKSNFDLAEDAKLQLSKDTYDDDLDNLLAQIGDQYADLFLAAKNLSDAILLSDILRVNTEITKAPLSASMIKRYDEHHQDLTLLKALVRQQLPEKYKEIFFDQSKNGYAGYIDGGASQEEFYKFIKPILEKMDGTEELLVKLNREDLLRKQRTFDNGSIPHQIHLGELHAILRRQEDFYPFLKDNREKIEKILTFRIPYYVGPLARGNSRFAWMTRKSEETITPWNFEEVVDKGASAQSFIERMTNFDKNLPNEKVLPKHSLLYEYFTVYNELTKVKYVTEGMRKPAFLSGEQKKAIVDLLFKTNRKVTVKQLKEDYFKKIECFDSVEISGVEDRFNASLGTYHDLLKIIKDKDFLDNEENEDILEDIVLTLTLFEDREMIEERLKTYAHLFDDKVMKQLKRRRYTGWGRLSRKLINGIRDKQSGKTILDFLKSDGFANRNFMQLIHDDSLTFKEDIQKAQVSGQGDSLHEHIANLAGSPAIKKGILQTVKVVDELVKVMGRHKPENIVIEMARENQTTQKGQKNSRERMKRIEEGIKELGSQILKEHPVENTQLQNEKLYLYYLQNGRDMYVDQELDINRLSDYDVDHIVPQSFLKDDSIDNKVLTRSDKARGKSDNVPSEEVVKKMKNYWRQLLNAKLITQRKFDNLTKAERGGLSELDKAGFIKRQLVETRQITKHVAQILDSRMNTKYDENDKLIREVKVITLKSKLVSDFRKDFQFYKVREINNYHHAHDAYLNAVVGTALIKKYPKLESEFVYGDYKVYDVRKMIAKSEQEIGKATAKYFFYSNIMNFFKTEITLANGEIRKRPLIETNGETGEIVWDKGRDFATVRKVLSMPQVNIVKKTEVQTGGFSKESILPKRNSDKLIARKKDWDPKKYGGFDSPTVAYSVLVVAKVEKGKSKKLKSVKELLGITIMERSSFEKNPIDFLEAKGYKEVKKDLIIKLPKYSLFELENGRKRMLASAGELQKGNELALPSKYVNFLYLASHYEKLKGSPEDNEQKQLFVEQHKHYLDEIIEQISEFSKRVILADANLDKVLSAYNKHRDKPIREQAENIIHLFTLTNLGAPAAFKYFDTTIDRKRYTSTKEVLDATLIHQSITGLYETRIDLSQLGGDGGGGGGSEAAAKGGGGSGGTLGDQGSRGSDPLPEPRVTLTVEGIPTEFLVNTGAEHSVLTKPMGKMGSKRTVVAGATGSKVYPWTTKRLLKIGQKQVTHSFLVIPECPAPLLGRDLLTKLKAQIQFSTEGPQVTWEDRPAMCLVLNLEEEYRLHEKPVPPSIDPSWLQLFPMVWAEKAGMGLANQVPPVVVELKSDASPVAVRQYPMSKEAREGIRPHIQRFLDLGILVPCQSPWNTPLLPVKKPGTNDYRPVQDLREVNKRVQDIHPTVPNPYNLLSSLPPSHTWYSVLDLKDAFFCLKLHPNSQPLFAFEWRDPEKGNTGQLTWTRLPQGFKNSPTLFNEALHRDLASFRALNPQVVMLQYVDDLLVAAPTYRDCKEGTRRLLQELSKLGYRVSAKKAQLCREEVTYLGYLLKGGKRWLTPARKATVMKIPTPTTPRQVREFLGTAGFCRLWIPGFASLAAPLYPLTRPKVPFTWTEAHQEAFGRIKEALLSAPALALPDLTKPFALYVDEKEGVARGVLTQTLGPWRRPVAYLSKKLDPVASGWPTCLKAIAAVALLLKDADKLTLGQNVLVIAPHNLESIVRQPPDRWMTNARMTHYQSLLLNERVSFAPPAILNPATLLPVESDDTPIHICSEILAEETGTRPDLRDQPLPGVPAWYTDGSSFIMDGRRQAGAAIVDNKRTVWASNLPEGTSAQKAELIALTQALRLAEGKSINIYTDSRYAFATAHVHGAIYKQRGWLTSAGKDIKNKEEILALLEAIHLPKRVAIIHCPGHQRGTDPVATGNRKADEAAKQAAQSTRILTETTKNAGKRTADGSEFEKRTADGSEFESPKKKAKVE

SEQ ID NO: 1768 - protein, 2213 aa, synthetic construct
MPAAKRVKLDGGDKKYSIGLDIGTNSVGWAVITDEYKVPSKKFKVLGNTDRHSIKKNLIGALLFDSGETAEATRLKRTARRRYTRRKNRICYLQEIFSNEMAKVDDSFFHRLEESFLVEEDKKHERHPIFGNIVDEVAYHEKYPTIYHLRKKLVDSTDKADLRLIYLALAHMIKFRGHFLIEGDLNPDNSDVDKLFIQLVQTYNQLFEENPINASGVDAKAILSARLSKSRRLENLIAQLPGEKKNGLFGNLIALSLGLTPNFKSNFDLAEDAKLQLSKDTYDDDLDNLLAQIGDQYADLFLAAKNLSDAILLSDILRVNTEITKAPLSASMIKRYDEHHQDLTLLKALVRQQLPEKYKEIFFDQSKNGYAGYIDGGASQEEFYKFIKPILEKMDGTEELLVKLNREDLLRKQRTFDNGSIPHQIHLGELHAILRRQEDFYPFLKDNREKIEKILTFRIPYYVGPLARGNSRFAWMTRKSEETITPWNFEEVVDKGASAQSFIERMTNFDKNLPNEKVLPKHSLLYEYFTVYNELTKVKYVTEGMRKPAFLSGEQKKAIVDLLFKTNRKVTVKQLKEDYFKKIECFDSVEISGVEDRFNASLGTYHDLLKIIKDKDFLDNEENEDILEDIVLTLTLFEDREMIEERLKTYAHLFDDKVMKQLKRRRYTGWGRLSRKLINGIRDKQSGKTILDFLKSDGFANRNFMQLIHDDSLTFKEDIQKAQVSGQGDSLHEHIANLAGSPAIKKGILQTVKVVDELVKVMGRHKPENIVIEMARENQTTQKGQKNSRERMKRIEEGIKELGSQILKEHPVENTQLQNEKLYLYYLQNGRDMYVDQELDINRLSDYDVDHIVPQSFLKDDSIDNKVLTRSDKARGKSDNVPSEEVVKKMKNYWRQLLNAKLITQRKFDNLTKAERGGLSELDKAGFIKRQLVETRQITKHVAQILDSRMNTKYDENDKLIREVKVITLKSKLVSDFRKDFQFYKVREINNYHHAHDAYLNAVVGTALIKKYPKLESEFVYGDYKVYDVRKMIAKSEQEIGKATAKYFFYSNIMNFFKTEITLANGEIRKRPLIETNGETGEIVWDKGRDFATVRKVLSMPQVNIVKKTEVQTGGFSKESILPKRNSDKLIARKKDWDPKKYGGFDSPTVAYSVLVVAKVEKGKSKKLKSVKELLGITIMERSSFEKNPIDFLEAKGYKEVKKDLIIKLPKYSLFELENGRKRMLASAGELQKGNELALPSKYVNFLYLASHYEKLKGSPEDNEQKQLFVEQHKHYLDEIIEQISEFSKRVILADANLDKVLSAYNKHRDKPIREQAENIIHLFTLTNLGAPAAFKYFDTTIDRKRYTSTKEVLDATLIHQSITGLYETRIDLSQLGGDGGGGSGSSGGTLGDQGSRGSDPLPEPRVTLTVEGIPTEFLVNTGAEHSVLTKPMGKMGSKRTVVAGATGSKVYPWTTKRLLKIGQKQVTHSFLVIPECPAPLLGRDLLTKLKAQIQFSTEGPQVTWEDRPAMCLVLNLEEEYRLHEKPVPPSIDPSWLQLFPMVWAEKAGMGLANQVPPVVVELKSDASPVAVRQYPMSKEAREGIRPHIQRFLDLGILVPCQSPWNTPLLPVKKPGTNDYRPVQDLREVNKRVQDIHPTVPNPYNLLSSLPPSHTWYSVLDLKDAFFCLKLHPNSQPLFAFEWRDPEKGNTGQLTWTRLPQGFKNSPTLFNEALHRDLASFRALNPQVVMLQYVDDLLVAAPTYRDCKEGTRRLLQELSKLGYRVSAKKAQLCREEVTYLGYLLKGGKRWLTPARKATVMKIPTPTTPRQVREFLGTAGFCRLWIPGFASLAAPLYPLTRPKVPFTWTEAHQEAFGRIKEALLSAPALALPDLTKPFALYVDEKEGVARGVLTQTLGPWRRPVAYLSKKLDPVASGWPTCLKAIAAVALLLKDADKLTLGQNVLVIAPHNLESIVRQPPDRWMTNARMTHYQSLLLNERVSFAPPAILNPATLLPVESDDTPIHICSEILAEETGTRPDLRDQPLPGVPAWYTDGSSFIMDGRRQAGAAIVDNKRTVWASNLPEGTSAQKAELIALTQALRLAEGKSINIYTDSRYAFATAHVHGAIYKQRGWLTSAGKDIKNKEEILALLEAIHLPKRVAIIHCPGHQRGTDPVATGNRKADEAAKQAAQSTRILTETTKNAGKRTADGSEFEKRTADGSEFESPKKKAKVE

SEQ ID NO: 1769 - protein, 2218 aa, synthetic construct
MPAAKRVKLDGGDKKYSIGLDIGTNSVGWAVITDEYKVPSKKFKVLGNTDRHSIKKNLIGALLFDSGETAEATRLKRTARRRYTRRKNRICYLQEIFSNEMAKVDDSFFHRLEESFLVEEDKKHERHPIFGNIVDEVAYHEKYPTIYHLRKKLVDSTDKADLRLIYLALAHMIKFRGHFLIEGDLNPDNSDVDKLFIQLVQTYNQLFEENPINASGVDAKAILSARLSKSRRLENLIAQLPGEKKNGLFGNLIALSLGLTPNFKSNFDLAEDAKLQLSKDTYDDDLDNLLAQIGDQYADLFLAAKNLSDAILLSDILRVNTEITKAPLSASMIKRYDEHHQDLTLLKALVRQQLPEKYKEIFFDQSKNGYAGYIDGGASQEEFYKFIKPILEKMDGTEELLVKLNREDLLRKQRTFDNGSIPHQIHLGELHAILRRQEDFYPFLKDNREKIEKILTFRIPYYVGPLARGNSRFAWMTRKSEETITPWNFEEVVDKGASAQSFIERMTNFDKNLPNEKVLPKHSLLYEYFTVYNELTKVKYVTEGMRKPAFLSGEQKKAIVDLLFKTNRKVTVKQLKEDYFKKIECFDSVEISGVEDRFNASLGTYHDLLKIIKDKDFLDNEENEDILEDIVLTLTLFEDREMIEERLKTYAHLFDDKVMKQLKRRRYTGWGRLSRKLINGIRDKQSGKTILDFLKSDGFANRNFMQLIHDDSLTFKEDIQKAQVSGQGDSLHEHIANLAGSPAIKKGILQTVKVVDELVKVMGRHKPENIVIEMARENQTTQKGQKNSRERMKRIEEGIKELGSQILKEHPVENTQLQNEKLYLYYLQNGRDMYVDQELDINRLSDYDVDHIVPQSFLKDDSIDNKVLTRSDKARGKSDNVPSEEVVKKMKNYWRQLLNAKLITQRKFDNLTKAERGGLSELDKAGFIKRQLVETRQITKHVAQILDSRMNTKYDENDKLIREVKVITLKSKLVSDFRKDFQFYKVREINNYHHAHDAYLNAVVGTALIKKYPKLESEFVYGDYKVYDVRKMIAKSEQEIGKATAKYFFYSNIMNFFKTEITLANGEIRKRPLIETNGETGEIVWDKGRDFATVRKVLSMPQVNIVKKTEVQTGGFSKESILPKRNSDKLIARKKDWDPKKYGGFDSPTVAYSVLVVAKVEKGKSKKLKSVKELLGITIMERSSFEKNPIDFLEAKGYKEVKKDLIIKLPKYSLFELENGRKRMLASAGELQKGNELALPSKYVNFLYLASHYEKLKGSPEDNEQKQLFVEQHKHYLDEIIEQISEFSKRVILADANLDKVLSAYNKHRDKPIREQAENIIHLFTLTNLGAPAAFKYFDTTIDRKRYTSTKEVLDATLIHQSITGLYETRIDLSQLGGDGGGGSEAAAKGSSGGTLGDQGSRGSDPLPEPRVTLTVEGIPTEFLVNTGAEHSVLTKPMGKMGSKRTVVAGATGSKVYPWTTKRLLKIGQKQVTHSFLVIPECPAPLLGRDLLTKLKAQIQFSTEGPQVTWEDRPAMCLVLNLEEEYRLHEKPVPPSIDPSWLQLFPMVWAEKAGMGLANQVPPVVVELKSDASPVAVRQYPMSKEAREGIRPHIQRFLDLGILVPCQSPWNTPLLPVKKPGTNDYRPVQDLREVNKRVQDIHPTVPNPYNLLSSLPPSHTWYSVLDLKDAFFCLKLHPNSQPLFAFEWRDPEKGNTGQLTWTRLPQGFKNSPTLFNEALHRDLASFRALNPQVVMLQYVDDLLVAAPTYRDCKEGTRRLLQELSKLGYRVSAKKAQLCREEVTYLGYLLKGGKRWLTPARKATVMKIPTPTTPRQVREFLGKAGFCRLFIPGFASLAAPLYPLTRPKVPFTWTEAHQEAFGRIKEALLSAPALALPDLTKPFALYVDEKEGVARGVLTQTLGPWRRPVAYLSKKLDPVASGWPTCLKAIAAVALLLKDADKLTLGQNVLVIAPHNLESIVRQPPDRWMTNARMTHYQSLLLNERVSFAPPAILNPATLLPVESDDTPIHICSEILAEETGTRPDLRDQPLPGVPAWYTDGSSFIMDGRRQAGAAIVDNKRTVWASNLPEGTSAQKAELIALTQALRLAEGKSINIYTDSRYAFATAHVHGAIYKQRGWLTSAGKDIKNKEEILALLEAIHLPKRVAIIHCPGHQRGTDPVATGNRKADEAAKQAAQSTRILTETTKNAGKRTADGSEFEKRTADGSEFESPKKKAKVE

SEQ ID NO: 1770 - protein, 2218 aa, synthetic construct
MPAAKRVKLDGGDKKYSIGLDIGTNSVGWAVITDEYKVPSKKFKVLGNTDRHSIKKNLIGALLFDSGETAEATRLKRTARRRYTRRKNRICYLQEIFSNEMAKVDDSFFHRLEESFLVEEDKKHERHPIFGNIVDEVAYHEKYPTIYHLRKKLVDSTDKADLRLIYLALAHMIKFRGHFLIEGDLNPDNSDVDKLFIQLVQTYNQLFEENPINASGVDAKAILSARLSKSRRLENLIAQLPGEKKNGLFGNLIALSLGLTPNFKSNFDLAEDAKLQLSKDTYDDDLDNLLAQIGDQYADLFLAAKNLSDAILLSDILRVNTEITKAPLSASMIKRYDEHHQDLTLLKALVRQQLPEKYKEIFFDQSKNGYAGYIDGGASQEEFYKFIKPILEKMDGTEELLVKLNREDLLRKQRTFDNGSIPHQIHLGELHAILRRQEDFYPFLKDNREKIEKILTFRIPYYVGPLARGNSRFAWMTRKSEETITPWNFEEVVDKGASAQSFIERMTNFDKNLPNEKVLPKHSLLYEYFTVYNELTKVKYVTEGMRKPAFLSGEQKKAIVDLLFKTNRKVTVKQLKEDYFKKIECFDSVEISGVEDRFNASLGTYHDLLKIIKDKDFLDNEENEDILEDIVLTLTLFEDREMIEERLKTYAHLFDDKVMKQLKRRRYTGWGRLSRKLINGIRDKQSGKTILDFLKSDGFANRNFMQLIHDDSLTFKEDIQKAQVSGQGDSLHEHIANLAGSPAIKKGILQTVKVVDELVKVMGRHKPENIVIEMARENQTTQKGQKNSRERMKRIEEGIKELGSQILKEHPVENTQLQNEKLYLYYLQNGRDMYVDQELDINRLSDYDVDHIVPQSFLKDDSIDNKVLTRSDKARGKSDNVPSEEVVKKMKNYWRQLLNAKLITQRKFDNLTKAERGGLSELDKAGFIKRQLVETRQITKHVAQILDSRMNTKYDENDKLIREVKVITLKSKLVSDFRKDFQFYKVREINNYHHAHDAYLNAVVGTALIKKYPKLESEFVYGDYKVYDVRKMIAKSEQEIGKATAKYFFYSNIMNFFKTEITLANGEIRKRPLIETNGETGEIVWDKGRDFATVRKVLSMPQVNIVKKTEVQTGGFSKESILPKRNSDKLIARKKDWDPKKYGGFDSPTVAYSVLVVAKVEKGKSKKLKSVKELLGITIMERSSFEKNPIDFLEAKGYKEVKKDLIIKLPKYSLFELENGRKRMLASAGELQKGNELALPSKYVNFLYLASHYEKLKGSPEDNEQKQLFVEQHKHYLDEIIEQISEFSKRVILADANLDKVLSAYNKHRDKPIREQAENIIHLFTLTNLGAPAAFKYFDTTIDRKRYTSTKEVLDATLIHQSITGLYETRIDLSQLGGDGGEAAAKGGGPAPGGTLGDQGSRGSDPLPEPRVTLTVEGIPTEFLVNTGAEHSVLTKPMGKMGSKRTVVAGATGSKVYPWTTKRLLKIGQKQVTHSFLVIPECPAPLLGRDLLTKLKAQIQFSTEGPQVTWEDRPAMCLVLNLEEEYRLHEKPVPPSIDPSWLQLFPMVWAEKAGMGLANQVPPVVVELKSDASPVAVRQYPMSKEAREGIRPHIQRFLDLGILVPCQSPWNTPLLPVKKPGTNDYRPVQDLREVNKRVQDIHPTVPNPYNLLSSLPPSHTWYSVLDLKDAFFCLKLHPNSQPLFAFEWRDPEKGNTGQLTWTRLPQGFKNSPTLFNEALHRDLASFRALNPQVVMLQYVDDLLVAAPTYRDCKEGTRRLLQELSKLGYRVSAKKAQLCREEVTYLGYLLKGGKRWLTPARKATVMKIPTPTTPRQVREFLGKAGFCRLFIPGFASLAAPLYPLTRPKVPFTWTEAHQEAFGRIKEALLSAPALALPDLTKPFALYVDEKEGVARGVLTQTLGPWRRPVAYLSKKLDPVASGWPTCLKAIAAVALLLKDADKLTLGQNVLVIAPHNLESIVRQPPDRWMTNARMTHYQSLLLNERVSFAPPAILNPATLLPVESDDTPIHICSEILAEETGTRPDLRDQPLPGVPAWYTDGSSFIMDGRRQAGAAIVDNKRTVWASNLPEGTSAQKAELIALTQALRLAEGKSINIYTDSRYAFATAHVHGAIYKQRGWLTSAGKDIKNKEEILALLEAIHLPKRVAIIHCPGHQRGTDPVATGNRKADEAAKQAAQSTRILTETTKNAGKRTADGSEFEKRTADGSEFESPKKKAKVE

SEQ ID NO: 1771 - protein, 2218 aa, synthetic construct
MPAAKRVKLDGGDKKYSIGLDIGTNSVGWAVITDEYKVPSKKFKVLGNTDRHSIKKNLIGALLFDSGETAEATRLKRTARRRYTRRKNRICYLQEIFSNEMAKVDDSFFHRLEESFLVEEDKKHERHPIFGNIVDEVAYHEKYPTIYHLRKKLVDSTDKADLRLIYLALAHMIKFRGHFLIEGDLNPDNSDVDKLFIQLVQTYNQLFEENPINASGVDAKAILSARLSKSRRLENLIAQLPGEKKNGLFGNLIALSLGLTPNFKSNFDLAEDAKLQLSKDTYDDDLDNLLAQIGDQYADLFLAAKNLSDAILLSDILRVNTEITKAPLSASMIKRYDEHHQDLTLLKALVRQQLPEKYKEIFFDQSKNGYAGYIDGGASQEEFYKFIKPILEKMDGTEELLVKLNREDLLRKQRTFDNGSIPHQIHLGELHAILRRQEDFYPFLKDNREKIEKILTFRIPYYVGPLARGNSRFAWMTRKSEETITPWNFEEVVDKGASAQSFIERMTNFDKNLPNEKVLPKHSLLYEYFTVYNELTKVKYVTEGMRKPAFLSGEQKKAIVDLLFKTNRKVTVKQLKEDYFKKIECFDSVEISGVEDRFNASLGTYHDLLKIIKDKDFLDNEENEDILEDIVLTLTLFEDREMIEERLKTYAHLFDDKVMKQLKRRRYTGWGRLSRKLINGIRDKQSGKTILDFLKSDGFANRNFMQLIHDDSLTFKEDIQKAQVSGQGDSLHEHIANLAGSPAIKKGILQTVKVVDELVKVMGRHKPENIVIEMARENQTTQKGQKNSRERMKRIEEGIKELGSQILKEHPVENTQLQNEKLYLYYLQNGRDMYVDQELDINRLSDYDVDHIVPQSFLKDDSIDNKVLTRSDKARGKSDNVPSEEVVKKMKNYWRQLLNAKLITQRKFDNLTKAERGGLSELDKAGFIKRQLVETRQITKHVAQILDSRMNTKYDENDKLIREVKVITLKSKLVSDFRKDFQFYKVREINNYHHAHDAYLNAVVGTALIKKYPKLESEFVYGDYKVYDVRKMIAKSEQEIGKATAKYFFYSNIMNFFKTEITLANGEIRKRPLIETNGETGEIVWDKGRDFATVRKVLSMPQVNIVKKTEVQTGGFSKESILPKRNSDKLIARKKDWDPKKYGGFDSPTVAYSVLVVAKVEKGKSKKLKSVKELLGITIMERSSFEKNPIDFLEAKGYKEVKKDLIIKLPKYSLFELENGRKRMLASAGELQKGNELALPSKYVNFLYLASHYEKLKGSPEDNEQKQLFVEQHKHYLDEIIEQISEFSKRVILADANLDKVLSAYNKHRDKPIREQAENIIHLFTLTNLGAPAAFKYFDTTIDRKRYTSTKEVLDATLIHQSITGLYETRIDLSQLGGDGGGGGEAAAKGGSGGTLGDQGSRGSDPLPEPRVTLTVEGIPTEFLVNTGAEHSVLTKPMGKMGSKRTVVAGATGSKVYPWTTKRLLKIGQKQVTHSFLVIPECPAPLLGRDLLTKLKAQIQFSTEGPQVTWEDRPAMCLVLNLEEEYRLHEKPVPPSIDPSWLQLFPMVWAEKAGMGLANQVPPVVVELKSDASPVAVRQYPMSKEAREGIRPHIQRFLDLGILVPCQSPWNTPLLPVKKPGTNDYRPVQDLREVNKRVQDIHPTVPNPYNLLSSLPPSHTWYSVLDLKDAFFCLKLHPNSQPLFAFEWRDPEKGNTGQLTWTRLPQGFKNSPTLFNEALHRDLASFRALNPQVVMLQYVDDLLVAAPTYRDCKEGTRRLLQELSKLGYRVSAKKAQLCREEVTYLGYLLKGGKRWLTPARKATVMKIPTPTTPRQVREFLGKAGFCRLFIPGFASLAAPLYPLTRPKVPFTWTEAHQEAFGRIKEALLSAPALALPDLTKPFALYVDEKEGVARGVLTQTLGPWRRPVAYLSKKLDPVASGWPTCLKAIAAVALLLKDADKLTLGQNVLVIAPHNLESIVRQPPDRWMTNARMTHYQSLLLNERVSFAPPAILNPATLLPVESDDTPIHICSEILAEETGTRPDLRDQPLPGVPAWYTDGSSFIMDGRRQAGAAIVDNKRTVWASNLPEGTSAQKAELIALTQALRLAEGKSINIYTDSRYAFATAHVHGAIYKQRGWLTSAGKDIKNKEEILALLEAIHLPKRVAIIHCPGHQRGTDPVATGNRKADEAAKQAAQSTRILTETTKNAGKRTADGSEFEKRTADGSEFESPKKKAKVE

SEQ ID NO: 1772 - protein, 2213 aa, synthetic construct
MPAAKRVKLDGGDKKYSIGLDIGTNSVGWAVITDEYKVPSKKFKVLGNTDRHSIKKNLIGALLFDSGETAEATRLKRTARRRYTRRKNRICYLQEIFSNEMAKVDDSFFHRLEESFLVEEDKKHERHPIFGNIVDEVAYHEKYPTIYHLRKKLVDSTDKADLRLIYLALAHMIKFRGHFLIEGDLNPDNSDVDKLFIQLVQTYNQLFEENPINASGVDAKAILSARLSKSRRLENLIAQLPGEKKNGLFGNLIALSLGLTPNFKSNFDLAEDAKLQLSKDTYDDDLDNLLAQIGDQYADLFLAAKNLSDAILLSDILRVNTEITKAPLSASMIKRYDEHHQDLTLLKALVRQQLPEKYKEIFFDQSKNGYAGYIDGGASQEEFYKFIKPILEKMDGTEELLVKLNREDLLRKQRTFDNGSIPHQIHLGELHAILRRQEDFYPFLKDNREKIEKILTFRIPYYVGPLARGNSRFAWMTRKSEETITPWNFEEVVDKGASAQSFIERMTNFDKNLPNEKVLPKHSLLYEYFTVYNELTKVKYVTEGMRKPAFLSGEQKKAIVDLLFKTNRKVTVKQLKEDYFKKIECFDSVEISGVEDRFNASLGTYHDLLKIIKDKDFLDNEENEDILEDIVLTLTLFEDREMIEERLKTYAHLFDDKVMKQLKRRRYTGWGRLSRKLINGIRDKQSGKTILDFLKSDGFANRNFMQLIHDDSLTFKEDIQKAQVSGQGDSLHEHIANLAGSPAIKKGILQTVKVVDELVKVMGRHKPENIVIEMARENQTTQKGQKNSRERMKRIEEGIKELGSQILKEHPVENTQLQNEKLYLYYLQNGRDMYVDQELDINRLSDYDVDHIVPQSFLKDDSIDNKVLTRSDKARGKSDNVPSEEVVKKMKNYWRQLLNAKLITQRKFDNLTKAERGGLSELDKAGFIKRQLVETRQITKHVAQILDSRMNTKYDENDKLIREVKVITLKSKLVSDFRKDFQFYKVREINNYHHAHDAYLNAVVGTALIKKYPKLESEFVYGDYKVYDVRKMIAKSEQEIGKATAKYFFYSNIMNFFKTEITLANGEIRKRPLIETNGETGEIVWDKGRDFATVRKVLSMPQVNIVKKTEVQTGGFSKESILPKRNSDKLIARKKDWDPKKYGGFDSPTVAYSVLVVAKVEKGKSKKLKSVKELLGITIMERSSFEKNPIDFLEAKGYKEVKKDLIIKLPKYSLFELENGRKRMLASAGELQKGNELALPSKYVNFLYLASHYEKLKGSPEDNEQKQLFVEQHKHYLDEIIEQISEFSKRVILADANLDKVLSAYNKHRDKPIREQAENIIHLFTLTNLGAPAAFKYFDTTIDRKRYTSTKEVLDATLIHQSITGLYETRIDLSQLGGDGGGGGGSSGGTLGDQGSRGSDPLPEPRVTLTVEGIPTEFLVNTGAEHSVLTKPMGKMGSKRTVVAGATGSKVYPWTTKRLLKIGQKQVTHSFLVIPECPAPLLGRDLLTKLKAQIQFSTEGPQVTWEDRPAMCLVLNLEEEYRLHEKPVPPSIDPSWLQLFPMVWAEKAGMGLANQVPPVVVELKSDASPVAVRQYPMSKEAREGIRPHIQRFLDLGILVPCQSPWNTPLLPVKKPGTNDYRPVQDLREVNKRVQDIHPTVPNPYNLLSSLPPSHTWYSVLDLKDAFFCLKLHPNSQPLFAFEWRDPEKGNTGQLTWTRLPQGFKNSPTLFNEALHRDLASFRALNPQVVMLQYVDDLLVAAPTYRDCKEGTRRLLQELSKLGYRVSAKKAQLCREEVTYLGYLLKGGKRWLTPARKATVMKIPTPTTPRQVREFLGKAGFCRLFIPGFASLAAPLYPLTRPKVPFTWTEAHQEAFGRIKEALLSAPALALPDLTKPFALYVDEKEGVARGVLTQTLGPWRRPVAYLSKKLDPVASGWPTCLKAIAAVALLLKDADKLTLGQNVLVIAPHNLESIVRQPPDRWMTNARMTHYQSLLLNERVSFAPPAILNPATLLPVESDDTPIHICSEILAEETGTRPDLRDQPLPGVPAWYTDGSSFIMDGRRQAGAAIVDNKRTVWASNLPEGTSAQKAELIALTQALRLAEGKSINIYTDSRYAFATAHVHGAIYKQRGWLTSAGKDIKNKEEILALLEAIHLPKRVAIIHCPGHQRGTDPVATGNRKADEAAKQAAQSTRILTETTKNAGKRTADGSEFEKRTADGSEFESPKKKAKVE

SEQ ID NO: 1773 - protein, 2217 aa, synthetic construct
MPAAKRVKLDGGDKKYSIGLDIGTNSVGWAVITDEYKVPSKKFKVLGNTDRHSIKKNLIGALLFDSGETAEATRLKRTARRRYTRRKNRICYLQEIFSNEMAKVDDSFFHRLEESFLVEEDKKHERHPIFGNIVDEVAYHEKYPTIYHLRKKLVDSTDKADLRLIYLALAHMIKFRGHFLIEGDLNPDNSDVDKLFIQLVQTYNQLFEENPINASGVDAKAILSARLSKSRRLENLIAQLPGEKKNGLFGNLIALSLGLTPNFKSNFDLAEDAKLQLSKDTYDDDLDNLLAQIGDQYADLFLAAKNLSDAILLSDILRVNTEITKAPLSASMIKRYDEHHQDLTLLKALVRQQLPEKYKEIFFDQSKNGYAGYIDGGASQEEFYKFIKPILEKMDGTEELLVKLNREDLLRKQRTFDNGSIPHQIHLGELHAILRRQEDFYPFLKDNREKIEKILTFRIPYYVGPLARGNSRFAWMTRKSEETITPWNFEEVVDKGASAQSFIERMTNFDKNLPNEKVLPKHSLLYEYFTVYNELTKVKYVTEGMRKPAFLSGEQKKAIVDLLFKTNRKVTVKQLKEDYFKKIECFDSVEISGVEDRFNASLGTYHDLLKIIKDKDFLDNEENEDILEDIVLTLTLFEDREMIEERLKTYAHLFDDKVMKQLKRRRYTGWGRLSRKLINGIRDKQSGKTILDFLKSDGFANRNFMQLIHDDSLTFKEDIQKAQVSGQGDSLHEHIANLAGSPAIKKGILQTVKVVDELVKVMGRHKPENIVIEMARENQTTQKGQKNSRERMKRIEEGIKELGSQILKEHPVENTQLQNEKLYLYYLQNGRDMYVDQELDINRLSDYDVDHIVPQSFLKDDSIDNKVLTRSDKARGKSDNVPSEEVVKKMKNYWRQLLNAKLITQRKFDNLTKAERGGLSELDKAGFIKRQLVETRQITKHVAQILDSRMNTKYDENDKLIREVKVITLKSKLVSDFRKDFQFYKVREINNYHHAHDAYLNAVVGTALIKKYPKLESEFVYGDYKVYDVRKMIAKSEQEIGKATAKYFFYSNIMNFFKTEITLANGEIRKRPLIETNGETGEIVWDKGRDFATVRKVLSMPQVNIVKKTEVQTGGFSKESILPKRNSDKLIARKKDWDPKKYGGFDSPTVAYSVLVVAKVEKGKSKKLKSVKELLGITIMERSSFEKNPIDFLEAKGYKEVKKDLIIKLPKYSLFELENGRKRMLASAGELQKGNELALPSKYVNFLYLASHYEKLKGSPEDNEQKQLFVEQHKHYLDEIIEQISEFSKRVILADANLDKVLSAYNKHRDKPIREQAENIIHLFTLTNLGAPAAFKYFDTTIDRKRYTSTKEVLDATLIHQSITGLYETRIDLSQLGGDGGEAAAKEAAAKGGTLGDQGSRGSDPLPEPRVTLTVEGIPTEFLVNTGAEHSVLTKPMGKMGSKRTVVAGATGSKVYPWTTKRLLKIGQKQVTHSFLVIPECPAPLLGRDLLTKLKAQIQFSTEGPQVTWEDRPAMCLVLNLEEEYRLHEKPVPPSIDPSWLQLFPMVWAEKAGMGLANQVPPVVVELKSDASPVAVRQYPMSKEAREGIRPHIQRFLDLGILVPCQSPWNTPLLPVKKPGTNDYRPVQDLREVNKRVQDIHPTVPNPYNLLSSLPPSHTWYSVLDLKDAFFCLKLHPNSQPLFAFEWRDPEKGNTGQLTWTRLPQGFKNSPTLFNEALHRDLASFRALNPQVVMLQYVDDLLVAAPTYRDCKEGTRRLLQELSKLGYRVSAKKAQLCREEVTYLGYLLKGGKRWLTPARKATVMKIPTPTTPRQVREFLGKAGFCRLFIPGFASLAAPLYPLTRPKVPFTWTEAHQEAFGRIKEALLSAPALALPDLTKPFALYVDEKEGVARGVLTQTLGPWRRPVAYLSKKLDPVASGWPTCLKAIAAVALLLKDADKLTLGQNVLVIAPHNLESIVRQPPDRWMTNARMTHYQSLLLNERVSFAPPAILNPATLLPVESDDTPIHICSEILAEETGTRPDLRDQPLPGVPAWYTDGSSFIMDGRRQAGAAIVDNKRTVWASNLPEGTSAQKAELIALTQALRLAEGKSINIYTDSRYAFATAHVHGAIYKQRGWLTSAGKDIKNKEEILALLEAIHLPKRVAIIHCPGHQRGTDPVATGNRKADEAAKQAAQSTRILTETTKNAGKRTADGSEFEKRTADGSEFESPKKKAKVE

SEQ ID NO: 1774 - protein, 2216 aa, synthetic construct
MPAAKRVKLDGGDKKYSIGLDIGTNSVGWAVITDEYKVPSKKFKVLGNTDRHSIKKNLIGALLFDSGETAEATRLKRTARRRYTRRKNRICYLQEIFSNEMAKVDDSFFHRLEESFLVEEDKKHERHPIFGNIVDEVAYHEKYPTIYHLRKKLVDSTDKADLRLIYLALAHMIKFRGHFLIEGDLNPDNSDVDKLFIQLVQTYNQLFEENPINASGVDAKAILSARLSKSRRLENLIAQLPGEKKNGLFGNLIALSLGLTPNFKSNFDLAEDAKLQLSKDTYDDDLDNLLAQIGDQYADLFLAAKNLSDAILLSDILRVNTEITKAPLSASMIKRYDEHHQDLTLLKALVRQQLPEKYKEIFFDQSKNGYAGYIDGGASQEEFYKFIKPILEKMDGTEELLVKLNREDLLRKQRTFDNGSIPHQIHLGELHAILRRQEDFYPFLKDNREKIEKILTFRIPYYVGPLARGNSRFAWMTRKSEETITPWNFEEVVDKGASAQSFIERMTNFDKNLPNEKVLPKHSLLYEYFTVYNELTKVKYVTEGMRKPAFLSGEQKKAIVDLLFKTNRKVTVKQLKEDYFKKIECFDSVEISGVEDRFNASLGTYHDLLKIIKDKDFLDNEENEDILEDIVLTLTLFEDREMIEERLKTYAHLFDDKVMKQLKRRRYTGWGRLSRKLINGIRDKQSGKTILDFLKSDGFANRNFMQLIHDDSLTFKEDIQKAQVSGQGDSLHEHIANLAGSPAIKKGILQTVKVVDELVKVMGRHKPENIVIEMARENQTTQKGQKNSRERMKRIEEGIKELGSQILKEHPVENTQLQNEKLYLYYLQNGRDMYVDQELDINRLSDYDVDHIVPQSFLKDDSIDNKVLTRSDKARGKSDNVPSEEVVKKMKNYWRQLLNAKLITQRKFDNLTKAERGGLSELDKAGFIKRQLVETRQITKHVAQILDSRMNTKYDENDKLIREVKVITLKSKLVSDFRKDFQFYKVREINNYHHAHDAYLNAVVGTALIKKYPKLESEFVYGDYKVYDVRKMIAKSEQEIGKATAKYFFYSNIMNFFKTEITLANGEIRKRPLIETNGETGEIVWDKGRDFATVRKVLSMPQVNIVKKTEVQTGGFSKESILPKRNSDKLIARKKDWDPKKYGGFDSPTVAYSVLVVAKVEKGKSKKLKSVKELLGITIMERSSFEKNPIDFLEAKGYKEVKKDLIIKLPKYSLFELENGRKRMLASAGELQKGNELALPSKYVNFLYLASHYEKLKGSPEDNEQKQLFVEQHKHYLDEIIEQISEFSKRVILADANLDKVLSAYNKHRDKPIREQAENIIHLFTLTNLGAPAAFKYFDTTIDRKRYTSTKEVLDATLIHQSITGLYETRIDLSQLGGDGGPAPGGGGSSGGTLGDQGSRGSDPLPEPRVTLTVEGIPTEFLVNTGAEHSVLTKPMGKMGSKRTVVAGATGSKVYPWTTKRLLKIGQKQVTHSFLVIPECPAPLLGRDLLTKLKAQIQFSTEGPQVTWEDRPAMCLVLNLEEEYRLHEKPVPPSIDPSWLQLFPMVWAEKAGMGLANQVPPVVVELKSDASPVAVRQYPMSKEAREGIRPHIQRFLDLGILVPCQSPWNTPLLPVKKPGTNDYRPVQDLREVNKRVQDIHPTVPNPYNLLSSLPPSHTWYSVLDLKDAFFCLKLHPNSQPLFAFEWRDPEKGNTGQLTWTRLPQGFKNSPTLFNEALHRDLASFRALNPQVVMLQYVDDLLVAAPTYRDCKEGTRRLLQELSKLGYRVSAKKAQLCREEVTYLGYLLKGGKRWLTPARKATVMKIPTPTTPRQVREFLGKAGFCRLFIPGFASLAAPLYPLTRPKVPFTWTEAHQEAFGRIKEALLSAPALALPDLTKPFALYVDEKEGVARGVLTQTLGPWRRPVAYLSKKLDPVASGWPTCLKAIAAVALLLKDADKLTLGQNVLVIAPHNLESIVRQPPDRWMTNARMTHYQSLLLNERVSFAPPAILNPATLLPVESDDTPIHICSEILAEETGTRPDLRDQPLPGVPAWYTDGSSFIMDGRRQAGAAIVDNKRTVWASNLPEGTSAQKAELIALTQALRLAEGKSINIYTDSRYAFATAHVHGAIYKQRGWLTSAGKDIKNKEEILALLEAIHLPKRVAIIHCPGHQRGTDPVATGNRKADEAAKQAAQSTRILTETTKNAGKRTADGSEFEKRTADGSEFESPKKKAKVE

SEQ ID NO: 1775 - protein, 2216 aa, synthetic construct
MPAAKRVKLDGGDKKYSIGLDIGTNSVGWAVITDEYKVPSKKFKVLGNTDRHSIKKNLIGALLFDSGETAEATRLKRTARRRYTRRKNRICYLQEIFSNEMAKVDDSFFHRLEESFLVEEDKKHERHPIFGNIVDEVAYHEKYPTIYHLRKKLVDSTDKADLRLIYLALAHMIKFRGHFLIEGDLNPDNSDVDKLFIQLVQTYNQLFEENPINASGVDAKAILSARLSKSRRLENLIAQLPGEKKNGLFGNLIALSLGLTPNFKSNFDLAEDAKLQLSKDTYDDDLDNLLAQIGDQYADLFLAAKNLSDAILLSDILRVNTEITKAPLSASMIKRYDEHHQDLTLLKALVRQQLPEKYKEIFFDQSKNGYAGYIDGGASQEEFYKFIKPILEKMDGTEELLVKLNREDLLRKQRTFDNGSIPHQIHLGELHAILRRQEDFYPFLKDNREKIEKILTFRIPYYVGPLARGNSRFAWMTRKSEETITPWNFEEVVDKGASAQSFIERMTNFDKNLPNEKVLPKHSLLYEYFTVYNELTKVKYVTEGMRKPAFLSGEQKKAIVDLLFKTNRKVTVKQLKEDYFKKIECFDSVEISGVEDRFNASLGTYHDLLKIIKDKDFLDNEENEDILEDIVLTLTLFEDREMIEERLKTYAHLFDDKVMKQLKRRRYTGWGRLSRKLINGIRDKQSGKTILDFLKSDGFANRNFMQLIHDDSLTFKEDIQKAQVSGQGDSLHEHIANLAGSPAIKKGILQTVKVVDELVKVMGRHKPENIVIEMARENQTTQKGQKNSRERMKRIEEGIKELGSQILKEHPVENTQLQNEKLYLYYLQNGRDMYVDQELDINRLSDYDVDHIVPQSFLKDDSIDNKVLTRSDKARGKSDNVPSEEVVKKMKNYWRQLLNAKLITQRKFDNLTKAERGGLSELDKAGFIKRQLVETRQITKHVAQILDSRMNTKYDENDKLIREVKVITLKSKLVSDFRKDFQFYKVREINNYHHAHDAYLNAVVGTALIKKYPKLESEFVYGDYKVYDVRKMIAKSEQEIGKATAKYFFYSNIMNFFKTEITLANGEIRKRPLIETNGETGEIVWDKGRDFATVRKVLSMPQVNIVKKTEVQTGGFSKESILPKRNSDKLIARKKDWDPKKYGGFDSPTVAYSVLVVAKVEKGKSKKLKSVKELLGITIMERSSFEKNPIDFLEAKGYKEVKKDLIIKLPKYSLFELENGRKRMLASAGELQKGNELALPSKYVNFLYLASHYEKLKGSPEDNEQKQLFVEQHKHYLDEIIEQISEFSKRVILADANLDKVLSAYNKHRDKPIREQAENIIHLFTLTNLGAPAAFKYFDTTIDRKRYTSTKEVLDATLIHQSITGLYETRIDLSQLGGDGGGGGGGSGSSGGTLGDQGSRGSDPLPEPRVTLTVEGIPTEFLVNTGAEHSVLTKPMGKMGSKRTVVAGATGSKVYPWTTKRLLKIGQKQVTHSFLVIPECPAPLLGRDLLTKLKAQIQFSTEGPQVTWEDRPAMCLVLNLEEEYRLHEKPVPPSIDPSWLQLFPMVWAEKAGMGLANQVPPVVVELKSDASPVAVRQYPMSKEAREGIRPHIQRFLDLGILVPCQSPWNTPLLPVKKPGTNDYRPVQDLREVNKRVQDIHPTVPNPYNLLSSLPPSHTWYSVLDLKDAFFCLKLHPNSQPLFAFEWRDPEKGNTGQLTWTRLPQGFKNSPTLFNEALHRDLASFRALNPQVVMLQYVDDLLVAAPTYRDCKEGTRRLLQELSKLGYRVSAKKAQLCREEVTYLGYLLKGGKRWLTPARKATVMKIPTPTTPRQVREFLGKAGFCRLFIPGFASLAAPLYPLTRPKVPFTWTEAHQEAFGRIKEALLSAPALALPDLTKPFALYVDEKEGVARGVLTQTLGPWRRPVAYLSKKLDPVASGWPTCLKAIAAVALLLKDADKLTLGQNVLVIAPHNLESIVRQPPDRWMTNARMTHYQSLLLNERVSFAPPAILNPATLLPVESDDTPIHICSEILAEETGTRPDLRDQPLPGVPAWYTDGSSFIMDGRRQAGAAIVDNKRTVWASNLPEGTSAQKAELIALTQALRLAEGKSINIYTDSRYAFATAHVHGAIYKQRGWLTSAGKDIKNKEEILALLEAIHLPKRVAIIHCPGHQRGTDPVATGNRKADEAAKQAAQSTRILTETTKNAGKRTADGSEFEKRTADGSEFESPKKKAKVE

SEQ ID NO: 1776 - protein, 2210 aa, synthetic construct
MPAAKRVKLDGGDKKYSIGLDIGTNSVGWAVITDEYKVPSKKFKVLGNTDRHSIKKNLIGALLFDSGETAEATRLKRTARRRYTRRKNRICYLQEIFSNEMAKVDDSFFHRLEESFLVEEDKKHERHPIFGNIVDEVAYHEKYPTIYHLRKKLVDSTDKADLRLIYLALAHMIKFRGHFLIEGDLNPDNSDVDKLFIQLVQTYNQLFEENPINASGVDAKAILSARLSKSRRLENLIAQLPGEKKNGLFGNLIALSLGLTPNFKSNFDLAEDAKLQLSKDTYDDDLDNLLAQIGDQYADLFLAAKNLSDAILLSDILRVNTEITKAPLSASMIKRYDEHHQDLTLLKALVRQQLPEKYKEIFFDQSKNGYAGYIDGGASQEEFYKFIKPILEKMDGTEELLVKLNREDLLRKQRTFDNGSIPHQIHLGELHAILRRQEDFYPFLKDNREKIEKILTFRIPYYVGPLARGNSRFAWMTRKSEETITPWNFEEVVDKGASAQSFIERMTNFDKNLPNEKVLPKHSLLYEYFTVYNELTKVKYVTEGMRKPAFLSGEQKKAIVDLLFKTNRKVTVKQLKEDYFKKIECFDSVEISGVEDRFNASLGTYHDLLKIIKDKDFLDNEENEDILEDIVLTLTLFEDREMIEERLKTYAHLFDDKVMKQLKRRRYTGWGRLSRKLINGIRDKQSGKTILDFLKSDGFANRNFMQLIHDDSLTFKEDIQKAQVSGQGDSLHEHIANLAGSPAIKKGILQTVKVVDELVKVMGRHKPENIVIEMARENQTTQKGQKNSRERMKRIEEGIKELGSQILKEHPVENTQLQNEKLYLYYLQNGRDMYVDQELDINRLSDYDVDHIVPQSFLKDDSIDNKVLTRSDKARGKSDNVPSEEVVKKMKNYWRQLLNAKLITQRKFDNLTKAERGGLSELDKAGFIKRQLVETRQITKHVAQILDSRMNTKYDENDKLIREVKVITLKSKLVSDFRKDFQFYKVREINNYHHAHDAYLNAVVGTALIKKYPKLESEFVYGDYKVYDVRKMIAKSEQEIGKATAKYFFYSNIMNFFKTEITLANGEIRKRPLIETNGETGEIVWDKGRDFATVRKVLSMPQVNIVKKTEVQTGGFSKESILPKRNSDKLIARKKDWDPKKYGGFDSPTVAYSVLVVAKVEKGKSKKLKSVKELLGITIMERSSFEKNPIDFLEAKGYKEVKKDLIIKLPKYSLFELENGRKRMLASAGELQKGNELALPSKYVNFLYLASHYEKLKGSPEDNEQKQLFVEQHKHYLDEIIEQISEFSKRVILADANLDKVLSAYNKHRDKPIREQAENIIHLFTLTNLGAPAAFKYFDTTIDRKRYTSTKEVLDATLIHQSITGLYETRIDLSQLGGDGGGSSGGTLGDQGSRGSDPLPEPRVTLTVEGIPTEFLVNTGAEHSVLTKPMGKMGSKRTVVAGATGSKVYPWTTKRLLKIGQKQVTHSFLVIPECPAPLLGRDLLTKLKAQIQFSTEGPQVTWEDRPAMCLVLNLEEEYRLHEKPVPPSIDPSWLQLFPMVWAEKAGMGLANQVPPVVVELKSDASPVAVRQYPMSKEAREGIRPHIQRFLDLGILVPCQSPWNTPLLPVKKPGTNDYRPVQDLREVNKRVQDIHPTVPNPYNLLSSLPPSHTWYSVLDLKDAFFCLKLHPNSQPLFAFEWRDPEKGNTGQLTWTRLPQGFKNSPTLFNEALHRDLASFRALNPQVVMLQYVDDLLVAAPTYRDCKEGTRRLLQELSKLGYRVSAKKAQLCREEVTYLGYLLKGGKRWLTPARKATVMKIPTPTTPRQVREFLGKAGFCRLFIPGFASLAAPLYPLTRPKVPFTWTEAHQEAFGRIKEALLSAPALALPDLTKPFALYVDEKEGVARGVLTQTLGPWRRPVAYLSKKLDPVASGWPTCLKAIAAVALLLKDADKLTLGQNVLVIAPHNLESIVRQPPDRWMTNARMTHYQSLLLNERVSFAPPAILNPATLLPVESDDTPIHICSEILAEETGTRPDLRDQPLPGVPAWYTDGSSFIMDGRRQAGAAIVDNKRTVWASNLPEGTSAQKAELIALTQALRLAEGKSINIYTDSRYAFATAHVHGAIYKQRGWLTSAGKDIKNKEEILALLEAIHLPKRVAIIHCPGHQRGTDPVATGNRKADEAAKQAAQSTRILTETTKNAGKRTADGSEFEKRTADGSEFESPKKKAKVE

SEQ ID NO: 1777 - protein, 2222 aa, synthetic construct
MPAAKRVKLDGGDKKYSIGLDIGTNSVGWAVITDEYKVPSKKFKVLGNTDRHSIKKNLIGALLFDSGETAEATRLKRTARRRYTRRKNRICYLQEIFSNEMAKVDDSFFHRLEESFLVEEDKKHERHPIFGNIVDEVAYHEKYPTIYHLRKKLVDSTDKADLRLIYLALAHMIKFRGHFLIEGDLNPDNSDVDKLFIQLVQTYNQLFEENPINASGVDAKAILSARLSKSRRLENLIAQLPGEKKNGLFGNLIALSLGLTPNFKSNFDLAEDAKLQLSKDTYDDDLDNLLAQIGDQYADLFLAAKNLSDAILLSDILRVNTEITKAPLSASMIKRYDEHHQDLTLLKALVRQQLPEKYKEIFFDQSKNGYAGYIDGGASQEEFYKFIKPILEKMDGTEELLVKLNREDLLRKQRTFDNGSIPHQIHLGELHAILRRQEDFYPFLKDNREKIEKILTFRIPYYVGPLARGNSRFAWMTRKSEETITPWNFEEVVDKGASAQSFIERMTNFDKNLPNEKVLPKHSLLYEYFTVYNELTKVKYVTEGMRKPAFLSGEQKKAIVDLLFKTNRKVTVKQLKEDYFKKIECFDSVEISGVEDRFNASLGTYHDLLKIIKDKDFLDNEENEDILEDIVLTLTLFEDREMIEERLKTYAHLFDDKVMKQLKRRRYTGWGRLSRKLINGIRDKQSGKTILDFLKSDGFANRNFMQLIHDDSLTFKEDIQKAQVSGQGDSLHEHIANLAGSPAIKKGILQTVKVVDELVKVMGRHKPENIVIEMARENQTTQKGQKNSRERMKRIEEGIKELGSQILKEHPVENTQLQNEKLYLYYLQNGRDMYVDQELDINRLSDYDVDHIVPQSFLKDDSIDNKVLTRSDKARGKSDNVPSEEVVKKMKNYWRQLLNAKLITQRKFDNLTKAERGGLSELDKAGFIKRQLVETRQITKHVAQILDSRMNTKYDENDKLIREVKVITLKSKLVSDFRKDFQFYKVREINNYHHAHDAYLNAVVGTALIKKYPKLESEFVYGDYKVYDVRKMIAKSEQEIGKATAKYFFYSNIMNFFKTEITLANGEIRKRPLIETNGETGEIVWDKGRDFATVRKVLSMPQVNIVKKTEVQTGGFSKESILPKRNSDKLIARKKDWDPKKYGGFDSPTVAYSVLVVAKVEKGKSKKLKSVKELLGITIMERSSFEKNPIDFLEAKGYKEVKKDLIIKLPKYSLFELENGRKRMLASAGELQKGNELALPSKYVNFLYLASHYEKLKGSPEDNEQKQLFVEQHKHYLDEIIEQISEFSKRVILADANLDKVLSAYNKHRDKPIREQAENIIHLFTLTNLGAPAAFKYFDTTIDRKRYTSTKEVLDATLIHQSITGLYETRIDLSQLGGDGGGGGGSEAAAKGGGGSGGTLGDQGSRGSDPLPEPRVTLTVEGIPTEFLVNTGAEHSVLTKPMGKMGSKRTVVAGATGSKVYPWTTKRLLKIGQKQVTHSFLVIPECPAPLLGRDLLTKLKAQIQFSTEGPQVTWEDRPAMCLVLNLEEEYRLHEKPVPPSIDPSWLQLFPMVWAEKAGMGLANQVPPVVVELKSDASPVAVRQYPMSKEAREGIRPHIQRFLDLGILVPCQSPWNTPLLPVKKPGTNDYRPVQDLREVNKRVQDIHPTVPNPYNLLSSLPPSHTWYSVLDLKDAFFCLKLHPNSQPLFAFEWRDPEKGNTGQLTWTRLPQGFKNSPTLFNEALHRDLASFRALNPQVVMLQYVDDLLVAAPTYRDCKEGTRRLLQELSKLGYRVSAKKAQLCREEVTYLGYLLKGGKRWLTPARKATVMKIPTPTTPRQVREFLGKAGFCRLFIPGFASLAAPLYPLTRPKVPFTWTEAHQEAFGRIKEALLSAPALALPDLTKPFALYVDEKEGVARGVLTQTLGPWRRPVAYLSKKLDPVASGWPTCLKAIAAVALLLKDADKLTLGQNVLVIAPHNLESIVRQPPDRWMTNARMTHYQSLLLNERVSFAPPAILNPATLLPVESDDTPIHICSEILAEETGTRPDLRDQPLPGVPAWYTDGSSFIMDGRRQAGAAIVDNKRTVWASNLPEGTSAQKAELIALTQALRLAEGKSINIYTDSRYAFATAHVHGAIYKQRGWLTSAGKDIKNKEEILALLEAIHLPKRVAIIHCPGHQRGTDPVATGNRKADEAAKQAAQSTRILTETTKNAGKRTADGSEFEKRTADGSEFESPKKKAKVE

SEQ ID NO: 1778 - protein, 2237 aa, synthetic construct
MPAAKRVKLDGGDKKYSIGLDIGTNSVGWAVITDEYKVPSKKFKVLGNTDRHSIKKNLIGALLFDSGETAEATRLKRTARRRYTRRKNRICYLQEIFSNEMAKVDDSFFHRLEESFLVEEDKKHERHPIFGNIVDEVAYHEKYPTIYHLRKKLVDSTDKADLRLIYLALAHMIKFRGHFLIEGDLNPDNSDVDKLFIQLVQTYNQLFEENPINASGVDAKAILSARLSKSRRLENLIAQLPGEKKNGLFGNLIALSLGLTPNFKSNFDLAEDAKLQLSKDTYDDDLDNLLAQIGDQYADLFLAAKNLSDAILLSDILRVNTEITKAPLSASMIKRYDEHHQDLTLLKALVRQQLPEKYKEIFFDQSKNGYAGYIDGGASQEEFYKFIKPILEKMDGTEELLVKLNREDLLRKQRTFDNGSIPHQIHLGELHAILRRQEDFYPFLKDNREKIEKILTFRIPYYVGPLARGNSRFAWMTRKSEETITPWNFEEVVDKGASAQSFIERMTNFDKNLPNEKVLPKHSLLYEYFTVYNELTKVKYVTEGMRKPAFLSGEQKKAIVDLLFKTNRKVTVKQLKEDYFKKIECFDSVEISGVEDRFNASLGTYHDLLKIIKDKDFLDNEENEDILEDIVLTLTLFEDREMIEERLKTYAHLFDDKVMKQLKRRRYTGWGRLSRKLINGIRDKQSGKTILDFLKSDGFANRNFMQLIHDDSLTFKEDIQKAQVSGQGDSLHEHIANLAGSPAIKKGILQTVKVVDELVKVMGRHKPENIVIEMARENQTTQKGQKNSRERMKRIEEGIKELGSQILKEHPVENTQLQNEKLYLYYLQNGRDMYVDQELDINRLSDYDVDHIVPQSFLKDDSIDNKVLTRSDKARGKSDNVPSEEVVKKMKNYWRQLLNAKLITQRKFDNLTKAERGGLSELDKAGFIKRQLVETRQITKHVAQILDSRMNTKYDENDKLIREVKVITLKSKLVSDFRKDFQFYKVREINNYHHAHDAYLNAVVGTALIKKYPKLESEFVYGDYKVYDVRKMIAKSEQEIGKATAKYFFYSNIMNFFKTEITLANGEIRKRPLIETNGETGEIVWDKGRDFATVRKVLSMPQVNIVKKTEVQTGGFSKESILPKRNSDKLIARKKDWDPKKYGGFDSPTVAYSVLVVAKVEKGKSKKLKSVKELLGITIMERSSFEKNPIDFLEAKGYKEVKKDLIIKLPKYSLFELENGRKRMLASAGELQKGNELALPSKYVNFLYLASHYEKLKGSPEDNEQKQLFVEQHKHYLDEIIEQISEFSKRVILADANLDKVLSAYNKHRDKPIREQAENIIHLFTLTNLGAPAAFKYFDTTIDRKRYTSTKEVLDATLIHQSITGLYETRIDLSQLGGDGGEAAAKEAAAKEAAAKEAAAKEAAAKEAAAKGGTLGDQGSRGSDPLPEPRVTLTVEGIPTEFLVNTGAEHSVLTKPMGKMGSKRTVVAGATGSKVYPWTTKRLLKIGQKQVTHSFLVIPECPAPLLGRDLLTKLKAQIQFSTEGPQVTWEDRPAMCLVLNLEEEYRLHEKPVPPSIDPSWLQLFPMVWAEKAGMGLANQVPPVVVELKSDASPVAVRQYPMSKEAREGIRPHIQRFLDLGILVPCQSPWNTPLLPVKKPGTNDYRPVQDLREVNKRVQDIHPTVPNPYNLLSSLPPSHTWYSVLDLKDAFFCLKLHPNSQPLFAFEWRDPEKGNTGQLTWTRLPQGFKNSPTLFNEALHRDLASFRALNPQVVMLQYVDDLLVAAPTYRDCKEGTRRLLQELSKLGYRVSAKKAQLCREEVTYLGYLLKGGKRWLTPARKATVMKIPTPTTPRQVREFLGKAGFCRLFIPGFASLAAPLYPLTRPKVPFTWTEAHQEAFGRIKEALLSAPALALPDLTKPFALYVDEKEGVARGVLTQTLGPWRRPVAYLSKKLDPVASGWPTCLKAIAAVALLLKDADKLTLGQNVLVIAPHNLESIVRQPPDRWMTNARMTHYQSLLLNERVSFAPPAILNPATLLPVESDDTPIHICSEILAEETGTRPDLRDQPLPGVPAWYTDGSSFIMDGRRQAGAAIVDNKRTVWASNLPEGTSAQKAELIALTQALRLAEGKSINIYTDSRYAFATAHVHGAIYKQRGWLTSAGKDIKNKEEILALLEAIHLPKRVAIIHCPGHQRGTDPVATGNRKADEAAKQAAQSTRILTETTKNAGKRTADGSEFEKRTADGSEFESPKKKAKVE

SEQ ID NO: 1779 - protein, 2216 aa, synthetic construct
MPAAKRVKLDGGDKKYSIGLDIGTNSVGWAVITDEYKVPSKKFKVLGNTDRHSIKKNLIGALLFDSGETAEATRLKRTARRRYTRRKNRICYLQEIFSNEMAKVDDSFFHRLEESFLVEEDKKHERHPIFGNIVDEVAYHEKYPTIYHLRKKLVDSTDKADLRLIYLALAHMIKFRGHFLIEGDLNPDNSDVDKLFIQLVQTYNQLFEENPINASGVDAKAILSARLSKSRRLENLIAQLPGEKKNGLFGNLIALSLGLTPNFKSNFDLAEDAKLQLSKDTYDDDLDNLLAQIGDQYADLFLAAKNLSDAILLSDILRVNTEITKAPLSASMIKRYDEHHQDLTLLKALVRQQLPEKYKEIFFDQSKNGYAGYIDGGASQEEFYKFIKPILEKMDGTEELLVKLNREDLLRKQRTFDNGSIPHQIHLGELHAILRRQEDFYPFLKDNREKIEKILTFRIPYYVGPLARGNSRFAWMTRKSEETITPWNFEEVVDKGASAQSFIERMTNFDKNLPNEKVLPKHSLLYEYFTVYNELTKVKYVTEGMRKPAFLSGEQKKAIVDLLFKTNRKVTVKQLKEDYFKKIECFDSVEISGVEDRFNASLGTYHDLLKIIKDKDFLDNEENEDILEDIVLTLTLFEDREMIEERLKTYAHLFDDKVMKQLKRRRYTGWGRLSRKLINGIRDKQSGKTILDFLKSDGFANRNFMQLIHDDSLTFKEDIQKAQVSGQGDSLHEHIANLAGSPAIKKGILQTVKVVDELVKVMGRHKPENIVIEMARENQTTQKGQKNSRERMKRIEEGIKELGSQILKEHPVENTQLQNEKLYLYYLQNGRDMYVDQELDINRLSDYDVDHIVPQSFLKDDSIDNKVLTRSDKARGKSDNVPSEEVVKKMKNYWRQLLNAKLITQRKFDNLTKAERGGLSELDKAGFIKRQLVETRQITKHVAQILDSRMNTKYDENDKLIREVKVITLKSKLVSDFRKDFQFYKVREINNYHHAHDAYLNAVVGTALIKKYPKLESEFVYGDYKVYDVRKMIAKSEQEIGKATAKYFFYSNIMNFFKTEITLANGEIRKRPLIETNGETGEIVWDKGRDFATVRKVLSMPQVNIVKKTEVQTGGFSKESILPKRNSDKLIARKKDWDPKKYGGFDSPTVAYSVLVVAKVEKGKSKKLKSVKELLGITIMERSSFEKNPIDFLEAKGYKEVKKDLIIKLPKYSLFELENGRKRMLASAGELQKGNELALPSKYVNFLYLASHYEKLKGSPEDNEQKQLFVEQHKHYLDEIIEQISEFSKRVILADANLDKVLSAYNKHRDKPIREQAENIIHLFTLTNLGAPAAFKYFDTTIDRKRYTSTKEVLDATLIHQSITGLYETRIDLSQLGGDGGGGSPAPGGGGGTLGDQGSRGSDPLPEPRVTLTVEGIPTEFLVNTGAEHSVLTKPMGKMGSKRTVVAGATGSKVYPWTTKRLLKIGQKQVTHSFLVIPECPAPLLGRDLLTKLKAQIQFSTEGPQVTWEDRPAMCLVLNLEEEYRLHEKPVPPSIDPSWLQLFPMVWAEKAGMGLANQVPPVVVELKSDASPVAVRQYPMSKEAREGIRPHIQRFLDLGILVPCQSPWNTPLLPVKKPGTNDYRPVQDLREVNKRVQDIHPTVPNPYNLLSSLPPSHTWYSVLDLKDAFFCLKLHPNSQPLFAFEWRDPEKGNTGQLTWTRLPQGFKNSPTLFNEALHRDLASFRALNPQVVMLQYVDDLLVAAPTYRDCKEGTRRLLQELSKLGYRVSAKKAQLCREEVTYLGYLLKGGKRWLTPARKATVMKIPTPTTPRQVREFLGKAGFCRLFIPGFASLAAPLYPLTRPKVPFTWTEAHQEAFGRIKEALLSAPALALPDLTKPFALYVDEKEGVARGVLTQTLGPWRRPVAYLSKKLDPVASGWPTCLKAIAAVALLLKDADKLTLGQNVLVIAPHNLESIVRQPPDRWMTNARMTHYQSLLLNERVSFAPPAILNPATLLPVESDDTPIHICSEILAEETGTRPDLRDQPLPGVPAWYTDGSSFIMDGRRQAGAAIVDNKRTVWASNLPEGTSAQKAELIALTQALRLAEGKSINIYTDSRYAFATAHVHGAIYKQRGWLTSAGKDIKNKEEILALLEAIHLPKRVAIIHCPGHQRGTDPVATGNRKADEAAKQAAQSTRILTETTKNAGKRTADGSEFEKRTADGSEFESPKKKAKVE

SEQ ID NO: 1780 - protein, 2213 aa, synthetic construct
MPAAKRVKLDGGDKKYSIGLDIGTNSVGWAVITDEYKVPSKKFKVLGNTDRHSIKKNLIGALLFDSGETAEATRLKRTARRRYTRRKNRICYLQEIFSNEMAKVDDSFFHRLEESFLVEEDKKHERHPIFGNIVDEVAYHEKYPTIYHLRKKLVDSTDKADLRLIYLALAHMIKFRGHFLIEGDLNPDNSDVDKLFIQLVQTYNQLFEENPINASGVDAKAILSARLSKSRRLENLIAQLPGEKKNGLFGNLIALSLGLTPNFKSNFDLAEDAKLQLSKDTYDDDLDNLLAQIGDQYADLFLAAKNLSDAILLSDILRVNTEITKAPLSASMIKRYDEHHQDLTLLKALVRQQLPEKYKEIFFDQSKNGYAGYIDGGASQEEFYKFIKPILEKMDGTEELLVKLNREDLLRKQRTFDNGSIPHQIHLGELHAILRRQEDFYPFLKDNREKIEKILTFRIPYYVGPLARGNSRFAWMTRKSEETITPWNFEEVVDKGASAQSFIERMTNFDKNLPNEKVLPKHSLLYEYFTVYNELTKVKYVTEGMRKPAFLSGEQKKAIVDLLFKTNRKVTVKQLKEDYFKKIECFDSVEISGVEDRFNASLGTYHDLLKIIKDKDFLDNEENEDILEDIVLTLTLFEDREMIEERLKTYAHLFDDKVMKQLKRRRYTGWGRLSRKLINGIRDKQSGKTILDFLKSDGFANRNFMQLIHDDSLTFKEDIQKAQVSGQGDSLHEHIANLAGSPAIKKGILQTVKVVDELVKVMGRHKPENIVIEMARENQTTQKGQKNSRERMKRIEEGIKELGSQILKEHPVENTQLQNEKLYLYYLQNGRDMYVDQELDINRLSDYDVDHIVPQSFLKDDSIDNKVLTRSDKARGKSDNVPSEEVVKKMKNYWRQLLNAKLITQRKFDNLTKAERGGLSELDKAGFIKRQLVETRQITKHVAQILDSRMNTKYDENDKLIREVKVITLKSKLVSDFRKDFQFYKVREINNYHHAHDAYLNAVVGTALIKKYPKLESEFVYGDYKVYDVRKMIAKSEQEIGKATAKYFFYSNIMNFFKTEITLANGEIRKRPLIETNGETGEIVWDKGRDFATVRKVLSMPQVNIVKKTEVQTGGFSKESILPKRNSDKLIARKKDWDPKKYGGFDSPTVAYSVLVVAKVEKGKSKKLKSVKELLGITIMERSSFEKNPIDFLEAKGYKEVKKDLIIKLPKYSLFELENGRKRMLASAGELQKGNELALPSKYVNFLYLASHYEKLKGSPEDNEQKQLFVEQHKHYLDEIIEQISEFSKRVILADANLDKVLSAYNKHRDKPIREQAENIIHLFTLTNLGAPAAFKYFDTTIDRKRYTSTKEVLDATLIHQSITGLYETRIDLSQLGGDGGPAPGSSGGTLGDQGSRGSDPLPEPRVTLTVEGIPTEFLVNTGAEHSVLTKPMGKMGSKRTVVAGATGSKVYPWTTKRLLKIGQKQVTHSFLVIPECPAPLLGRDLLTKLKAQIQFSTEGPQVTWEDRPAMCLVLNLEEEYRLHEKPVPPSIDPSWLQLFPMVWAEKAGMGLANQVPPVVVELKSDASPVAVRQYPMSKEAREGIRPHIQRFLDLGILVPCQSPWNTPLLPVKKPGTNDYRPVQDLREVNKRVQDIHPTVPNPYNLLSSLPPSHTWYSVLDLKDAFFCLKLHPNSQPLFAFEWRDPEKGNTGQLTWTRLPQGFKNSPTLFNEALHRDLASFRALNPQVVMLQYVDDLLVAAPTYRDCKEGTRRLLQELSKLGYRVSAKKAQLCREEVTYLGYLLKGGKRWLTPARKATVMKIPTPTTPRQVREFLGKAGFCRLFIPGFASLAAPLYPLTRPKVPFTWTEAHQEAFGRIKEALLSAPALALPDLTKPFALYVDEKEGVARGVLTQTLGPWRRPVAYLSKKLDPVASGWPTCLKAIAAVALLLKDADKLTLGQNVLVIAPHNLESIVRQPPDRWMTNARMTHYQSLLLNERVSFAPPAILNPATLLPVESDDTPIHICSEILAEETGTRPDLRDQPLPGVPAWYTDGSSFIMDGRRQAGAAIVDNKRTVWASNLPEGTSAQKAELIALTQALRLAEGKSINIYTDSRYAFATAHVHGAIYKQRGWLTSAGKDIKNKEEILALLEAIHLPKRVAIIHCPGHQRGTDPVATGNRKADEAAKQAAQSTRILTETTKNAGKRTADGSEFEKRTADGSEFESPKKKAKVE

SEQ ID NO: 1781 - protein, 2222 aa, synthetic construct
MPAAKRVKLDGGDKKYSIGLDIGTNSVGWAVITDEYKVPSKKFKVLGNTDRHSIKKNLIGALLFDSGETAEATRLKRTARRRYTRRKNRICYLQEIFSNEMAKVDDSFFHRLEESFLVEEDKKHERHPIFGNIVDEVAYHEKYPTIYHLRKKLVDSTDKADLRLIYLALAHMIKFRGHFLIEGDLNPDNSDVDKLFIQLVQTYNQLFEENPINASGVDAKAILSARLSKSRRLENLIAQLPGEKKNGLFGNLIALSLGLTPNFKSNFDLAEDAKLQLSKDTYDDDLDNLLAQIGDQYADLFLAAKNLSDAILLSDILRVNTEITKAPLSASMIKRYDEHHQDLTLLKALVRQQLPEKYKEIFFDQSKNGYAGYIDGGASQEEFYKFIKPILEKMDGTEELLVKLNREDLLRKQRTFDNGSIPHQIHLGELHAILRRQEDFYPFLKDNREKIEKILTFRIPYYVGPLARGNSRFAWMTRKSEETITPWNFEEVVDKGASAQSFIERMTNFDKNLPNEKVLPKHSLLYEYFTVYNELTKVKYVTEGMRKPAFLSGEQKKAIVDLLFKTNRKVTVKQLKEDYFKKIECFDSVEISGVEDRFNASLGTYHDLLKIIKDKDFLDNEENEDILEDIVLTLTLFEDREMIEERLKTYAHLFDDKVMKQLKRRRYTGWGRLSRKLINGIRDKQSGKTILDFLKSDGFANRNFMQLIHDDSLTFKEDIQKAQVSGQGDSLHEHIANLAGSPAIKKGILQTVKVVDELVKVMGRHKPENIVIEMARENQTTQKGQKNSRERMKRIEEGIKELGSQILKEHPVENTQLQNEKLYLYYLQNGRDMYVDQELDINRLSDYDVDHIVPQSFLKDDSIDNKVLTRSDKARGKSDNVPSEEVVKKMKNYWRQLLNAKLITQRKFDNLTKAERGGLSELDKAGFIKRQLVETRQITKHVAQILDSRMNTKYDENDKLIREVKVITLKSKLVSDFRKDFQFYKVREINNYHHAHDAYLNAVVGTALIKKYPKLESEFVYGDYKVYDVRKMIAKSEQEIGKATAKYFFYSNIMNFFKTEITLANGEIRKRPLIETNGETGEIVWDKGRDFATVRKVLSMPQVNIVKKTEVQTGGFSKESILPKRNSDKLIARKKDWDPKKYGGFDSPTVAYSVLVVAKVEKGKSKKLKSVKELLGITIMERSSFEKNPIDFLEAKGYKEVKKDLIIKLPKYSLFELENGRKRMLASAGELQKGNELALPSKYVNFLYLASHYEKLKGSPEDNEQKQLFVEQHKHYLDEIIEQISEFSKRVILADANLDKVLSAYNKHRDKPIREQAENIIHLFTLTNLGAPAAFKYFDTTIDRKRYTSTKEVLDATLIHQSITGLYETRIDLSQLGGDGGEAAAKGGGGSEAAAKGGTLGDQGSRGSDPLPEPRVTLTVEGIPTEFLVNTGAEHSVLTKPMGKMGSKRTVVAGATGSKVYPWTTKRLLKIGQKQVTHSFLVIPECPAPLLGRDLLTKLKAQIQFSTEGPQVTWEDRPAMCLVLNLEEEYRLHEKPVPPSIDPSWLQLFPMVWAEKAGMGLANQVPPVVVELKSDASPVAVRQYPMSKEAREGIRPHIQRFLDLGILVPCQSPWNTPLLPVKKPGTNDYRPVQDLREVNKRVQDIHPTVPNPYNLLSSLPPSHTWYSVLDLKDAFFCLKLHPNSQPLFAFEWRDPEKGNTGQLTWTRLPQGFKNSPTLFNEALHRDLASFRALNPQVVMLQYVDDLLVAAPTYRDCKEGTRRLLQELSKLGYRVSAKKAQLCREEVTYLGYLLKGGKRWLTPARKATVMKIPTPTTPRQVREFLGKAGFCRLFIPGFASLAAPLYPLTRPKVPFTWTEAHQEAFGRIKEALLSAPALALPDLTKPFALYVDEKEGVARGVLTQTLGPWRRPVAYLSKKLDPVASGWPTCLKAIAAVALLLKDADKLTLGQNVLVIAPHNLESIVRQPPDRWMTNARMTHYQSLLLNERVSFAPPAILNPATLLPVESDDTPIHICSEILAEETGTRPDLRDQPLPGVPAWYTDGSSFIMDGRRQAGAAIVDNKRTVWASNLPEGTSAQKAELIALTQALRLAEGKSINIYTDSRYAFATAHVHGAIYKQRGWLTSAGKDIKNKEEILALLEAIHLPKRVAIIHCPGHQRGTDPVATGNRKADEAAKQAAQSTRILTETTKNAGKRTADGSEFEKRTADGSEFESPKKKAKVE

SEQ ID NO: 1782 - protein, 2219 aa, synthetic construct
MPAAKRVKLDGGDKKYSIGLDIGTNSVGWAVITDEYKVPSKKFKVLGNTDRHSIKKNLIGALLFDSGETAEATRLKRTARRRYTRRKNRICYLQEIFSNEMAKVDDSFFHRLEESFLVEEDKKHERHPIFGNIVDEVAYHEKYPTIYHLRKKLVDSTDKADLRLIYLALAHMIKFRGHFLIEGDLNPDNSDVDKLFIQLVQTYNQLFEENPINASGVDAKAILSARLSKSRRLENLIAQLPGEKKNGLFGNLIALSLGLTPNFKSNFDLAEDAKLQLSKDTYDDDLDNLLAQIGDQYADLFLAAKNLSDAILLSDILRVNTEITKAPLSASMIKRYDEHHQDLTLLKALVRQQLPEKYKEIFFDQSKNGYAGYIDGGASQEEFYKFIKPILEKMDGTEELLVKLNREDLLRKQRTFDNGSIPHQIHLGELHAILRRQEDFYPFLKDNREKIEKILTFRIPYYVGPLARGNSRFAWMTRKSEETITPWNFEEVVDKGASAQSFIERMTNFDKNLPNEKVLPKHSLLYEYFTVYNELTKVKYVTEGMRKPAFLSGEQKKAIVDLLFKTNRKVTVKQLKEDYFKKIECFDSVEISGVEDRFNASLGTYHDLLKIIKDKDFLDNEENEDILEDIVLTLTLFEDREMIEERLKTYAHLFDDKVMKQLKRRRYTGWGRLSRKLINGIRDKQSGKTILDFLKSDGFANRNFMQLIHDDSLTFKEDIQKAQVSGQGDSLHEHIANLAGSPAIKKGILQTVKVVDELVKVMGRHKPENIVIEMARENQTTQKGQKNSRERMKRIEEGIKELGSQILKEHPVENTQLQNEKLYLYYLQNGRDMYVDQELDINRLSDYDVDHIVPQSFLKDDSIDNKVLTRSDKARGKSDNVPSEEVVKKMKNYWRQLLNAKLITQRKFDNLTKAERGGLSELDKAGFIKRQLVETRQITKHVAQILDSRMNTKYDENDKLIREVKVITLKSKLVSDFRKDFQFYKVREINNYHHAHDAYLNAVVGTALIKKYPKLESEFVYGDYKVYDVRKMIAKSEQEIGKATAKYFFYSNIMNFFKTEITLANGEIRKRPLIETNGETGEIVWDKGRDFATVRKVLSMPQVNIVKKTEVQTGGFSKESILPKRNSDKLIARKKDWDPKKYGGFDSPTVAYSVLVVAKVEKGKSKKLKSVKELLGITIMERSSFEKNPIDFLEAKGYKEVKKDLIIKLPKYSLFELENGRKRMLASAGELQKGNELALPSKYVNFLYLASHYEKLKGSPEDNEQKQLFVEQHKHYLDEIIEQISEFSKRVILADANLDKVLSAYNKHRDKPIREQAENIIHLFTLTNLGAPAAFKYFDTTIDRKRYTSTKEVLDATLIHQSITGLYETRIDLSQLGGDGGGSAGSAAGSGEFGGTLGDQGSRGSDPLPEPRVTLTVEGIPTEFLVNTGAEHSVLTKPMGKMGSKRTVVAGATGSKVYPWTTKRLLKIGQKQVTHSFLVIPECPAPLLGRDLLTKLKAQIQFSTEGPQVTWEDRPAMCLVLNLEEEYRLHEKPVPPSIDPSWLQLFPMVWAEKAGMGLANQVPPVVVELKSDASPVAVRQYPMSKEAREGIRPHIQRFLDLGILVPCQSPWNTPLLPVKKPGTNDYRPVQDLREVNKRVQDIHPTVPNPYNLLSSLPPSHTWYSVLDLKDAFFCLKLHPNSQPLFAFEWRDPEKGNTGQLTWTRLPQGFKNSPTLFNEALHRDLASFRALNPQVVMLQYVDDLLVAAPTYRDCKEGTRRLLQELSKLGYRVSAKKAQLCREEVTYLGYLLKGGKRWLTPARKATVMKIPTPTTPRQVREFLGKAGFCRLFIPGFASLAAPLYPLTRPKVPFTWTEAHQEAFGRIKEALLSAPALALPDLTKPFALYVDEKEGVARGVLTQTLGPWRRPVAYLSKKLDPVASGWPTCLKAIAAVALLLKDADKLTLGQNVLVIAPHNLESIVRQPPDRWMTNARMTHYQSLLLNERVSFAPPAILNPATLLPVESDDTPIHICSEILAEETGTRPDLRDQPLPGVPAWYTDGSSFIMDGRRQAGAAIVDNKRTVWASNLPEGTSAQKAELIALTQALRLAEGKSINIYTDSRYAFATAHVHGAIYKQRGWLTSAGKDIKNKEEILALLEAIHLPKRVAIIHCPGHQRGTDPVATGNRKADEAAKQAAQSTRILTETTKNAGKRTADGSEFEKRTADGSEFESPKKKAKVE

SEQ ID NO: 1783 - protein, 2218 aa, synthetic construct
MPAAKRVKLDGGDKKYSIGLDIGTNSVGWAVITDEYKVPSKKFKVLGNTDRHSIKKNLIGALLFDSGETAEATRLKRTARRRYTRRKNRICYLQEIFSNEMAKVDDSFFHRLEESFLVEEDKKHERHPIFGNIVDEVAYHEKYPTIYHLRKKLVDSTDKADLRLIYLALAHMIKFRGHFLIEGDLNPDNSDVDKLFIQLVQTYNQLFEENPINASGVDAKAILSARLSKSRRLENLIAQLPGEKKNGLFGNLIALSLGLTPNFKSNFDLAEDAKLQLSKDTYDDDLDNLLAQIGDQYADLFLAAKNLSDAILLSDILRVNTEITKAPLSASMIKRYDEHHQDLTLLKALVRQQLPEKYKEIFFDQSKNGYAGYIDGGASQEEFYKFIKPILEKMDGTEELLVKLNREDLLRKQRTFDNGSIPHQIHLGELHAILRRQEDFYPFLKDNREKIEKILTFRIPYYVGPLARGNSRFAWMTRKSEETITPWNFEEVVDKGASAQSFIERMTNFDKNLPNEKVLPKHSLLYEYFTVYNELTKVKYVTEGMRKPAFLSGEQKKAIVDLLFKTNRKVTVKQLKEDYFKKIECFDSVEISGVEDRFNASLGTYHDLLKIIKDKDFLDNEENEDILEDIVLTLTLFEDREMIEERLKTYAHLFDDKVMKQLKRRRYTGWGRLSRKLINGIRDKQSGKTILDFLKSDGFANRNFMQLIHDDSLTFKEDIQKAQVSGQGDSLHEHIANLAGSPAIKKGILQTVKVVDELVKVMGRHKPENIVIEMARENQTTQKGQKNSRERMKRIEEGIKELGSQILKEHPVENTQLQNEKLYLYYLQNGRDMYVDQELDINRLSDYDVDHIVPQSFLKDDSIDNKVLTRSDKARGKSDNVPSEEVVKKMKNYWRQLLNAKLITQRKFDNLTKAERGGLSELDKAGFIKRQLVETRQITKHVAQILDSRMNTKYDENDKLIREVKVITLKSKLVSDFRKDFQFYKVREINNYHHAHDAYLNAVVGTALIKKYPKLESEFVYGDYKVYDVRKMIAKSEQEIGKATAKYFFYSNIMNFFKTEITLANGEIRKRPLIETNGETGEIVWDKGRDFATVRKVLSMPQVNIVKKTEVQTGGFSKESILPKRNSDKLIARKKDWDPKKYGGFDSPTVAYSVLVVAKVEKGKSKKLKSVKELLGITIMERSSFEKNPIDFLEAKGYKEVKKDLIIKLPKYSLFELENGRKRMLASAGELQKGNELALPSKYVNFLYLASHYEKLKGSPEDNEQKQLFVEQHKHYLDEIIEQISEFSKRVILADANLDKVLSAYNKHRDKPIREQAENIIHLFTLTNLGAPAAFKYFDTTIDRKRYTSTKEVLDATLIHQSITGLYETRIDLSQLGGDGGPAPAPAPAPAPGGTLGDQGSRGSDPLPEPRVTLTVEGIPTEFLVNTGAEHSVLTKPMGKMGSKRTVVAGATGSKVYPWTTKRLLKIGQKQVTHSFLVIPECPAPLLGRDLLTKLKAQIQFSTEGPQVTWEDRPAMCLVLNLEEEYRLHEKPVPPSIDPSWLQLFPMVWAEKAGMGLANQVPPVVVELKSDASPVAVRQYPMSKEAREGIRPHIQRFLDLGILVPCQSPWNTPLLPVKKPGTNDYRPVQDLREVNKRVQDIHPTVPNPYNLLSSLPPSHTWYSVLDLKDAFFCLKLHPNSQPLFAFEWRDPEKGNTGQLTWTRLPQGFKNSPTLFNEALHRDLASFRALNPQVVMLQYVDDLLVAAPTYRDCKEGTRRLLQELSKLGYRVSAKKAQLCREEVTYLGYLLKGGKRWLTPARKATVMKIPTPTTPRQVREFLGKAGFCRLFIPGFASLAAPLYPLTRPKVPFTWTEAHQEAFGRIKEALLSAPALALPDLTKPFALYVDEKEGVARGVLTQTLGPWRRPVAYLSKKLDPVASGWPTCLKAIAAVALLLKDADKLTLGQNVLVIAPHNLESIVRQPPDRWMTNARMTHYQSLLLNERVSFAPPAILNPATLLPVESDDTPIHICSEILAEETGTRPDLRDQPLPGVPAWYTDGSSFIMDGRRQAGAAIVDNKRTVWASNLPEGTSAQKAELIALTQALRLAEGKSINIYTDSRYAFATAHVHGAIYKQRGWLTSAGKDIKNKEEILALLEAIHLPKRVAIIHCPGHQRGTDPVATGNRKADEAAKQAAQSTRILTETTKNAGKRTADGSEFEKRTADGSEFESPKKKAKVE

SEQ ID NO: 1784 - protein, 2253 aa, synthetic construct
MPAAKRVKLDGGDKKYSIGLDIGTNSVGWAVITDEYKVPSKKFKVLGNTDRHSIKKNLIGALLFDSGETAEATRLKRTARRRYTRRKNRICYLQEIFSNEMAKVDDSFFHRLEESFLVEEDKKHERHPIFGNIVDEVAYHEKYPTIYHLRKKLVDSTDKADLRLIYLALAHMIKFRGHFLIEGDLNPDNSDVDKLFIQLVQTYNQLFEENPINASGVDAKAILSARLSKSRRLENLIAQLPGEKKNGLFGNLIALSLGLTPNFKSNFDLAEDAKLQLSKDTYDDDLDNLLAQIGDQYADLFLAAKNLSDAILLSDILRVNTEITKAPLSASMIKRYDEHHQDLTLLKALVRQQLPEKYKEIFFDQSKNGYAGYIDGGASQEEFYKFIKPILEKMDGTEELLVKLNREDLLRKQRTFDNGSIPHQIHLGELHAILRRQEDFYPFLKDNREKIEKILTFRIPYYVGPLARGNSRFAWMTRKSEETITPWNFEEVVDKGASAQSFIERMTNFDKNLPNEKVLPKHSLLYEYFTVYNELTKVKYVTEGMRKPAFLSGEQKKAIVDLLFKTNRKVTVKQLKEDYFKKIECFDSVEISGVEDRFNASLGTYHDLLKIIKDKDFLDNEENEDILEDIVLTLTLFEDREMIEERLKTYAHLFDDKVMKQLKRRRYTGWGRLSRKLINGIRDKQSGKTILDFLKSDGFANRNFMQLIHDDSLTFKEDIQKAQVSGQGDSLHEHIANLAGSPAIKKGILQTVKVVDELVKVMGRHKPENIVIEMARENQTTQKGQKNSRERMKRIEEGIKELGSQILKEHPVENTQLQNEKLYLYYLQNGRDMYVDQELDINRLSDYDVDHIVPQSFLKDDSIDNKVLTRSDKARGKSDNVPSEEVVKKMKNYWRQLLNAKLITQRKFDNLTKAERGGLSELDKAGFIKRQLVETRQITKHVAQILDSRMNTKYDENDKLIREVKVITLKSKLVSDFRKDFQFYKVREINNYHHAHDAYLNAVVGTALIKKYPKLESEFVYGDYKVYDVRKMIAKSEQEIGKATAKYFFYSNIMNFFKTEITLANGEIRKRPLIETNGETGEIVWDKGRDFATVRKVLSMPQVNIVKKTEVQTGGFSKESILPKRNSDKLIARKKDWDPKKYGGFDSPTVAYSVLVVAKVEKGKSKKLKSVKELLGITIMERSSFEKNPIDFLEAKGYKEVKKDLIIKLPKYSLFELENGRKRMLASAGELQKGNELALPSKYVNFLYLASHYEKLKGSPEDNEQKQLFVEQHKHYLDEIIEQISEFSKRVILADANLDKVLSAYNKHRDKPIREQAENIIHLFTLTNLGAPAAFKYFDTTIDRKRYTSTKEVLDATLIHQSITGLYETRIDLSQLGGDGGAEAAAKEAAAKEAAAKEAAAKALEAEAAAKEAAAKEAAAKEAAAKAGGTLGDQGSRGSDPLPEPRVTLTVEGIPTEFLVNTGAEHSVLTKPMGKMGSKRTVVAGATGSKVYPWTTKRLLKIGQKQVTHSFLVIPECPAPLLGRDLLTKLKAQIQFSTEGPQVTWEDRPAMCLVLNLEEEYRLHEKPVPPSIDPSWLQLFPMVWAEKAGMGLANQVPPVVVELKSDASPVAVRQYPMSKEAREGIRPHIQRFLDLGILVPCQSPWNTPLLPVKKPGTNDYRPVQDLREVNKRVQDIHPTVPNPYNLLSSLPPSHTWYSVLDLKDAFFCLKLHPNSQPLFAFEWRDPEKGNTGQLTWTRLPQGFKNSPTLFNEALHRDLASFRALNPQVVMLQYVDDLLVAAPTYRDCKEGTRRLLQELSKLGYRVSAKKAQLCREEVTYLGYLLKGGKRWLTPARKATVMKIPTPTTPRQVREFLGKAGFCRLFIPGFASLAAPLYPLTRPKVPFTWTEAHQEAFGRIKEALLSAPALALPDLTKPFALYVDEKEGVARGVLTQTLGPWRRPVAYLSKKLDPVASGWPTCLKAIAAVALLLKDADKLTLGQNVLVIAPHNLESIVRQPPDRWMTNARMTHYQSLLLNERVSFAPPAILNPATLLPVESDDTPIHICSEILAEETGTRPDLRDQPLPGVPAWYTDGSSFIMDGRRQAGAAIVDNKRTVWASNLPEGTSAQKAELIALTQALRLAEGKSINIYTDSRYAFATAHVHGAIYKQRGWLTSAGKDIKNKEEILALLEAIHLPKRVAIIHCPGHQRGTDPVATGNRKADEAAKQAAQSTRILTETTKNAGKRTADGSEFEKRTADGSEFESPKKKAKVE

SEQ ID NO: 1785 - protein, 2216 aa, synthetic construct
MPAAKRVKLDGGDKKYSIGLDIGTNSVGWAVITDEYKVPSKKFKVLGNTDRHSIKKNLIGALLFDSGETAEATRLKRTARRRYTRRKNRICYLQEIFSNEMAKVDDSFFHRLEESFLVEEDKKHERHPIFGNIVDEVAYHEKYPTIYHLRKKLVDSTDKADLRLIYLALAHMIKFRGHFLIEGDLNPDNSDVDKLFIQLVQTYNQLFEENPINASGVDAKAILSARLSKSRRLENLIAQLPGEKKNGLFGNLIALSLGLTPNFKSNFDLAEDAKLQLSKDTYDDDLDNLLAQIGDQYADLFLAAKNLSDAILLSDILRVNTEITKAPLSASMIKRYDEHHQDLTLLKALVRQQLPEKYKEIFFDQSKNGYAGYIDGGASQEEFYKFIKPILEKMDGTEELLVKLNREDLLRKQRTFDNGSIPHQIHLGELHAILRRQEDFYPFLKDNREKIEKILTFRIPYYVGPLARGNSRFAWMTRKSEETITPWNFEEVVDKGASAQSFIERMTNFDKNLPNEKVLPKHSLLYEYFTVYNELTKVKYVTEGMRKPAFLSGEQKKAIVDLLFKTNRKVTVKQLKEDYFKKIECFDSVEISGVEDRFNASLGTYHDLLKIIKDKDFLDNEENEDILEDIVLTLTLFEDREMIEERLKTYAHLFDDKVMKQLKRRRYTGWGRLSRKLINGIRDKQSGKTILDFLKSDGFANRNFMQLIHDDSLTFKEDIQKAQVSGQGDSLHEHIANLAGSPAIKKGILQTVKVVDELVKVMGRHKPENIVIEMARENQTTQKGQKNSRERMKRIEEGIKELGSQILKEHPVENTQLQNEKLYLYYLQNGRDMYVDQELDINRLSDYDVDHIVPQSFLKDDSIDNKVLTRSDKARGKSDNVPSEEVVKKMKNYWRQLLNAKLITQRKFDNLTKAERGGLSELDKAGFIKRQLVETRQITKHVAQILDSRMNTKYDENDKLIREVKVITLKSKLVSDFRKDFQFYKVREINNYHHAHDAYLNAVVGTALIKKYPKLESEFVYGDYKVYDVRKMIAKSEQEIGKATAKYFFYSNIMNFFKTEITLANGEIRKRPLIETNGETGEIVWDKGRDFATVRKVLSMPQVNIVKKTEVQTGGFSKESILPKRNSDKLIARKKDWDPKKYGGFDSPTVAYSVLVVAKVEKGKSKKLKSVKELLGITIMERSSFEKNPIDFLEAKGYKEVKKDLIIKLPKYSLFELENGRKRMLASAGELQKGNELALPSKYVNFLYLASHYEKLKGSPEDNEQKQLFVEQHKHYLDEIIEQISEFSKRVILADANLDKVLSAYNKHRDKPIREQAENIIHLFTLTNLGAPAAFKYFDTTIDRKRYTSTKEVLDATLIHQSITGLYETRIDLSQLGGDGGGGSGSSGGGGGTLGDQGSRGSDPLPEPRVTLTVEGIPTEFLVNTGAEHSVLTKPMGKMGSKRTVVAGATGSKVYPWTTKRLLKIGQKQVTHSFLVIPECPAPLLGRDLLTKLKAQIQFSTEGPQVTWEDRPAMCLVLNLEEEYRLHEKPVPPSIDPSWLQLFPMVWAEKAGMGLANQVPPVVVELKSDASPVAVRQYPMSKEAREGIRPHIQRFLDLGILVPCQSPWNTPLLPVKKPGTNDYRPVQDLREVNKRVQDIHPTVPNPYNLLSSLPPSHTWYSVLDLKDAFFCLKLHPNSQPLFAFEWRDPEKGNTGQLTWTRLPQGFKNSPTLFNEALHRDLASFRALNPQVVMLQYVDDLLVAAPTYRDCKEGTRRLLQELSKLGYRVSAKKAQLCREEVTYLGYLLKGGKRWLTPARKATVMKIPTPTTPRQVREFLGKAGFCRLFIPGFASLAAPLYPLTRPKVPFTWTEAHQEAFGRIKEALLSAPALALPDLTKPFALYVDEKEGVARGVLTQTLGPWRRPVAYLSKKLDPVASGWPTCLKAIAAVALLLKDADKLTLGQNVLVIAPHNLESIVRQPPDRWMTNARMTHYQSLLLNERVSFAPPAILNPATLLPVESDDTPIHICSEILAEETGTRPDLRDQPLPGVPAWYTDGSSFIMDGRRQAGAAIVDNKRTVWASNLPEGTSAQKAELIALTQALRLAEGKSINIYTDSRYAFATAHVHGAIYKQRGWLTSAGKDIKNKEEILALLEAIHLPKRVAIIHCPGHQRGTDPVATGNRKADEAAKQAAQSTRILTETTKNAGKRTADGSEFEKRTADGSEFESPKKKAKVE

SEQ ID NO: 1786 - protein, 2218 aa, synthetic construct
MPAAKRVKLDGGDKKYSIGLDIGTNSVGWAVITDEYKVPSKKFKVLGNTDRHSIKKNLIGALLFDSGETAEATRLKRTARRRYTRRKNRICYLQEIFSNEMAKVDDSFFHRLEESFLVEEDKKHERHPIFGNIVDEVAYHEKYPTIYHLRKKLVDSTDKADLRLIYLALAHMIKFRGHFLIEGDLNPDNSDVDKLFIQLVQTYNQLFEENPINASGVDAKAILSARLSKSRRLENLIAQLPGEKKNGLFGNLIALSLGLTPNFKSNFDLAEDAKLQLSKDTYDDDLDNLLAQIGDQYADLFLAAKNLSDAILLSDILRVNTEITKAPLSASMIKRYDEHHQDLTLLKALVRQQLPEKYKEIFFDQSKNGYAGYIDGGASQEEFYKFIKPILEKMDGTEELLVKLNREDLLRKQRTFDNGSIPHQIHLGELHAILRRQEDFYPFLKDNREKIEKILTFRIPYYVGPLARGNSRFAWMTRKSEETITPWNFEEVVDKGASAQSFIERMTNFDKNLPNEKVLPKHSLLYEYFTVYNELTKVKYVTEGMRKPAFLSGEQKKAIVDLLFKTNRKVTVKQLKEDYFKKIECFDSVEISGVEDRFNASLGTYHDLLKIIKDKDFLDNEENEDILEDIVLTLTLFEDREMIEERLKTYAHLFDDKVMKQLKRRRYTGWGRLSRKLINGIRDKQSGKTILDFLKSDGFANRNFMQLIHDDSLTFKEDIQKAQVSGQGDSLHEHIANLAGSPAIKKGILQTVKVVDELVKVMGRHKPENIVIEMARENQTTQKGQKNSRERMKRIEEGIKELGSQILKEHPVENTQLQNEKLYLYYLQNGRDMYVDQELDINRLSDYDVDHIVPQSFLKDDSIDNKVLTRSDKARGKSDNVPSEEVVKKMKNYWRQLLNAKLITQRKFDNLTKAERGGLSELDKAGFIKRQLVETRQITKHVAQILDSRMNTKYDENDKLIREVKVITLKSKLVSDFRKDFQFYKVREINNYHHAHDAYLNAVVGTALIKKYPKLESEFVYGDYKVYDVRKMIAKSEQEIGKATAKYFFYSNIMNFFKTEITLANGEIRKRPLIETNGETGEIVWDKGRDFATVRKVLSMPQVNIVKKTEVQTGGFSKESILPKRNSDKLIARKKDWDPKKYGGFDSPTVAYSVLVVAKVEKGKSKKLKSVKELLGITIMERSSFEKNPIDFLEAKGYKEVKKDLIIKLPKYSLFELENGRKRMLASAGELQKGNELALPSKYVNFLYLASHYEKLKGSPEDNEQKQLFVEQHKHYLDEIIEQISEFSKRVILADANLDKVLSAYNKHRDKPIREQAENIIHLFTLTNLGAPAAFKYFDTTIDRKRYTSTKEVLDATLIHQSITGLYETRIDLSQLGGDGGEAAAKPAPGGSGGTLGDQGSRGSDPLPEPRVTLTVEGIPTEFLVNTGAEHSVLTKPMGKMGSKRTVVAGATGSKVYPWTTKRLLKIGQKQVTHSFLVIPECPAPLLGRDLLTKLKAQIQFSTEGPQVTWEDRPAMCLVLNLEEEYRLHEKPVPPSIDPSWLQLFPMVWAEKAGMGLANQVPPVVVELKSDASPVAVRQYPMSKEAREGIRPHIQRFLDLGILVPCQSPWNTPLLPVKKPGTNDYRPVQDLREVNKRVQDIHPTVPNPYNLLSSLPPSHTWYSVLDLKDAFFCLKLHPNSQPLFAFEWRDPEKGNTGQLTWTRLPQGFKNSPTLFNEALHRDLASFRALNPQVVMLQYVDDLLVAAPTYRDCKEGTRRLLQELSKLGYRVSAKKAQLCREEVTYLGYLLKGGKRWLTPARKATVMKIPTPTTPRQVREFLGKAGFCRLFIPGFASLAAPLYPLTRPKVPFTWTEAHQEAFGRIKEALLSAPALALPDLTKPFALYVDEKEGVARGVLTQTLGPWRRPVAYLSKKLDPVASGWPTCLKAIAAVALLLKDADKLTLGQNVLVIAPHNLESIVRQPPDRWMTNARMTHYQSLLLNERVSFAPPAILNPATLLPVESDDTPIHICSEILAEETGTRPDLRDQPLPGVPAWYTDGSSFIMDGRRQAGAAIVDNKRTVWASNLPEGTSAQKAELIALTQALRLAEGKSINIYTDSRYAFATAHVHGAIYKQRGWLTSAGKDIKNKEEILALLEAIHLPKRVAIIHCPGHQRGTDPVATGNRKADEAAKQAAQSTRILTETTKNAGKRTADGSEFEKRTADGSEFESPKKKAKVE

SEQ ID NO: 1787 - protein, 2218 aa, synthetic construct
MPAAKRVKLDGGDKKYSIGLDIGTNSVGWAVITDEYKVPSKKFKVLGNTDRHSIKKNLIGALLFDSGETAEATRLKRTARRRYTRRKNRICYLQEIFSNEMAKVDDSFFHRLEESFLVEEDKKHERHPIFGNIVDEVAYHEKYPTIYHLRKKLVDSTDKADLRLIYLALAHMIKFRGHFLIEGDLNPDNSDVDKLFIQLVQTYNQLFEENPINASGVDAKAILSARLSKSRRLENLIAQLPGEKKNGLFGNLIALSLGLTPNFKSNFDLAEDAKLQLSKDTYDDDLDNLLAQIGDQYADLFLAAKNLSDAILLSDILRVNTEITKAPLSASMIKRYDEHHQDLTLLKALVRQQLPEKYKEIFFDQSKNGYAGYIDGGASQEEFYKFIKPILEKMDGTEELLVKLNREDLLRKQRTFDNGSIPHQIHLGELHAILRRQEDFYPFLKDNREKIEKILTFRIPYYVGPLARGNSRFAWMTRKSEETITPWNFEEVVDKGASAQSFIERMTNFDKNLPNEKVLPKHSLLYEYFTVYNELTKVKYVTEGMRKPAFLSGEQKKAIVDLLFKTNRKVTVKQLKEDYFKKIECFDSVEISGVEDRFNASLGTYHDLLKIIKDKDFLDNEENEDILEDIVLTLTLFEDREMIEERLKTYAHLFDDKVMKQLKRRRYTGWGRLSRKLINGIRDKQSGKTILDFLKSDGFANRNFMQLIHDDSLTFKEDIQKAQVSGQGDSLHEHIANLAGSPAIKKGILQTVKVVDELVKVMGRHKPENIVIEMARENQTTQKGQKNSRERMKRIEEGIKELGSQILKEHPVENTQLQNEKLYLYYLQNGRDMYVDQELDINRLSDYDVDHIVPQSFLKDDSIDNKVLTRSDKARGKSDNVPSEEVVKKMKNYWRQLLNAKLITQRKFDNLTKAERGGLSELDKAGFIKRQLVETRQITKHVAQILDSRMNTKYDENDKLIREVKVITLKSKLVSDFRKDFQFYKVREINNYHHAHDAYLNAVVGTALIKKYPKLESEFVYGDYKVYDVRKMIAKSEQEIGKATAKYFFYSNIMNFFKTEITLANGEIRKRPLIETNGETGEIVWDKGRDFATVRKVLSMPQVNIVKKTEVQTGGFSKESILPKRNSDKLIARKKDWDPKKYGGFDSPTVAYSVLVVAKVEKGKSKKLKSVKELLGITIMERSSFEKNPIDFLEAKGYKEVKKDLIIKLPKYSLFELENGRKRMLASAGELQKGNELALPSKYVNFLYLASHYEKLKGSPEDNEQKQLFVEQHKHYLDEIIEQISEFSKRVILADANLDKVLSAYNKHRDKPIREQAENIIHLFTLTNLGAPAAFKYFDTTIDRKRYTSTKEVLDATLIHQSITGLYETRIDLSQLGGDGGGGSPAPEAAAKGGTLGDQGSRGSDPLPEPRVTLTVEGIPTEFLVNTGAEHSVLTKPMGKMGSKRTVVAGATGSKVYPWTTKRLLKIGQKQVTHSFLVIPECPAPLLGRDLLTKLKAQIQFSTEGPQVTWEDRPAMCLVLNLEEEYRLHEKPVPPSIDPSWLQLFPMVWAEKAGMGLANQVPPVVVELKSDASPVAVRQYPMSKEAREGIRPHIQRFLDLGILVPCQSPWNTPLLPVKKPGTNDYRPVQDLREVNKRVQDIHPTVPNPYNLLSSLPPSHTWYSVLDLKDAFFCLKLHPNSQPLFAFEWRDPEKGNTGQLTWTRLPQGFKNSPTLFNEALHRDLASFRALNPQVVMLQYVDDLLVAAPTYRDCKEGTRRLLQELSKLGYRVSAKKAQLCREEVTYLGYLLKGGKRWLTPARKATVMKIPTPTTPRQVREFLGKAGFCRLFIPGFASLAAPLYPLTRPKVPFTWTEAHQEAFGRIKEALLSAPALALPDLTKPFALYVDEKEGVARGVLTQTLGPWRRPVAYLSKKLDPVASGWPTCLKAIAAVALLLKDADKLTLGQNVLVIAPHNLESIVRQPPDRWMTNARMTHYQSLLLNERVSFAPPAILNPATLLPVESDDTPIHICSEILAEETGTRPDLRDQPLPGVPAWYTDGSSFIMDGRRQAGAAIVDNKRTVWASNLPEGTSAQKAELIALTQALRLAEGKSINIYTDSRYAFATAHVHGAIYKQRGWLTSAGKDIKNKEEILALLEAIHLPKRVAIIHCPGHQRGTDPVATGNRKADEAAKQAAQSTRILTETTKNAGKRTADGSEFEKRTADGSEFESPKKKAKVE

SEQ ID NO: 1788 - protein, 2212 aa, synthetic construct
MPAAKRVKLDGGDKKYSIGLDIGTNSVGWAVITDEYKVPSKKFKVLGNTDRHSIKKNLIGALLFDSGETAEATRLKRTARRRYTRRKNRICYLQEIFSNEMAKVDDSFFHRLEESFLVEEDKKHERHPIFGNIVDEVAYHEKYPTIYHLRKKLVDSTDKADLRLIYLALAHMIKFRGHFLIEGDLNPDNSDVDKLFIQLVQTYNQLFEENPINASGVDAKAILSARLSKSRRLENLIAQLPGEKKNGLFGNLIALSLGLTPNFKSNFDLAEDAKLQLSKDTYDDDLDNLLAQIGDQYADLFLAAKNLSDAILLSDILRVNTEITKAPLSASMIKRYDEHHQDLTLLKALVRQQLPEKYKEIFFDQSKNGYAGYIDGGASQEEFYKFIKPILEKMDGTEELLVKLNREDLLRKQRTFDNGSIPHQIHLGELHAILRRQEDFYPFLKDNREKIEKILTFRIPYYVGPLARGNSRFAWMTRKSEETITPWNFEEVVDKGASAQSFIERMTNFDKNLPNEKVLPKHSLLYEYFTVYNELTKVKYVTEGMRKPAFLSGEQKKAIVDLLFKTNRKVTVKQLKEDYFKKIECFDSVEISGVEDRFNASLGTYHDLLKIIKDKDFLDNEENEDILEDIVLTLTLFEDREMIEERLKTYAHLFDDKVMKQLKRRRYTGWGRLSRKLINGIRDKQSGKTILDFLKSDGFANRNFMQLIHDDSLTFKEDIQKAQVSGQGDSLHEHIANLAGSPAIKKGILQTVKVVDELVKVMGRHKPENIVIEMARENQTTQKGQKNSRERMKRIEEGIKELGSQILKEHPVENTQLQNEKLYLYYLQNGRDMYVDQELDINRLSDYDVDHIVPQSFLKDDSIDNKVLTRSDKARGKSDNVPSEEVVKKMKNYWRQLLNAKLITQRKFDNLTKAERGGLSELDKAGFIKRQLVETRQITKHVAQILDSRMNTKYDENDKLIREVKVITLKSKLVSDFRKDFQFYKVREINNYHHAHDAYLNAVVGTALIKKYPKLESEFVYGDYKVYDVRKMIAKSEQEIGKATAKYFFYSNIMNFFKTEITLANGEIRKRPLIETNGETGEIVWDKGRDFATVRKVLSMPQVNIVKKTEVQTGGFSKESILPKRNSDKLIARKKDWDPKKYGGFDSPTVAYSVLVVAKVEKGKSKKLKSVKELLGITIMERSSFEKNPIDFLEAKGYKEVKKDLIIKLPKYSLFELENGRKRMLASAGELQKGNELALPSKYVNFLYLASHYEKLKGSPEDNEQKQLFVEQHKHYLDEIIEQISEFSKRVILADANLDKVLSAYNKHRDKPIREQAENIIHLFTLTNLGAPAAFKYFDTTIDRKRYTSTKEVLDATLIHQSITGLYETRIDLSQLGGDGGGGGGSGGTLGDQGSRGSDPLPEPRVTLTVEGIPTEFLVNTGAEHSVLTKPMGKMGSKRTVVAGATGSKVYPWTTKRLLKIGQKQVTHSFLVIPECPAPLLGRDLLTKLKAQIQFSTEGPQVTWEDRPAMCLVLNLEEEYRLHEKPVPPSIDPSWLQLFPMVWAEKAGMGLANQVPPVVVELKSDASPVAVRQYPMSKEAREGIRPHIQRFLDLGILVPCQSPWNTPLLPVKKPGTNDYRPVQDLREVNKRVQDIHPTVPNPYNLLSSLPPSHTWYSVLDLKDAFFCLKLHPNSQPLFAFEWRDPEKGNTGQLTWTRLPQGFKNSPTLFNEALHRDLASFRALNPQVVMLQYVDDLLVAAPTYRDCKEGTRRLLQELSKLGYRVSAKKAQLCREEVTYLGYLLKGGKRWLTPARKATVMKIPTPTTPRQVREFLGKAGFCRLFIPGFASLAAPLYPLTRPKVPFTWTEAHQEAFGRIKEALLSAPALALPDLTKPFALYVDEKEGVARGVLTQTLGPWRRPVAYLSKKLDPVASGWPTCLKAIAAVALLLKDADKLTLGQNVLVIAPHNLESIVRQPPDRWMTNARMTHYQSLLLNERVSFAPPAILNPATLLPVESDDTPIHICSEILAEETGTRPDLRDQPLPGVPAWYTDGSSFIMDGRRQAGAAIVDNKRTVWASNLPEGTSAQKAELIALTQALRLAEGKSINIYTDSRYAFATAHVHGAIYKQRGWLTSAGKDIKNKEEILALLEAIHLPKRVAIIHCPGHQRGTDPVATGNRKADEAAKQAAQSTRILTETTKNAGKRTADGSEFEKRTADGSEFESPKKKAKVE

SEQ ID NO: 1789 - protein, 2218 aa, synthetic construct
MPAAKRVKLDGGDKKYSIGLDIGTNSVGWAVITDEYKVPSKKFKVLGNTDRHSIKKNLIGALLFDSGETAEATRLKRTARRRYTRRKNRICYLQEIFSNEMAKVDDSFFHRLEESFLVEEDKKHERHPIFGNIVDEVAYHEKYPTIYHLRKKLVDSTDKADLRLIYLALAHMIKFRGHFLIEGDLNPDNSDVDKLFIQLVQTYNQLFEENPINASGVDAKAILSARLSKSRRLENLIAQLPGEKKNGLFGNLIALSLGLTPNFKSNFDLAEDAKLQLSKDTYDDDLDNLLAQIGDQYADLFLAAKNLSDAILLSDILRVNTEITKAPLSASMIKRYDEHHQDLTLLKALVRQQLPEKYKEIFFDQSKNGYAGYIDGGASQEEFYKFIKPILEKMDGTEELLVKLNREDLLRKQRTFDNGSIPHQIHLGELHAILRRQEDFYPFLKDNREKIEKILTFRIPYYVGPLARGNSRFAWMTRKSEETITPWNFEEVVDKGASAQSFIERMTNFDKNLPNEKVLPKHSLLYEYFTVYNELTKVKYVTEGMRKPAFLSGEQKKAIVDLLFKTNRKVTVKQLKEDYFKKIECFDSVEISGVEDRFNASLGTYHDLLKIIKDKDFLDNEENEDILEDIVLTLTLFEDREMIEERLKTYAHLFDDKVMKQLKRRRYTGWGRLSRKLINGIRDKQSGKTILDFLKSDGFANRNFMQLIHDDSLTFKEDIQKAQVSGQGDSLHEHIANLAGSPAIKKGILQTVKVVDELVKVMGRHKPENIVIEMARENQTTQKGQKNSRERMKRIEEGIKELGSQILKEHPVENTQLQNEKLYLYYLQNGRDMYVDQELDINRLSDYDVDHIVPQSFLKDDSIDNKVLTRSDKARGKSDNVPSEEVVKKMKNYWRQLLNAKLITQRKFDNLTKAERGGLSELDKAGFIKRQLVETRQITKHVAQILDSRMNTKYDENDKLIREVKVITLKSKLVSDFRKDFQFYKVREINNYHHAHDAYLNAVVGTALIKKYPKLESEFVYGDYKVYDVRKMIAKSEQEIGKATAKYFFYSNIMNFFKTEITLANGEIRKRPLIETNGETGEIVWDKGRDFATVRKVLSMPQVNIVKKTEVQTGGFSKESILPKRNSDKLIARKKDWDPKKYGGFDSPTVAYSVLVVAKVEKGKSKKLKSVKELLGITIMERSSFEKNPIDFLEAKGYKEVKKDLIIKLPKYSLFELENGRKRMLASAGELQKGNELALPSKYVNFLYLASHYEKLKGSPEDNEQKQLFVEQHKHYLDEIIEQISEFSKRVILADANLDKVLSAYNKHRDKPIREQAENIIHLFTLTNLGAPAAFKYFDTTIDRKRYTSTKEVLDATLIHQSITGLYETRIDLSQLGGDGGGGGEAAAKPAPGGTLGDQGSRGSDPLPEPRVTLTVEGIPTEFLVNTGAEHSVLTKPMGKMGSKRTVVAGATGSKVYPWTTKRLLKIGQKQVTHSFLVIPECPAPLLGRDLLTKLKAQIQFSTEGPQVTWEDRPAMCLVLNLEEEYRLHEKPVPPSIDPSWLQLFPMVWAEKAGMGLANQVPPVVVELKSDASPVAVRQYPMSKEAREGIRPHIQRFLDLGILVPCQSPWNTPLLPVKKPGTNDYRPVQDLREVNKRVQDIHPTVPNPYNLLSSLPPSHTWYSVLDLKDAFFCLKLHPNSQPLFAFEWRDPEKGNTGQLTWTRLPQGFKNSPTLFNEALHRDLASFRALNPQVVMLQYVDDLLVAAPTYRDCKEGTRRLLQELSKLGYRVSAKKAQLCREEVTYLGYLLKGGKRWLTPARKATVMKIPTPTTPRQVREFLGKAGFCRLFIPGFASLAAPLYPLTRPKVPFTWTEAHQEAFGRIKEALLSAPALALPDLTKPFALYVDEKEGVARGVLTQTLGPWRRPVAYLSKKLDPVASGWPTCLKAIAAVALLLKDADKLTLGQNVLVIAPHNLESIVRQPPDRWMTNARMTHYQSLLLNERVSFAPPAILNPATLLPVESDDTPIHICSEILAEETGTRPDLRDQPLPGVPAWYTDGSSFIMDGRRQAGAAIVDNKRTVWASNLPEGTSAQKAELIALTQALRLAEGKSINIYTDSRYAFATAHVHGAIYKQRGWLTSAGKDIKNKEEILALLEAIHLPKRVAIIHCPGHQRGTDPVATGNRKADEAAKQAAQSTRILTETTKNAGKRTADGSEFEKRTADGSEFESPKKKAKVE

SEQ ID NO: 1790 - protein, 2214 aa, synthetic construct
MPAAKRVKLDGGDKKYSIGLDIGTNSVGWAVITDEYKVPSKKFKVLGNTDRHSIKKNLIGALLFDSGETAEATRLKRTARRRYTRRKNRICYLQEIFSNEMAKVDDSFFHRLEESFLVEEDKKHERHPIFGNIVDEVAYHEKYPTIYHLRKKLVDSTDKADLRLIYLALAHMIKFRGHFLIEGDLNPDNSDVDKLFIQLVQTYNQLFEENPINASGVDAKAILSARLSKSRRLENLIAQLPGEKKNGLFGNLIALSLGLTPNFKSNFDLAEDAKLQLSKDTYDDDLDNLLAQIGDQYADLFLAAKNLSDAILLSDILRVNTEITKAPLSASMIKRYDEHHQDLTLLKALVRQQLPEKYKEIFFDQSKNGYAGYIDGGASQEEFYKFIKPILEKMDGTEELLVKLNREDLLRKQRTFDNGSIPHQIHLGELHAILRRQEDFYPFLKDNREKIEKILTFRIPYYVGPLARGNSRFAWMTRKSEETITPWNFEEVVDKGASAQSFIERMTNFDKNLPNEKVLPKHSLLYEYFTVYNELTKVKYVTEGMRKPAFLSGEQKKAIVDLLFKTNRKVTVKQLKEDYFKKIECFDSVEISGVEDRFNASLGTYHDLLKIIKDKDFLDNEENEDILEDIVLTLTLFEDREMIEERLKTYAHLFDDKVMKQLKRRRYTGWGRLSRKLINGIRDKQSGKTILDFLKSDGFANRNFMQLIHDDSLTFKEDIQKAQVSGQGDSLHEHIANLAGSPAIKKGILQTVKVVDELVKVMGRHKPENIVIEMARENQTTQKGQKNSRERMKRIEEGIKELGSQILKEHPVENTQLQNEKLYLYYLQNGRDMYVDQELDINRLSDYDVDHIVPQSFLKDDSIDNKVLTRSDKARGKSDNVPSEEVVKKMKNYWRQLLNAKLITQRKFDNLTKAERGGLSELDKAGFIKRQLVETRQITKHVAQILDSRMNTKYDENDKLIREVKVITLKSKLVSDFRKDFQFYKVREINNYHHAHDAYLNAVVGTALIKKYPKLESEFVYGDYKVYDVRKMIAKSEQEIGKATAKYFFYSNIMNFFKTEITLANGEIRKRPLIETNGETGEIVWDKGRDFATVRKVLSMPQVNIVKKTEVQTGGFSKESILPKRNSDKLIARKKDWDPKKYGGFDSPTVAYSVLVVAKVEKGKSKKLKSVKELLGITIMERSSFEKNPIDFLEAKGYKEVKKDLIIKLPKYSLFELENGRKRMLASAGELQKGNELALPSKYVNFLYLASHYEKLKGSPEDNEQKQLFVEQHKHYLDEIIEQISEFSKRVILADANLDKVLSAYNKHRDKPIREQAENIIHLFTLTNLGAPAAFKYFDTTIDRKRYTSTKEVLDATLIHQSITGLYETRIDLSQLGGDGGGGGGGGGGGTLGDQGSRGSDPLPEPRVTLTVEGIPTEFLVNTGAEHSVLTKPMGKMGSKRTVVAGATGSKVYPWTTKRLLKIGQKQVTHSFLVIPECPAPLLGRDLLTKLKAQIQFSTEGPQVTWEDRPAMCLVLNLEEEYRLHEKPVPPSIDPSWLQLFPMVWAEKAGMGLANQVPPVVVELKSDASPVAVRQYPMSKEAREGIRPHIQRFLDLGILVPCQSPWNTPLLPVKKPGTNDYRPVQDLREVNKRVQDIHPTVPNPYNLLSSLPPSHTWYSVLDLKDAFFCLKLHPNSQPLFAFEWRDPEKGNTGQLTWTRLPQGFKNSPTLFNEALHRDLASFRALNPQVVMLQYVDDLLVAAPTYRDCKEGTRRLLQELSKLGYRVSAKKAQLCREEVTYLGYLLKGGKRWLTPARKATVMKIPTPTTPRQVREFLGKAGFCRLFIPGFASLAAPLYPLTRPKVPFTWTEAHQEAFGRIKEALLSAPALALPDLTKPFALYVDEKEGVARGVLTQTLGPWRRPVAYLSKKLDPVASGWPTCLKAIAAVALLLKDADKLTLGQNVLVIAPHNLESIVRQPPDRWMTNARMTHYQSLLLNERVSFAPPAILNPATLLPVESDDTPIHICSEILAEETGTRPDLRDQPLPGVPAWYTDGSSFIMDGRRQAGAAIVDNKRTVWASNLPEGTSAQKAELIALTQALRLAEGKSINIYTDSRYAFATAHVHGAIYKQRGWLTSAGKDIKNKEEILALLEAIHLPKRVAIIHCPGHQRGTDPVATGNRKADEAAKQAAQSTRILTETTKNAGKRTADGSEFEKRTADGSEFESPKKKAKVE

SEQ ID NO: 1791 - protein, 2210 aa, synthetic construct
MPAAKRVKLDGGDKKYSIGLDIGTNSVGWAVITDEYKVPSKKFKVLGNTDRHSIKKNLIGALLFDSGETAEATRLKRTARRRYTRRKNRICYLQEIFSNEMAKVDDSFFHRLEESFLVEEDKKHERHPIFGNIVDEVAYHEKYPTIYHLRKKLVDSTDKADLRLIYLALAHMIKFRGHFLIEGDLNPDNSDVDKLFIQLVQTYNQLFEENPINASGVDAKAILSARLSKSRRLENLIAQLPGEKKNGLFGNLIALSLGLTPNFKSNFDLAEDAKLQLSKDTYDDDLDNLLAQIGDQYADLFLAAKNLSDAILLSDILRVNTEITKAPLSASMIKRYDEHHQDLTLLKALVRQQLPEKYKEIFFDQSKNGYAGYIDGGASQEEFYKFIKPILEKMDGTEELLVKLNREDLLRKQRTFDNGSIPHQIHLGELHAILRRQEDFYPFLKDNREKIEKILTFRIPYYVGPLARGNSRFAWMTRKSEETITPWNFEEVVDKGASAQSFIERMTNFDKNLPNEKVLPKHSLLYEYFTVYNELTKVKYVTEGMRKPAFLSGEQKKAIVDLLFKTNRKVTVKQLKEDYFKKIECFDSVEISGVEDRFNASLGTYHDLLKIIKDKDFLDNEENEDILEDIVLTLTLFEDREMIEERLKTYAHLFDDKVMKQLKRRRYTGWGRLSRKLINGIRDKQSGKTILDFLKSDGFANRNFMQLIHDDSLTFKEDIQKAQVSGQGDSLHEHIANLAGSPAIKKGILQTVKVVDELVKVMGRHKPENIVIEMARENQTTQKGQKNSRERMKRIEEGIKELGSQILKEHPVENTQLQNEKLYLYYLQNGRDMYVDQELDINRLSDYDVDHIVPQSFLKDDSIDNKVLTRSDKARGKSDNVPSEEVVKKMKNYWRQLLNAKLITQRKFDNLTKAERGGLSELDKAGFIKRQLVETRQITKHVAQILDSRMNTKYDENDKLIREVKVITLKSKLVSDFRKDFQFYKVREINNYHHAHDAYLNAVVGTALIKKYPKLESEFVYGDYKVYDVRKMIAKSEQEIGKATAKYFFYSNIMNFFKTEITLANGEIRKRPLIETNGETGEIVWDKGRDFATVRKVLSMPQVNIVKKTEVQTGGFSKESILPKRNSDKLIARKKDWDPKKYGGFDSPTVAYSVLVVAKVEKGKSKKLKSVKELLGITIMERSSFEKNPIDFLEAKGYKEVKKDLIIKLPKYSLFELENGRKRMLASAGELQKGNELALPSKYVNFLYLASHYEKLKGSPEDNEQKQLFVEQHKHYLDEIIEQISEFSKRVILADANLDKVLSAYNKHRDKPIREQAENIIHLFTLTNLGAPAAFKYFDTTIDRKRYTSTKEVLDATLIHQSITGLYETRIDLSQLGGDGGGGSGGTLGDQGSRGSDPLPEPRVTLTVEGIPTEFLVNTGAEHSVLTKPMGKMGSKRTVVAGATGSKVYPWTTKRLLKIGQKQVTHSFLVIPECPAPLLGRDLLTKLKAQIQFSTEGPQVTWEDRPAMCLVLNLEEEYRLHEKPVPPSIDPSWLQLFPMVWAEKAGMGLANQVPPVVVELKSDASPVAVRQYPMSKEAREGIRPHIQRFLDLGILVPCQSPWNTPLLPVKKPGTNDYRPVQDLREVNKRVQDIHPTVPNPYNLLSSLPPSHTWYSVLDLKDAFFCLKLHPNSQPLFAFEWRDPEKGNTGQLTWTRLPQGFKNSPTLFNEALHRDLASFRALNPQVVMLQYVDDLLVAAPTYRDCKEGTRRLLQELSKLGYRVSAKKAQLCREEVTYLGYLLKGGKRWLTPARKATVMKIPTPTTPRQVREFLGKAGFCRLFIPGFASLAAPLYPLTRPKVPFTWTEAHQEAFGRIKEALLSAPALALPDLTKPFALYVDEKEGVARGVLTQTLGPWRRPVAYLSKKLDPVASGWPTCLKAIAAVALLLKDADKLTLGQNVLVIAPHNLESIVRQPPDRWMTNARMTHYQSLLLNERVSFAPPAILNPATLLPVESDDTPIHICSEILAEETGTRPDLRDQPLPGVPAWYTDGSSFIMDGRRQAGAAIVDNKRTVWASNLPEGTSAQKAELIALTQALRLAEGKSINIYTDSRYAFATAHVHGAIYKQRGWLTSAGKDIKNKEEILALLEAIHLPKRVAIIHCPGHQRGTDPVATGNRKADEAAKQAAQSTRILTETTKNAGKRTADGSEFEKRTADGSEFESPKKKAKVE

SEQ ID NO: 1792 - protein, 2216 aa, synthetic construct
MPAAKRVKLDGGDKKYSIGLDIGTNSVGWAVITDEYKVPSKKFKVLGNTDRHSIKKNLIGALLFDSGETAEATRLKRTARRRYTRRKNRICYLQEIFSNEMAKVDDSFFHRLEESFLVEEDKKHERHPIFGNIVDEVAYHEKYPTIYHLRKKLVDSTDKADLRLIYLALAHMIKFRGHFLIEGDLNPDNSDVDKLFIQLVQTYNQLFEENPINASGVDAKAILSARLSKSRRLENLIAQLPGEKKNGLFGNLIALSLGLTPNFKSNFDLAEDAKLQLSKDTYDDDLDNLLAQIGDQYADLFLAAKNLSDAILLSDILRVNTEITKAPLSASMIKRYDEHHQDLTLLKALVRQQLPEKYKEIFFDQSKNGYAGYIDGGASQEEFYKFIKPILEKMDGTEELLVKLNREDLLRKQRTFDNGSIPHQIHLGELHAILRRQEDFYPFLKDNREKIEKILTFRIPYYVGPLARGNSRFAWMTRKSEETITPWNFEEVVDKGASAQSFIERMTNFDKNLPNEKVLPKHSLLYEYFTVYNELTKVKYVTEGMRKPAFLSGEQKKAIVDLLFKTNRKVTVKQLKEDYFKKIECFDSVEISGVEDRFNASLGTYHDLLKIIKDKDFLDNEENEDILEDIVLTLTLFEDREMIEERLKTYAHLFDDKVMKQLKRRRYTGWGRLSRKLINGIRDKQSGKTILDFLKSDGFANRNFMQLIHDDSLTFKEDIQKAQVSGQGDSLHEHIANLAGSPAIKKGILQTVKVVDELVKVMGRHKPENIVIEMARENQTTQKGQKNSRERMKRIEEGIKELGSQILKEHPVENTQLQNEKLYLYYLQNGRDMYVDQELDINRLSDYDVDHIVPQSFLKDDSIDNKVLTRSDKARGKSDNVPSEEVVKKMKNYWRQLLNAKLITQRKFDNLTKAERGGLSELDKAGFIKRQLVETRQITKHVAQILDSRMNTKYDENDKLIREVKVITLKSKLVSDFRKDFQFYKVREINNYHHAHDAYLNAVVGTALIKKYPKLESEFVYGDYKVYDVRKMIAKSEQEIGKATAKYFFYSNIMNFFKTEITLANGEIRKRPLIETNGETGEIVWDKGRDFATVRKVLSMPQVNIVKKTEVQTGGFSKESILPKRNSDKLIARKKDWDPKKYGGFDSPTVAYSVLVVAKVEKGKSKKLKSVKELLGITIMERSSFEKNPIDFLEAKGYKEVKKDLIIKLPKYSLFELENGRKRMLASAGELQKGNELALPSKYVNFLYLASHYEKLKGSPEDNEQKQLFVEQHKHYLDEIIEQISEFSKRVILADANLDKVLSAYNKHRDKPIREQAENIIHLFTLTNLGAPAAFKYFDTTIDRKRYTSTKEVLDATLIHQSITGLYETRIDLSQLGGDGGPAPGGSGGGGGTLGDQGSRGSDPLPEPRVTLTVEGIPTEFLVNTGAEHSVLTKPMGKMGSKRTVVAGATGSKVYPWTTKRLLKIGQKQVTHSFLVIPECPAPLLGRDLLTKLKAQIQFSTEGPQVTWEDRPAMCLVLNLEEEYRLHEKPVPPSIDPSWLQLFPMVWAEKAGMGLANQVPPVVVELKSDASPVAVRQYPMSKEAREGIRPHIQRFLDLGILVPCQSPWNTPLLPVKKPGTNDYRPVQDLREVNKRVQDIHPTVPNPYNLLSSLPPSHTWYSVLDLKDAFFCLKLHPNSQPLFAFEWRDPEKGNTGQLTWTRLPQGFKNSPTLFNEALHRDLASFRALNPQVVMLQYVDDLLVAAPTYRDCKEGTRRLLQELSKLGYRVSAKKAQLCREEVTYLGYLLKGGKRWLTPARKATVMKIPTPTTPRQVREFLGKAGFCRLFIPGFASLAAPLYPLTRPKVPFTWTEAHQEAFGRIKEALLSAPALALPDLTKPFALYVDEKEGVARGVLTQTLGPWRRPVAYLSKKLDPVASGWPTCLKAIAAVALLLKDADKLTLGQNVLVIAPHNLESIVRQPPDRWMTNARMTHYQSLLLNERVSFAPPAILNPATLLPVESDDTPIHICSEILAEETGTRPDLRDQPLPGVPAWYTDGSSFIMDGRRQAGAAIVDNKRTVWASNLPEGTSAQKAELIALTQALRLAEGKSINIYTDSRYAFATAHVHGAIYKQRGWLTSAGKDIKNKEEILALLEAIHLPKRVAIIHCPGHQRGTDPVATGNRKADEAAKQAAQSTRILTETTKNAGKRTADGSEFEKRTADGSEFESPKKKAKVE

SEQ ID NO: 1793 - protein, 2220 aa, synthetic construct
MPAAKRVKLDGGDKKYSIGLDIGTNSVGWAVITDEYKVPSKKFKVLGNTDRHSIKKNLIGALLFDSGETAEATRLKRTARRRYTRRKNRICYLQEIFSNEMAKVDDSFFHRLEESFLVEEDKKHERHPIFGNIVDEVAYHEKYPTIYHLRKKLVDSTDKADLRLIYLALAHMIKFRGHFLIEGDLNPDNSDVDKLFIQLVQTYNQLFEENPINASGVDAKAILSARLSKSRRLENLIAQLPGEKKNGLFGNLIALSLGLTPNFKSNFDLAEDAKLQLSKDTYDDDLDNLLAQIGDQYADLFLAAKNLSDAILLSDILRVNTEITKAPLSASMIKRYDEHHQDLTLLKALVRQQLPEKYKEIFFDQSKNGYAGYIDGGASQEEFYKFIKPILEKMDGTEELLVKLNREDLLRKQRTFDNGSIPHQIHLGELHAILRRQEDFYPFLKDNREKIEKILTFRIPYYVGPLARGNSRFAWMTRKSEETITPWNFEEVVDKGASAQSFIERMTNFDKNLPNEKVLPKHSLLYEYFTVYNELTKVKYVTEGMRKPAFLSGEQKKAIVDLLFKTNRKVTVKQLKEDYFKKIECFDSVEISGVEDRFNASLGTYHDLLKIIKDKDFLDNEENEDILEDIVLTLTLFEDREMIEERLKTYAHLFDDKVMKQLKRRRYTGWGRLSRKLINGIRDKQSGKTILDFLKSDGFANRNFMQLIHDDSLTFKEDIQKAQVSGQGDSLHEHIANLAGSPAIKKGILQTVKVVDELVKVMGRHKPENIVIEMARENQTTQKGQKNSRERMKRIEEGIKELGSQILKEHPVENTQLQNEKLYLYYLQNGRDMYVDQELDINRLSDYDVDHIVPQSFLKDDSIDNKVLTRSDKARGKSDNVPSEEVVKKMKNYWRQLLNAKLITQRKFDNLTKAERGGLSELDKAGFIKRQLVETRQITKHVAQILDSRMNTKYDENDKLIREVKVITLKSKLVSDFRKDFQFYKVREINNYHHAHDAYLNAVVGTALIKKYPKLESEFVYGDYKVYDVRKMIAKSEQEIGKATAKYFFYSNIMNFFKTEITLANGEIRKRPLIETNGETGEIVWDKGRDFATVRKVLSMPQVNIVKKTEVQTGGFSKESILPKRNSDKLIARKKDWDPKKYGGFDSPTVAYSVLVVAKVEKGKSKKLKSVKELLGITIMERSSFEKNPIDFLEAKGYKEVKKDLIIKLPKYSLFELENGRKRMLASAGELQKGNELALPSKYVNFLYLASHYEKLKGSPEDNEQKQLFVEQHKHYLDEIIEQISEFSKRVILADANLDKVLSAYNKHRDKPIREQAENIIHLFTLTNLGAPAAFKYFDTTIDRKRYTSTKEVLDATLIHQSITGLYETRIDLSQLGGDGGPAPAPAPAPAPAPGGTLGDQGSRGSDPLPEPRVTLTVEGIPTEFLVNTGAEHSVLTKPMGKMGSKRTVVAGATGSKVYPWTTKRLLKIGQKQVTHSFLVIPECPAPLLGRDLLTKLKAQIQFSTEGPQVTWEDRPAMCLVLNLEEEYRLHEKPVPPSIDPSWLQLFPMVWAEKAGMGLANQVPPVVVELKSDASPVAVRQYPMSKEAREGIRPHIQRFLDLGILVPCQSPWNTPLLPVKKPGTNDYRPVQDLREVNKRVQDIHPTVPNPYNLLSSLPPSHTWYSVLDLKDAFFCLKLHPNSQPLFAFEWRDPEKGNTGQLTWTRLPQGFKNSPTLFNEALHRDLASFRALNPQVVMLQYVDDLLVAAPTYRDCKEGTRRLLQELSKLGYRVSAKKAQLCREEVTYLGYLLKGGKRWLTPARKATVMKIPTPTTPRQVREFLGKAGFCRLFIPGFASLAAPLYPLTRPKVPFTWTEAHQEAFGRIKEALLSAPALALPDLTKPFALYVDEKEGVARGVLTQTLGPWRRPVAYLSKKLDPVASGWPTCLKAIAAVALLLKDADKLTLGQNVLVIAPHNLESIVRQPPDRWMTNARMTHYQSLLLNERVSFAPPAILNPATLLPVESDDTPIHICSEILAEETGTRPDLRDQPLPGVPAWYTDGSSFIMDGRRQAGAAIVDNKRTVWASNLPEGTSAQKAELIALTQALRLAEGKSINIYTDSRYAFATAHVHGAIYKQRGWLTSAGKDIKNKEEILALLEAIHLPKRVAIIHCPGHQRGTDPVATGNRKADEAAKQAAQSTRILTETTKNAGKRTADGSEFEKRTADGSEFESPKKKAKVE

SEQ ID NO: 1794 - protein, 2213 aa, synthetic construct
MPAAKRVKLDGGDKKYSIGLDIGTNSVGWAVITDEYKVPSKKFKVLGNTDRHSIKKNLIGALLFDSGETAEATRLKRTARRRYTRRKNRICYLQEIFSNEMAKVDDSFFHRLEESFLVEEDKKHERHPIFGNIVDEVAYHEKYPTIYHLRKKLVDSTDKADLRLIYLALAHMIKFRGHFLIEGDLNPDNSDVDKLFIQLVQTYNQLFEENPINASGVDAKAILSARLSKSRRLENLIAQLPGEKKNGLFGNLIALSLGLTPNFKSNFDLAEDAKLQLSKDTYDDDLDNLLAQIGDQYADLFLAAKNLSDAILLSDILRVNTEITKAPLSASMIKRYDEHHQDLTLLKALVRQQLPEKYKEIFFDQSKNGYAGYIDGGASQEEFYKFIKPILEKMDGTEELLVKLNREDLLRKQRTFDNGSIPHQIHLGELHAILRRQEDFYPFLKDNREKIEKILTFRIPYYVGPLARGNSRFAWMTRKSEETITPWNFEEVVDKGASAQSFIERMTNFDKNLPNEKVLPKHSLLYEYFTVYNELTKVKYVTEGMRKPAFLSGEQKKAIVDLLFKTNRKVTVKQLKEDYFKKIECFDSVEISGVEDRFNASLGTYHDLLKIIKDKDFLDNEENEDILEDIVLTLTLFEDREMIEERLKTYAHLFDDKVMKQLKRRRYTGWGRLSRKLINGIRDKQSGKTILDFLKSDGFANRNFMQLIHDDSLTFKEDIQKAQVSGQGDSLHEHIANLAGSPAIKKGILQTVKVVDELVKVMGRHKPENIVIEMARENQTTQKGQKNSRERMKRIEEGIKELGSQILKEHPVENTQLQNEKLYLYYLQNGRDMYVDQELDINRLSDYDVDHIVPQSFLKDDSIDNKVLTRSDKARGKSDNVPSEEVVKKMKNYWRQLLNAKLITQRKFDNLTKAERGGLSELDKAGFIKRQLVETRQITKHVAQILDSRMNTKYDENDKLIREVKVITLKSKLVSDFRKDFQFYKVREINNYHHAHDAYLNAVVGTALIKKYPKLESEFVYGDYKVYDVRKMIAKSEQEIGKATAKYFFYSNIMNFFKTEITLANGEIRKRPLIETNGETGEIVWDKGRDFATVRKVLSMPQVNIVKKTEVQTGGFSKESILPKRNSDKLIARKKDWDPKKYGGFDSPTVAYSVLVVAKVEKGKSKKLKSVKELLGITIMERSSFEKNPIDFLEAKGYKEVKKDLIIKLPKYSLFELENGRKRMLASAGELQKGNELALPSKYVNFLYLASHYEKLKGSPEDNEQKQLFVEQHKHYLDEIIEQISEFSKRVILADANLDKVLSAYNKHRDKPIREQAENIIHLFTLTNLGAPAAFKYFDTTIDRKRYTSTKEVLDATLIHQSITGLYETRIDLSQLGGDGGPAPGGGGGTLGDQGSRGSDPLPEPRVTLTVEGIPTEFLVNTGAEHSVLTKPMGKMGSKRTVVAGATGSKVYPWTTKRLLKIGQKQVTHSFLVIPECPAPLLGRDLLTKLKAQIQFSTEGPQVTWEDRPAMCLVLNLEEEYRLHEKPVPPSIDPSWLQLFPMVWAEKAGMGLANQVPPVVVELKSDASPVAVRQYPMSKEAREGIRPHIQRFLDLGILVPCQSPWNTPLLPVKKPGTNDYRPVQDLREVNKRVQDIHPTVPNPYNLLSSLPPSHTWYSVLDLKDAFFCLKLHPNSQPLFAFEWRDPEKGNTGQLTWTRLPQGFKNSPTLFNEALHRDLASFRALNPQVVMLQYVDDLLVAAPTYRDCKEGTRRLLQELSKLGYRVSAKKAQLCREEVTYLGYLLKGGKRWLTPARKATVMKIPTPTTPRQVREFLGKAGFCRLFIPGFASLAAPLYPLTRPKVPFTWTEAHQEAFGRIKEALLSAPALALPDLTKPFALYVDEKEGVARGVLTQTLGPWRRPVAYLSKKLDPVASGWPTCLKAIAAVALLLKDADKLTLGQNVLVIAPHNLESIVRQPPDRWMTNARMTHYQSLLLNERVSFAPPAILNPATLLPVESDDTPIHICSEILAEETGTRPDLRDQPLPGVPAWYTDGSSFIMDGRRQAGAAIVDNKRTVWASNLPEGTSAQKAELIALTQALRLAEGKSINIYTDSRYAFATAHVHGAIYKQRGWLTSAGKDIKNKEEILALLEAIHLPKRVAIIHCPGHQRGTDPVATGNRKADEAAKQAAQSTRILTETTKNAGKRTADGSEFEKRTADGSEFESPKKKAKVE

SEQ ID NO: 1795 - protein, 2218 aa, synthetic construct
MPAAKRVKLDGGDKKYSIGLDIGTNSVGWAVITDEYKVPSKKFKVLGNTDRHSIKKNLIGALLFDSGETAEATRLKRTARRRYTRRKNRICYLQEIFSNEMAKVDDSFFHRLEESFLVEEDKKHERHPIFGNIVDEVAYHEKYPTIYHLRKKLVDSTDKADLRLIYLALAHMIKFRGHFLIEGDLNPDNSDVDKLFIQLVQTYNQLFEENPINASGVDAKAILSARLSKSRRLENLIAQLPGEKKNGLFGNLIALSLGLTPNFKSNFDLAEDAKLQLSKDTYDDDLDNLLAQIGDQYADLFLAAKNLSDAILLSDILRVNTEITKAPLSASMIKRYDEHHQDLTLLKALVRQQLPEKYKEIFFDQSKNGYAGYIDGGASQEEFYKFIKPILEKMDGTEELLVKLNREDLLRKQRTFDNGSIPHQIHLGELHAILRRQEDFYPFLKDNREKIEKILTFRIPYYVGPLARGNSRFAWMTRKSEETITPWNFEEVVDKGASAQSFIERMTNFDKNLPNEKVLPKHSLLYEYFTVYNELTKVKYVTEGMRKPAFLSGEQKKAIVDLLFKTNRKVTVKQLKEDYFKKIECFDSVEISGVEDRFNASLGTYHDLLKIIKDKDFLDNEENEDILEDIVLTLTLFEDREMIEERLKTYAHLFDDKVMKQLKRRRYTGWGRLSRKLINGIRDKQSGKTILDFLKSDGFANRNFMQLIHDDSLTFKEDIQKAQVSGQGDSLHEHIANLAGSPAIKKGILQTVKVVDELVKVMGRHKPENIVIEMARENQTTQKGQKNSRERMKRIEEGIKELGSQILKEHPVENTQLQNEKLYLYYLQNGRDMYVDQELDINRLSDYDVDHIVPQSFLKDDSIDNKVLTRSDKARGKSDNVPSEEVVKKMKNYWRQLLNAKLITQRKFDNLTKAERGGLSELDKAGFIKRQLVETRQITKHVAQILDSRMNTKYDENDKLIREVKVITLKSKLVSDFRKDFQFYKVREINNYHHAHDAYLNAVVGTALIKKYPKLESEFVYGDYKVYDVRKMIAKSEQEIGKATAKYFFYSNIMNFFKTEITLANGEIRKRPLIETNGETGEIVWDKGRDFATVRKVLSMPQVNIVKKTEVQTGGFSKESILPKRNSDKLIARKKDWDPKKYGGFDSPTVAYSVLVVAKVEKGKSKKLKSVKELLGITIMERSSFEKNPIDFLEAKGYKEVKKDLIIKLPKYSLFELENGRKRMLASAGELQKGNELALPSKYVNFLYLASHYEKLKGSPEDNEQKQLFVEQHKHYLDEIIEQISEFSKRVILADANLDKVLSAYNKHRDKPIREQAENIIHLFTLTNLGAPAAFKYFDTTIDRKRYTSTKEVLDATLIHQSITGLYETRIDLSQLGGDGGGSSPAPEAAAKGGTLGDQGSRGSDPLPEPRVTLTVEGIPTEFLVNTGAEHSVLTKPMGKMGSKRTVVAGATGSKVYPWTTKRLLKIGQKQVTHSFLVIPECPAPLLGRDLLTKLKAQIQFSTEGPQVTWEDRPAMCLVLNLEEEYRLHEKPVPPSIDPSWLQLFPMVWAEKAGMGLANQVPPVVVELKSDASPVAVRQYPMSKEAREGIRPHIQRFLDLGILVPCQSPWNTPLLPVKKPGTNDYRPVQDLREVNKRVQDIHPTVPNPYNLLSSLPPSHTWYSVLDLKDAFFCLKLHPNSQPLFAFEWRDPEKGNTGQLTWTRLPQGFKNSPTLFNEALHRDLASFRALNPQVVMLQYVDDLLVAAPTYRDCKEGTRRLLQELSKLGYRVSAKKAQLCREEVTYLGYLLKGGKRWLTPARKATVMKIPTPTTPRQVREFLGKAGFCRLFIPGFASLAAPLYPLTRPKVPFTWTEAHQEAFGRIKEALLSAPALALPDLTKPFALYVDEKEGVARGVLTQTLGPWRRPVAYLSKKLDPVASGWPTCLKAIAAVALLLKDADKLTLGQNVLVIAPHNLESIVRQPPDRWMTNARMTHYQSLLLNERVSFAPPAILNPATLLPVESDDTPIHICSEILAEETGTRPDLRDQPLPGVPAWYTDGSSFIMDGRRQAGAAIVDNKRTVWASNLPEGTSAQKAELIALTQALRLAEGKSINIYTDSRYAFATAHVHGAIYKQRGWLTSAGKDIKNKEEILALLEAIHLPKRVAIIHCPGHQRGTDPVATGNRKADEAAKQAAQSTRILTETTKNAGKRTADGSEFEKRTADGSEFESPKKKAKVE

SEQ ID NO: 1796 - protein, 2218 aa, synthetic construct
MPAAKRVKLDGGDKKYSIGLDIGTNSVGWAVITDEYKVPSKKFKVLGNTDRHSIKKNLIGALLFDSGETAEATRLKRTARRRYTRRKNRICYLQEIFSNEMAKVDDSFFHRLEESFLVEEDKKHERHPIFGNIVDEVAYHEKYPTIYHLRKKLVDSTDKADLRLIYLALAHMIKFRGHFLIEGDLNPDNSDVDKLFIQLVQTYNQLFEENPINASGVDAKAILSARLSKSRRLENLIAQLPGEKKNGLFGNLIALSLGLTPNFKSNFDLAEDAKLQLSKDTYDDDLDNLLAQIGDQYADLFLAAKNLSDAILLSDILRVNTEITKAPLSASMIKRYDEHHQDLTLLKALVRQQLPEKYKEIFFDQSKNGYAGYIDGGASQEEFYKFIKPILEKMDGTEELLVKLNREDLLRKQRTFDNGSIPHQIHLGELHAILRRQEDFYPFLKDNREKIEKILTFRIPYYVGPLARGNSRFAWMTRKSEETITPWNFEEVVDKGASAQSFIERMTNFDKNLPNEKVLPKHSLLYEYFTVYNELTKVKYVTEGMRKPAFLSGEQKKAIVDLLFKTNRKVTVKQLKEDYFKKIECFDSVEISGVEDRFNASLGTYHDLLKIIKDKDFLDNEENEDILEDIVLTLTLFEDREMIEERLKTYAHLFDDKVMKQLKRRRYTGWGRLSRKLINGIRDKQSGKTILDFLKSDGFANRNFMQLIHDDSLTFKEDIQKAQVSGQGDSLHEHIANLAGSPAIKKGILQTVKVVDELVKVMGRHKPENIVIEMARENQTTQKGQKNSRERMKRIEEGIKELGSQILKEHPVENTQLQNEKLYLYYLQNGRDMYVDQELDINRLSDYDVDHIVPQSFLKDDSIDNKVLTRSDKARGKSDNVPSEEVVKKMKNYWRQLLNAKLITQRKFDNLTKAERGGLSELDKAGFIKRQLVETRQITKHVAQILDSRMNTKYDENDKLIREVKVITLKSKLVSDFRKDFQFYKVREINNYHHAHDAYLNAVVGTALIKKYPKLESEFVYGDYKVYDVRKMIAKSEQEIGKATAKYFFYSNIMNFFKTEITLANGEIRKRPLIETNGETGEIVWDKGRDFATVRKVLSMPQVNIVKKTEVQTGGFSKESILPKRNSDKLIARKKDWDPKKYGGFDSPTVAYSVLVVAKVEKGKSKKLKSVKELLGITIMERSSFEKNPIDFLEAKGYKEVKKDLIIKLPKYSLFELENGRKRMLASAGELQKGNELALPSKYVNFLYLASHYEKLKGSPEDNEQKQLFVEQHKHYLDEIIEQISEFSKRVILADANLDKVLSAYNKHRDKPIREQAENIIHLFTLTNLGAPAAFKYFDTTIDRKRYTSTKEVLDATLIHQSITGLYETRIDLSQLGGDGGGGGEAAAKGSSGGTLGDQGSRGSDPLPEPRVTLTVEGIPTEFLVNTGAEHSVLTKPMGKMGSKRTVVAGATGSKVYPWTTKRLLKIGQKQVTHSFLVIPECPAPLLGRDLLTKLKAQIQFSTEGPQVTWEDRPAMCLVLNLEEEYRLHEKPVPPSIDPSWLQLFPMVWAEKAGMGLANQVPPVVVELKSDASPVAVRQYPMSKEAREGIRPHIQRFLDLGILVPCQSPWNTPLLPVKKPGTNDYRPVQDLREVNKRVQDIHPTVPNPYNLLSSLPPSHTWYSVLDLKDAFFCLKLHPNSQPLFAFEWRDPEKGNTGQLTWTRLPQGFKNSPTLFNEALHRDLASFRALNPQVVMLQYVDDLLVAAPTYRDCKEGTRRLLQELSKLGYRVSAKKAQLCREEVTYLGYLLKGGKRWLTPARKATVMKIPTPTTPRQVREFLGKAGFCRLFIPGFASLAAPLYPLTRPKVPFTWTEAHQEAFGRIKEALLSAPALALPDLTKPFALYVDEKEGVARGVLTQTLGPWRRPVAYLSKKLDPVASGWPTCLKAIAAVALLLKDADKLTLGQNVLVIAPHNLESIVRQPPDRWMTNARMTHYQSLLLNERVSFAPPAILNPATLLPVESDDTPIHICSEILAEETGTRPDLRDQPLPGVPAWYTDGSSFIMDGRRQAGAAIVDNKRTVWASNLPEGTSAQKAELIALTQALRLAEGKSINIYTDSRYAFATAHVHGAIYKQRGWLTSAGKDIKNKEEILALLEAIHLPKRVAIIHCPGHQRGTDPVATGNRKADEAAKQAAQSTRILTETTKNAGKRTADGSEFEKRTADGSEFESPKKKAKVE

SEQ ID NO: 1797 - protein, 2215 aa, synthetic construct
MPAAKRVKLDGGDKKYSIGLDIGTNSVGWAVITDEYKVPSKKFKVLGNTDRHSIKKNLIGALLFDSGETAEATRLKRTARRRYTRRKNRICYLQEIFSNEMAKVDDSFFHRLEESFLVEEDKKHERHPIFGNIVDEVAYHEKYPTIYHLRKKLVDSTDKADLRLIYLALAHMIKFRGHFLIEGDLNPDNSDVDKLFIQLVQTYNQLFEENPINASGVDAKAILSARLSKSRRLENLIAQLPGEKKNGLFGNLIALSLGLTPNFKSNFDLAEDAKLQLSKDTYDDDLDNLLAQIGDQYADLFLAAKNLSDAILLSDILRVNTEITKAPLSASMIKRYDEHHQDLTLLKALVRQQLPEKYKEIFFDQSKNGYAGYIDGGASQEEFYKFIKPILEKMDGTEELLVKLNREDLLRKQRTFDNGSIPHQIHLGELHAILRRQEDFYPFLKDNREKIEKILTFRIPYYVGPLARGNSRFAWMTRKSEETITPWNFEEVVDKGASAQSFIERMTNFDKNLPNEKVLPKHSLLYEYFTVYNELTKVKYVTEGMRKPAFLSGEQKKAIVDLLFKTNRKVTVKQLKEDYFKKIECFDSVEISGVEDRFNASLGTYHDLLKIIKDKDFLDNEENEDILEDIVLTLTLFEDREMIEERLKTYAHLFDDKVMKQLKRRRYTGWGRLSRKLINGIRDKQSGKTILDFLKSDGFANRNFMQLIHDDSLTFKEDIQKAQVSGQGDSLHEHIANLAGSPAIKKGILQTVKVVDELVKVMGRHKPENIVIEMARENQTTQKGQKNSRERMKRIEEGIKELGSQILKEHPVENTQLQNEKLYLYYLQNGRDMYVDQELDINRLSDYDVDHIVPQSFLKDDSIDNKVLTRSDKARGKSDNVPSEEVVKKMKNYWRQLLNAKLITQRKFDNLTKAERGGLSELDKAGFIKRQLVETRQITKHVAQILDSRMNTKYDENDKLIREVKVITLKSKLVSDFRKDFQFYKVREINNYHHAHDAYLNAVVGTALIKKYPKLESEFVYGDYKVYDVRKMIAKSEQEIGKATAKYFFYSNIMNFFKTEITLANGEIRKRPLIETNGETGEIVWDKGRDFATVRKVLSMPQVNIVKKTEVQTGGFSKESILPKRNSDKLIARKKDWDPKKYGGFDSPTVAYSVLVVAKVEKGKSKKLKSVKELLGITIMERSSFEKNPIDFLEAKGYKEVKKDLIIKLPKYSLFELENGRKRMLASAGELQKGNELALPSKYVNFLYLASHYEKLKGSPEDNEQKQLFVEQHKHYLDEIIEQISEFSKRVILADANLDKVLSAYNKHRDKPIREQAENIIHLFTLTNLGAPAAFKYFDTTIDRKRYTSTKEVLDATLIHQSITGLYETRIDLSQLGGDGGGSSEAAAKGGTLGDQGSRGSDPLPEPRVTLTVEGIPTEFLVNTGAEHSVLTKPMGKMGSKRTVVAGATGSKVYPWTTKRLLKIGQKQVTHSFLVIPECPAPLLGRDLLTKLKAQIQFSTEGPQVTWEDRPAMCLVLNLEEEYRLHEKPVPPSIDPSWLQLFPMVWAEKAGMGLANQVPPVVVELKSDASPVAVRQYPMSKEAREGIRPHIQRFLDLGILVPCQSPWNTPLLPVKKPGTNDYRPVQDLREVNKRVQDIHPTVPNPYNLLSSLPPSHTWYSVLDLKDAFFCLKLHPNSQPLFAFEWRDPEKGNTGQLTWTRLPQGFKNSPTLFNEALHRDLASFRALNPQVVMLQYVDDLLVAAPTYRDCKEGTRRLLQELSKLGYRVSAKKAQLCREEVTYLGYLLKGGKRWLTPARKATVMKIPTPTTPRQVREFLGKAGFCRLFIPGFASLAAPLYPLTRPKVPFTWTEAHQEAFGRIKEALLSAPALALPDLTKPFALYVDEKEGVARGVLTQTLGPWRRPVAYLSKKLDPVASGWPTCLKAIAAVALLLKDADKLTLGQNVLVIAPHNLESIVRQPPDRWMTNARMTHYQSLLLNERVSFAPPAILNPATLLPVESDDTPIHICSEILAEETGTRPDLRDQPLPGVPAWYTDGSSFIMDGRRQAGAAIVDNKRTVWASNLPEGTSAQKAELIALTQALRLAEGKSINIYTDSRYAFATAHVHGAIYKQRGWLTSAGKDIKNKEEILALLEAIHLPKRVAIIHCPGHQRGTDPVATGNRKADEAAKQAAQSTRILTETTKNAGKRTADGSEFEKRTADGSEFESPKKKAKVE

SEQ ID NO: 1798 - protein, 2211 aa, synthetic construct
MPAAKRVKLDGGDKKYSIGLDIGTNSVGWAVITDEYKVPSKKFKVLGNTDRHSIKKNLIGALLFDSGETAEATRLKRTARRRYTRRKNRICYLQEIFSNEMAKVDDSFFHRLEESFLVEEDKKHERHPIFGNIVDEVAYHEKYPTIYHLRKKLVDSTDKADLRLIYLALAHMIKFRGHFLIEGDLNPDNSDVDKLFIQLVQTYNQLFEENPINASGVDAKAILSARLSKSRRLENLIAQLPGEKKNGLFGNLIALSLGLTPNFKSNFDLAEDAKLQLSKDTYDDDLDNLLAQIGDQYADLFLAAKNLSDAILLSDILRVNTEITKAPLSASMIKRYDEHHQDLTLLKALVRQQLPEKYKEIFFDQSKNGYAGYIDGGASQEEFYKFIKPILEKMDGTEELLVKLNREDLLRKQRTFDNGSIPHQIHLGELHAILRRQEDFYPFLKDNREKIEKILTFRIPYYVGPLARGNSRFAWMTRKSEETITPWNFEEVVDKGASAQSFIERMTNFDKNLPNEKVLPKHSLLYEYFTVYNELTKVKYVTEGMRKPAFLSGEQKKAIVDLLFKTNRKVTVKQLKEDYFKKIECFDSVEISGVEDRFNASLGTYHDLLKIIKDKDFLDNEENEDILEDIVLTLTLFEDREMIEERLKTYAHLFDDKVMKQLKRRRYTGWGRLSRKLINGIRDKQSGKTILDFLKSDGFANRNFMQLIHDDSLTFKEDIQKAQVSGQGDSLHEHIANLAGSPAIKKGILQTVKVVDELVKVMGRHKPENIVIEMARENQTTQKGQKNSRERMKRIEEGIKELGSQILKEHPVENTQLQNEKLYLYYLQNGRDMYVDQELDINRLSDYDVDHIVPQSFLKDDSIDNKVLTRSDKARGKSDNVPSEEVVKKMKNYWRQLLNAKLITQRKFDNLTKAERGGLSELDKAGFIKRQLVETRQITKHVAQILDSRMNTKYDENDKLIREVKVITLKSKLVSDFRKDFQFYKVREINNYHHAHDAYLNAVVGTALIKKYPKLESEFVYGDYKVYDVRKMIAKSEQEIGKATAKYFFYSNIMNFFKTEITLANGEIRKRPLIETNGETGEIVWDKGRDFATVRKVLSMPQVNIVKKTEVQTGGFSKESILPKRNSDKLIARKKDWDPKKYGGFDSPTVAYSVLVVAKVEKGKSKKLKSVKELLGITIMERSSFEKNPIDFLEAKGYKEVKKDLIIKLPKYSLFELENGRKRMLASAGELQKGNELALPSKYVNFLYLASHYEKLKGSPEDNEQKQLFVEQHKHYLDEIIEQISEFSKRVILADANLDKVLSAYNKHRDKPIREQAENIIHLFTLTNLGAPAAFKYFDTTIDRKRYTSTKEVLDATLIHQSITGLYETRIDLSQLGGDGGGGGGGGTLGDQGSRGSDPLPEPRVTLTVEGIPTEFLVNTGAEHSVLTKPMGKMGSKRTVVAGATGSKVYPWTTKRLLKIGQKQVTHSFLVIPECPAPLLGRDLLTKLKAQIQFSTEGPQVTWEDRPAMCLVLNLEEEYRLHEKPVPPSIDPSWLQLFPMVWAEKAGMGLANQVPPVVVELKSDASPVAVRQYPMSKEAREGIRPHIQRFLDLGILVPCQSPWNTPLLPVKKPGTNDYRPVQDLREVNKRVQDIHPTVPNPYNLLSSLPPSHTWYSVLDLKDAFFCLKLHPNSQPLFAFEWRDPEKGNTGQLTWTRLPQGFKNSPTLFNEALHRDLASFRALNPQVVMLQYVDDLLVAAPTYRDCKEGTRRLLQELSKLGYRVSAKKAQLCREEVTYLGYLLKGGKRWLTPARKATVMKIPTPTTPRQVREFLGKAGFCRLFIPGFASLAAPLYPLTRPKVPFTWTEAHQEAFGRIKEALLSAPALALPDLTKPFALYVDEKEGVARGVLTQTLGPWRRPVAYLSKKLDPVASGWPTCLKAIAAVALLLKDADKLTLGQNVLVIAPHNLESIVRQPPDRWMTNARMTHYQSLLLNERVSFAPPAILNPATLLPVESDDTPIHICSEILAEETGTRPDLRDQPLPGVPAWYTDGSSFIMDGRRQAGAAIVDNKRTVWASNLPEGTSAQKAELIALTQALRLAEGKSINIYTDSRYAFATAHVHGAIYKQRGWLTSAGKDIKNKEEILALLEAIHLPKRVAIIHCPGHQRGTDPVATGNRKADEAAKQAAQSTRILTETTKNAGKRTADGSEFEKRTADGSEFESPKKKAKVE

SEQ ID NO: 1799 - protein, 2215 aa, synthetic construct
MPAAKRVKLDGGDKKYSIGLDIGTNSVGWAVITDEYKVPSKKFKVLGNTDRHSIKKNLIGALLFDSGETAEATRLKRTARRRYTRRKNRICYLQEIFSNEMAKVDDSFFHRLEESFLVEEDKKHERHPIFGNIVDEVAYHEKYPTIYHLRKKLVDSTDKADLRLIYLALAHMIKFRGHFLIEGDLNPDNSDVDKLFIQLVQTYNQLFEENPINASGVDAKAILSARLSKSRRLENLIAQLPGEKKNGLFGNLIALSLGLTPNFKSNFDLAEDAKLQLSKDTYDDDLDNLLAQIGDQYADLFLAAKNLSDAILLSDILRVNTEITKAPLSASMIKRYDEHHQDLTLLKALVRQQLPEKYKEIFFDQSKNGYAGYIDGGASQEEFYKFIKPILEKMDGTEELLVKLNREDLLRKQRTFDNGSIPHQIHLGELHAILRRQEDFYPFLKDNREKIEKILTFRIPYYVGPLARGNSRFAWMTRKSEETITPWNFEEVVDKGASAQSFIERMTNFDKNLPNEKVLPKHSLLYEYFTVYNELTKVKYVTEGMRKPAFLSGEQKKAIVDLLFKTNRKVTVKQLKEDYFKKIECFDSVEISGVEDRFNASLGTYHDLLKIIKDKDFLDNEENEDILEDIVLTLTLFEDREMIEERLKTYAHLFDDKVMKQLKRRRYTGWGRLSRKLINGIRDKQSGKTILDFLKSDGFANRNFMQLIHDDSLTFKEDIQKAQVSGQGDSLHEHIANLAGSPAIKKGILQTVKVVDELVKVMGRHKPENIVIEMARENQTTQKGQKNSRERMKRIEEGIKELGSQILKEHPVENTQLQNEKLYLYYLQNGRDMYVDQELDINRLSDYDVDHIVPQSFLKDDSIDNKVLTRSDKARGKSDNVPSEEVVKKMKNYWRQLLNAKLITQRKFDNLTKAERGGLSELDKAGFIKRQLVETRQITKHVAQILDSRMNTKYDENDKLIREVKVITLKSKLVSDFRKDFQFYKVREINNYHHAHDAYLNAVVGTALIKKYPKLESEFVYGDYKVYDVRKMIAKSEQEIGKATAKYFFYSNIMNFFKTEITLANGEIRKRPLIETNGETGEIVWDKGRDFATVRKVLSMPQVNIVKKTEVQTGGFSKESILPKRNSDKLIARKKDWDPKKYGGFDSPTVAYSVLVVAKVEKGKSKKLKSVKELLGITIMERSSFEKNPIDFLEAKGYKEVKKDLIIKLPKYSLFELENGRKRMLASAGELQKGNELALPSKYVNFLYLASHYEKLKGSPEDNEQKQLFVEQHKHYLDEIIEQISEFSKRVILADANLDKVLSAYNKHRDKPIREQAENIIHLFTLTNLGAPAAFKYFDTTIDRKRYTSTKEVLDATLIHQSITGLYETRIDLSQLGGDGGGGGGGGGGGGTLGDQGSRGSDPLPEPRVTLTVEGIPTEFLVNTGAEHSVLTKPMGKMGSKRTVVAGATGSKVYPWTTKRLLKIGQKQVTHSFLVIPECPAPLLGRDLLTKLKAQIQFSTEGPQVTWEDRPAMCLVLNLEEEYRLHEKPVPPSIDPSWLQLFPMVWAEKAGMGLANQVPPVVVELKSDASPVAVRQYPMSKEAREGIRPHIQRFLDLGILVPCQSPWNTPLLPVKKPGTNDYRPVQDLREVNKRVQDIHPTVPNPYNLLSSLPPSHTWYSVLDLKDAFFCLKLHPNSQPLFAFEWRDPEKGNTGQLTWTRLPQGFKNSPTLFNEALHRDLASFRALNPQVVMLQYVDDLLVAAPTYRDCKEGTRRLLQELSKLGYRVSAKKAQLCREEVTYLGYLLKGGKRWLTPARKATVMKIPTPTTPRQVREFLGKAGFCRLFIPGFASLAAPLYPLTRPKVPFTWTEAHQEAFGRIKEALLSAPALALPDLTKPFALYVDEKEGVARGVLTQTLGPWRRPVAYLSKKLDPVASGWPTCLKAIAAVALLLKDADKLTLGQNVLVIAPHNLESIVRQPPDRWMTNARMTHYQSLLLNERVSFAPPAILNPATLLPVESDDTPIHICSEILAEETGTRPDLRDQPLPGVPAWYTDGSSFIMDGRRQAGAAIVDNKRTVWASNLPEGTSAQKAELIALTQALRLAEGKSINIYTDSRYAFATAHVHGAIYKQRGWLTSAGKDIKNKEEILALLEAIHLPKRVAIIHCPGHQRGTDPVATGNRKADEAAKQAAQSTRILTETTKNAGKRTADGSEFEKRTADGSEFESPKKKAKVE

SEQ ID NO: 1800 - protein, 2223 aa, synthetic construct
MPAAKRVKLDGGDKKYSIGLDIGTNSVGWAVITDEYKVPSKKFKVLGNTDRHSIKKNLIGALLFDSGETAEATRLKRTARRRYTRRKNRICYLQEIFSNEMAKVDDSFFHRLEESFLVEEDKKHERHPIFGNIVDEVAYHEKYPTIYHLRKKLVDSTDKADLRLIYLALAHMIKFRGHFLIEGDLNPDNSDVDKLFIQLVQTYNQLFEENPINASGVDAKAILSARLSKSRRLENLIAQLPGEKKNGLFGNLIALSLGLTPNFKSNFDLAEDAKLQLSKDTYDDDLDNLLAQIGDQYADLFLAAKNLSDAILLSDILRVNTEITKAPLSASMIKRYDEHHQDLTLLKALVRQQLPEKYKEIFFDQSKNGYAGYIDGGASQEEFYKFIKPILEKMDGTEELLVKLNREDLLRKQRTFDNGSIPHQIHLGELHAILRRQEDFYPFLKDNREKIEKILTFRIPYYVGPLARGNSRFAWMTRKSEETITPWNFEEVVDKGASAQSFIERMTNFDKNLPNEKVLPKHSLLYEYFTVYNELTKVKYVTEGMRKPAFLSGEQKKAIVDLLFKTNRKVTVKQLKEDYFKKIECFDSVEISGVEDRFNASLGTYHDLLKIIKDKDFLDNEENEDILEDIVLTLTLFEDREMIEERLKTYAHLFDDKVMKQLKRRRYTGWGRLSRKLINGIRDKQSGKTILDFLKSDGFANRNFMQLIHDDSLTFKEDIQKAQVSGQGDSLHEHIANLAGSPAIKKGILQTVKVVDELVKVMGRHKPENIVIEMARENQTTQKGQKNSRERMKRIEEGIKELGSQILKEHPVENTQLQNEKLYLYYLQNGRDMYVDQELDINRLSDYDVDHIVPQSFLKDDSIDNKVLTRSDKARGKSDNVPSEEVVKKMKNYWRQLLNAKLITQRKFDNLTKAERGGLSELDKAGFIKRQLVETRQITKHVAQILDSRMNTKYDENDKLIREVKVITLKSKLVSDFRKDFQFYKVREINNYHHAHDAYLNAVVGTALIKKYPKLESEFVYGDYKVYDVRKMIAKSEQEIGKATAKYFFYSNIMNFFKTEITLANGEIRKRPLIETNGETGEIVWDKGRDFATVRKVLSMPQVNIVKKTEVQTGGFSKESILPKRNSDKLIARKKDWDPKKYGGFDSPTVAYSVLVVAKVEKGKSKKLKSVKELLGITIMERSSFEKNPIDFLEAKGYKEVKKDLIIKLPKYSLFELENGRKRMLASAGELQKGNELALPSKYVNFLYLASHYEKLKGSPEDNEQKQLFVEQHKHYLDEIIEQISEFSKRVILADANLDKVLSAYNKHRDKPIREQAENIIHLFTLTNLGAPAAFKYFDTTIDRKRYTSTKEVLDATLIHQSITGLYETRIDLSQLGGDGGSGSETPGTSESATPESGGTLGDQGSRGSDPLPEPRVTLTVEGIPTEFLVNTGAEHSVLTKPMGKMGSKRTVVAGATGSKVYPWTTKRLLKIGQKQVTHSFLVIPECPAPLLGRDLLTKLKAQIQFSTEGPQVTWEDRPAMCLVLNLEEEYRLHEKPVPPSIDPSWLQLFPMVWAEKAGMGLANQVPPVVVELKSDASPVAVRQYPMSKEAREGIRPHIQRFLDLGILVPCQSPWNTPLLPVKKPGTNDYRPVQDLREVNKRVQDIHPTVPNPYNLLSSLPPSHTWYSVLDLKDAFFCLKLHPNSQPLFAFEWRDPEKGNTGQLTWTRLPQGFKNSPTLFNEALHRDLASFRALNPQVVMLQYVDDLLVAAPTYRDCKEGTRRLLQELSKLGYRVSAKKAQLCREEVTYLGYLLKGGKRWLTPARKATVMKIPTPTTPRQVREFLGKAGFCRLFIPGFASLAAPLYPLTRPKVPFTWTEAHQEAFGRIKEALLSAPALALPDLTKPFALYVDEKEGVARGVLTQTLGPWRRPVAYLSKKLDPVASGWPTCLKAIAAVALLLKDADKLTLGQNVLVIAPHNLESIVRQPPDRWMTNARMTHYQSLLLNERVSFAPPAILNPATLLPVESDDTPIHICSEILAEETGTRPDLRDQPLPGVPAWYTDGSSFIMDGRRQAGAAIVDNKRTVWASNLPEGTSAQKAELIALTQALRLAEGKSINIYTDSRYAFATAHVHGAIYKQRGWLTSAGKDIKNKEEILALLEAIHLPKRVAIIHCPGHQRGTDPVATGNRKADEAAKQAAQSTRILTETTKNAGKRTADGSEFEKRTADGSEFESPKKKAKVE

SEQ ID NO: 1801 - protein, 2218 aa, synthetic construct
MPAAKRVKLDGGDKKYSIGLDIGTNSVGWAVITDEYKVPSKKFKVLGNTDRHSIKKNLIGALLFDSGETAEATRLKRTARRRYTRRKNRICYLQEIFSNEMAKVDDSFFHRLEESFLVEEDKKHERHPIFGNIVDEVAYHEKYPTIYHLRKKLVDSTDKADLRLIYLALAHMIKFRGHFLIEGDLNPDNSDVDKLFIQLVQTYNQLFEENPINASGVDAKAILSARLSKSRRLENLIAQLPGEKKNGLFGNLIALSLGLTPNFKSNFDLAEDAKLQLSKDTYDDDLDNLLAQIGDQYADLFLAAKNLSDAILLSDILRVNTEITKAPLSASMIKRYDEHHQDLTLLKALVRQQLPEKYKEIFFDQSKNGYAGYIDGGASQEEFYKFIKPILEKMDGTEELLVKLNREDLLRKQRTFDNGSIPHQIHLGELHAILRRQEDFYPFLKDNREKIEKILTFRIPYYVGPLARGNSRFAWMTRKSEETITPWNFEEVVDKGASAQSFIERMTNFDKNLPNEKVLPKHSLLYEYFTVYNELTKVKYVTEGMRKPAFLSGEQKKAIVDLLFKTNRKVTVKQLKEDYFKKIECFDSVEISGVEDRFNASLGTYHDLLKIIKDKDFLDNEENEDILEDIVLTLTLFEDREMIEERLKTYAHLFDDKVMKQLKRRRYTGWGRLSRKLINGIRDKQSGKTILDFLKSDGFANRNFMQLIHDDSLTFKEDIQKAQVSGQGDSLHEHIANLAGSPAIKKGILQTVKVVDELVKVMGRHKPENIVIEMARENQTTQKGQKNSRERMKRIEEGIKELGSQILKEHPVENTQLQNEKLYLYYLQNGRDMYVDQELDINRLSDYDVDHIVPQSFLKDDSIDNKVLTRSDKARGKSDNVPSEEVVKKMKNYWRQLLNAKLITQRKFDNLTKAERGGLSELDKAGFIKRQLVETRQITKHVAQILDSRMNTKYDENDKLIREVKVITLKSKLVSDFRKDFQFYKVREINNYHHAHDAYLNAVVGTALIKKYPKLESEFVYGDYKVYDVRKMIAKSEQEIGKATAKYFFYSNIMNFFKTEITLANGEIRKRPLIETNGETGEIVWDKGRDFATVRKVLSMPQVNIVKKTEVQTGGFSKESILPKRNSDKLIARKKDWDPKKYGGFDSPTVAYSVLVVAKVEKGKSKKLKSVKELLGITIMERSSFEKNPIDFLEAKGYKEVKKDLIIKLPKYSLFELENGRKRMLASAGELQKGNELALPSKYVNFLYLASHYEKLKGSPEDNEQKQLFVEQHKHYLDEIIEQISEFSKRVILADANLDKVLSAYNKHRDKPIREQAENIIHLFTLTNLGAPAAFKYFDTTIDRKRYTSTKEVLDATLIHQSITGLYETRIDLSQLGGDGGGSSGGSEAAAKGGTLGDQGSRGSDPLPEPRVTLTVEGIPTEFLVNTGAEHSVLTKPMGKMGSKRTVVAGATGSKVYPWTTKRLLKIGQKQVTHSFLVIPECPAPLLGRDLLTKLKAQIQFSTEGPQVTWEDRPAMCLVLNLEEEYRLHEKPVPPSIDPSWLQLFPMVWAEKAGMGLANQVPPVVVELKSDASPVAVRQYPMSKEAREGIRPHIQRFLDLGILVPCQSPWNTPLLPVKKPGTNDYRPVQDLREVNKRVQDIHPTVPNPYNLLSSLPPSHTWYSVLDLKDAFFCLKLHPNSQPLFAFEWRDPEKGNTGQLTWTRLPQGFKNSPTLFNEALHRDLASFRALNPQVVMLQYVDDLLVAAPTYRDCKEGTRRLLQELSKLGYRVSAKKAQLCREEVTYLGYLLKGGKRWLTPARKATVMKIPTPTTPRQVREFLGKAGFCRLFIPGFASLAAPLYPLTRPKVPFTWTEAHQEAFGRIKEALLSAPALALPDLTKPFALYVDEKEGVARGVLTQTLGPWRRPVAYLSKKLDPVASGWPTCLKAIAAVALLLKDADKLTLGQNVLVIAPHNLESIVRQPPDRWMTNARMTHYQSLLLNERVSFAPPAILNPATLLPVESDDTPIHICSEILAEETGTRPDLRDQPLPGVPAWYTDGSSFIMDGRRQAGAAIVDNKRTVWASNLPEGTSAQKAELIALTQALRLAEGKSINIYTDSRYAFATAHVHGAIYKQRGWLTSAGKDIKNKEEILALLEAIHLPKRVAIIHCPGHQRGTDPVATGNRKADEAAKQAAQSTRILTETTKNAGKRTADGSEFEKRTADGSEFESPKKKAKVE

SEQ ID NO: 1802 - protein, 2216 aa, synthetic construct
MPAAKRVKLDGGDKKYSIGLDIGTNSVGWAVITDEYKVPSKKFKVLGNTDRHSIKKNLIGALLFDSGETAEATRLKRTARRRYTRRKNRICYLQEIFSNEMAKVDDSFFHRLEESFLVEEDKKHERHPIFGNIVDEVAYHEKYPTIYHLRKKLVDSTDKADLRLIYLALAHMIKFRGHFLIEGDLNPDNSDVDKLFIQLVQTYNQLFEENPINASGVDAKAILSARLSKSRRLENLIAQLPGEKKNGLFGNLIALSLGLTPNFKSNFDLAEDAKLQLSKDTYDDDLDNLLAQIGDQYADLFLAAKNLSDAILLSDILRVNTEITKAPLSASMIKRYDEHHQDLTLLKALVRQQLPEKYKEIFFDQSKNGYAGYIDGGASQEEFYKFIKPILEKMDGTEELLVKLNREDLLRKQRTFDNGSIPHQIHLGELHAILRRQEDFYPFLKDNREKIEKILTFRIPYYVGPLARGNSRFAWMTRKSEETITPWNFEEVVDKGASAQSFIERMTNFDKNLPNEKVLPKHSLLYEYFTVYNELTKVKYVTEGMRKPAFLSGEQKKAIVDLLFKTNRKVTVKQLKEDYFKKIECFDSVEISGVEDRFNASLGTYHDLLKIIKDKDFLDNEENEDILEDIVLTLTLFEDREMIEERLKTYAHLFDDKVMKQLKRRRYTGWGRLSRKLINGIRDKQSGKTILDFLKSDGFANRNFMQLIHDDSLTFKEDIQKAQVSGQGDSLHEHIANLAGSPAIKKGILQTVKVVDELVKVMGRHKPENIVIEMARENQTTQKGQKNSRERMKRIEEGIKELGSQILKEHPVENTQLQNEKLYLYYLQNGRDMYVDQELDINRLSDYDVDHIVPQSFLKDDSIDNKVLTRSDKARGKSDNVPSEEVVKKMKNYWRQLLNAKLITQRKFDNLTKAERGGLSELDKAGFIKRQLVETRQITKHVAQILDSRMNTKYDENDKLIREVKVITLKSKLVSDFRKDFQFYKVREINNYHHAHDAYLNAVVGTALIKKYPKLESEFVYGDYKVYDVRKMIAKSEQEIGKATAKYFFYSNIMNFFKTEITLANGEIRKRPLIETNGETGEIVWDKGRDFATVRKVLSMPQVNIVKKTEVQTGGFSKESILPKRNSDKLIARKKDWDPKKYGGFDSPTVAYSVLVVAKVEKGKSKKLKSVKELLGITIMERSSFEKNPIDFLEAKGYKEVKKDLIIKLPKYSLFELENGRKRMLASAGELQKGNELALPSKYVNFLYLASHYEKLKGSPEDNEQKQLFVEQHKHYLDEIIEQISEFSKRVILADANLDKVLSAYNKHRDKPIREQAENIIHLFTLTNLGAPAAFKYFDTTIDRKRYTSTKEVLDATLIHQSITGLYETRIDLSQLGGDGGGGSPAPGSSGGTLGDQGSRGSDPLPEPRVTLTVEGIPTEFLVNTGAEHSVLTKPMGKMGSKRTVVAGATGSKVYPWTTKRLLKIGQKQVTHSFLVIPECPAPLLGRDLLTKLKAQIQFSTEGPQVTWEDRPAMCLVLNLEEEYRLHEKPVPPSIDPSWLQLFPMVWAEKAGMGLANQVPPVVVELKSDASPVAVRQYPMSKEAREGIRPHIQRFLDLGILVPCQSPWNTPLLPVKKPGTNDYRPVQDLREVNKRVQDIHPTVPNPYNLLSSLPPSHTWYSVLDLKDAFFCLKLHPNSQPLFAFEWRDPEKGNTGQLTWTRLPQGFKNSPTLFNEALHRDLASFRALNPQVVMLQYVDDLLVAAPTYRDCKEGTRRLLQELSKLGYRVSAKKAQLCREEVTYLGYLLKGGKRWLTPARKATVMKIPTPTTPRQVREFLGKAGFCRLFIPGFASLAAPLYPLTRPKVPFTWTEAHQEAFGRIKEALLSAPALALPDLTKPFALYVDEKEGVARGVLTQTLGPWRRPVAYLSKKLDPVASGWPTCLKAIAAVALLLKDADKLTLGQNVLVIAPHNLESIVRQPPDRWMTNARMTHYQSLLLNERVSFAPPAILNPATLLPVESDDTPIHICSEILAEETGTRPDLRDQPLPGVPAWYTDGSSFIMDGRRQAGAAIVDNKRTVWASNLPEGTSAQKAELIALTQALRLAEGKSINIYTDSRYAFATAHVHGAIYKQRGWLTSAGKDIKNKEEILALLEAIHLPKRVAIIHCPGHQRGTDPVATGNRKADEAAKQAAQSTRILTETTKNAGKRTADGSEFEKRTADGSEFESPKKKAKVE

SEQ ID NO: 1803 - protein, 2237 aa, synthetic construct
MPAAKRVKLDGGDKKYSIGLDIGTNSVGWAVITDEYKVPSKKFKVLGNTDRHSIKKNLIGALLFDSGETAEATRLKRTARRRYTRRKNRICYLQEIFSNEMAKVDDSFFHRLEESFLVEEDKKHERHPIFGNIVDEVAYHEKYPTIYHLRKKLVDSTDKADLRLIYLALAHMIKFRGHFLIEGDLNPDNSDVDKLFIQLVQTYNQLFEENPINASGVDAKAILSARLSKSRRLENLIAQLPGEKKNGLFGNLIALSLGLTPNFKSNFDLAEDAKLQLSKDTYDDDLDNLLAQIGDQYADLFLAAKNLSDAILLSDILRVNTEITKAPLSASMIKRYDEHHQDLTLLKALVRQQLPEKYKEIFFDQSKNGYAGYIDGGASQEEFYKFIKPILEKMDGTEELLVKLNREDLLRKQRTFDNGSIPHQIHLGELHAILRRQEDFYPFLKDNREKIEKILTFRIPYYVGPLARGNSRFAWMTRKSEETITPWNFEEVVDKGASAQSFIERMTNFDKNLPNEKVLPKHSLLYEYFTVYNELTKVKYVTEGMRKPAFLSGEQKKAIVDLLFKTNRKVTVKQLKEDYFKKIECFDSVEISGVEDRFNASLGTYHDLLKIIKDKDFLDNEENEDILEDIVLTLTLFEDREMIEERLKTYAHLFDDKVMKQLKRRRYTGWGRLSRKLINGIRDKQSGKTILDFLKSDGFANRNFMQLIHDDSLTFKEDIQKAQVSGQGDSLHEHIANLAGSPAIKKGILQTVKVVDELVKVMGRHKPENIVIEMARENQTTQKGQKNSRERMKRIEEGIKELGSQILKEHPVENTQLQNEKLYLYYLQNGRDMYVDQELDINRLSDYDVDHIVPQSFLKDDSIDNKVLTRSDKARGKSDNVPSEEVVKKMKNYWRQLLNAKLITQRKFDNLTKAERGGLSELDKAGFIKRQLVETRQITKHVAQILDSRMNTKYDENDKLIREVKVITLKSKLVSDFRKDFQFYKVREINNYHHAHDAYLNAVVGTALIKKYPKLESEFVYGDYKVYDVRKMIAKSEQEIGKATAKYFFYSNIMNFFKTEITLANGEIRKRPLIETNGETGEIVWDKGRDFATVRKVLSMPQVNIVKKTEVQTGGFSKESILPKRNSDKLIARKKDWDPKKYGGFDSPTVAYSVLVVAKVEKGKSKKLKSVKELLGITIMERSSFEKNPIDFLEAKGYKEVKKDLIIKLPKYSLFELENGRKRMLASAGELQKGNELALPSKYVNFLYLASHYEKLKGSPEDNEQKQLFVEQHKHYLDEIIEQISEFSKRVILADANLDKVLSAYNKHRDKPIREQAENIIHLFTLTNLGAPAAFKYFDTTIDRKRYTSTKEVLDATLIHQSITGLYETRIDLSQLGGDGGGGGGSGGGGSGGGGSGGGGSGGGGSGGGGSGGTLGDQGSRGSDPLPEPRVTLTVEGIPTEFLVNTGAEHSVLTKPMGKMGSKRTVVAGATGSKVYPWTTKRLLKIGQKQVTHSFLVIPECPAPLLGRDLLTKLKAQIQFSTEGPQVTWEDRPAMCLVLNLEEEYRLHEKPVPPSIDPSWLQLFPMVWAEKAGMGLANQVPPVVVELKSDASPVAVRQYPMSKEAREGIRPHIQRFLDLGILVPCQSPWNTPLLPVKKPGTNDYRPVQDLREVNKRVQDIHPTVPNPYNLLSSLPPSHTWYSVLDLKDAFFCLKLHPNSQPLFAFEWRDPEKGNTGQLTWTRLPQGFKNSPTLFNEALHRDLASFRALNPQVVMLQYVDDLLVAAPTYRDCKEGTRRLLQELSKLGYRVSAKKAQLCREEVTYLGYLLKGGKRWLTPARKATVMKIPTPTTPRQVREFLGKAGFCRLFIPGFASLAAPLYPLTRPKVPFTWTEAHQEAFGRIKEALLSAPALALPDLTKPFALYVDEKEGVARGVLTQTLGPWRRPVAYLSKKLDPVASGWPTCLKAIAAVALLLKDADKLTLGQNVLVIAPHNLESIVRQPPDRWMTNARMTHYQSLLLNERVSFAPPAILNPATLLPVESDDTPIHICSEILAEETGTRPDLRDQPLPGVPAWYTDGSSFIMDGRRQAGAAIVDNKRTVWASNLPEGTSAQKAELIALTQALRLAEGKSINIYTDSRYAFATAHVHGAIYKQRGWLTSAGKDIKNKEEILALLEAIHLPKRVAIIHCPGHQRGTDPVATGNRKADEAAKQAAQSTRILTETTKNAGKRTADGSEFEKRTADGSEFESPKKKAKVE

SEQ ID NO: 1804 - protein, 2218 aa, synthetic construct
MPAAKRVKLDGGDKKYSIGLDIGTNSVGWAVITDEYKVPSKKFKVLGNTDRHSIKKNLIGALLFDSGETAEATRLKRTARRRYTRRKNRICYLQEIFSNEMAKVDDSFFHRLEESFLVEEDKKHERHPIFGNIVDEVAYHEKYPTIYHLRKKLVDSTDKADLRLIYLALAHMIKFRGHFLIEGDLNPDNSDVDKLFIQLVQTYNQLFEENPINASGVDAKAILSARLSKSRRLENLIAQLPGEKKNGLFGNLIALSLGLTPNFKSNFDLAEDAKLQLSKDTYDDDLDNLLAQIGDQYADLFLAAKNLSDAILLSDILRVNTEITKAPLSASMIKRYDEHHQDLTLLKALVRQQLPEKYKEIFFDQSKNGYAGYIDGGASQEEFYKFIKPILEKMDGTEELLVKLNREDLLRKQRTFDNGSIPHQIHLGELHAILRRQEDFYPFLKDNREKIEKILTFRIPYYVGPLARGNSRFAWMTRKSEETITPWNFEEVVDKGASAQSFIERMTNFDKNLPNEKVLPKHSLLYEYFTVYNELTKVKYVTEGMRKPAFLSGEQKKAIVDLLFKTNRKVTVKQLKEDYFKKIECFDSVEISGVEDRFNASLGTYHDLLKIIKDKDFLDNEENEDILEDIVLTLTLFEDREMIEERLKTYAHLFDDKVMKQLKRRRYTGWGRLSRKLINGIRDKQSGKTILDFLKSDGFANRNFMQLIHDDSLTFKEDIQKAQVSGQGDSLHEHIANLAGSPAIKKGILQTVKVVDELVKVMGRHKPENIVIEMARENQTTQKGQKNSRERMKRIEEGIKELGSQILKEHPVENTQLQNEKLYLYYLQNGRDMYVDQELDINRLSDYDVDHIVPQSFLKDDSIDNKVLTRSDKARGKSDNVPSEEVVKKMKNYWRQLLNAKLITQRKFDNLTKAERGGLSELDKAGFIKRQLVETRQITKHVAQILDSRMNTKYDENDKLIREVKVITLKSKLVSDFRKDFQFYKVREINNYHHAHDAYLNAVVGTALIKKYPKLESEFVYGDYKVYDVRKMIAKSEQEIGKATAKYFFYSNIMNFFKTEITLANGEIRKRPLIETNGETGEIVWDKGRDFATVRKVLSMPQVNIVKKTEVQTGGFSKESILPKRNSDKLIARKKDWDPKKYGGFDSPTVAYSVLVVAKVEKGKSKKLKSVKELLGITIMERSSFEKNPIDFLEAKGYKEVKKDLIIKLPKYSLFELENGRKRMLASAGELQKGNELALPSKYVNFLYLASHYEKLKGSPEDNEQKQLFVEQHKHYLDEIIEQISEFSKRVILADANLDKVLSAYNKHRDKPIREQAENIIHLFTLTNLGAPAAFKYFDTTIDRKRYTSTKEVLDATLIHQSITGLYETRIDLSQLGGDGGEAAAKGSSPAPGGTLGDQGSRGSDPLPEPRVTLTVEGIPTEFLVNTGAEHSVLTKPMGKMGSKRTVVAGATGSKVYPWTTKRLLKIGQKQVTHSFLVIPECPAPLLGRDLLTKLKAQIQFSTEGPQVTWEDRPAMCLVLNLEEEYRLHEKPVPPSIDPSWLQLFPMVWAEKAGMGLANQVPPVVVELKSDASPVAVRQYPMSKEAREGIRPHIQRFLDLGILVPCQSPWNTPLLPVKKPGTNDYRPVQDLREVNKRVQDIHPTVPNPYNLLSSLPPSHTWYSVLDLKDAFFCLKLHPNSQPLFAFEWRDPEKGNTGQLTWTRLPQGFKNSPTLFNEALHRDLASFRALNPQVVMLQYVDDLLVAAPTYRDCKEGTRRLLQELSKLGYRVSAKKAQLCREEVTYLGYLLKGGKRWLTPARKATVMKIPTPTTPRQVREFLGKAGFCRLFIPGFASLAAPLYPLTRPKVPFTWTEAHQEAFGRIKEALLSAPALALPDLTKPFALYVDEKEGVARGVLTQTLGPWRRPVAYLSKKLDPVASGWPTCLKAIAAVALLLKDADKLTLGQNVLVIAPHNLESIVRQPPDRWMTNARMTHYQSLLLNERVSFAPPAILNPATLLPVESDDTPIHICSEILAEETGTRPDLRDQPLPGVPAWYTDGSSFIMDGRRQAGAAIVDNKRTVWASNLPEGTSAQKAELIALTQALRLAEGKSINIYTDSRYAFATAHVHGAIYKQRGWLTSAGKDIKNKEEILALLEAIHLPKRVAIIHCPGHQRGTDPVATGNRKADEAAKQAAQSTRILTETTKNAGKRTADGSEFEKRTADGSEFESPKKKAKVE

SEQ ID NO: 1805 - protein, 2218 aa, synthetic construct
MPAAKRVKLDGGDKKYSIGLDIGTNSVGWAVITDEYKVPSKKFKVLGNTDRHSIKKNLIGALLFDSGETAEATRLKRTARRRYTRRKNRICYLQEIFSNEMAKVDDSFFHRLEESFLVEEDKKHERHPIFGNIVDEVAYHEKYPTIYHLRKKLVDSTDKADLRLIYLALAHMIKFRGHFLIEGDLNPDNSDVDKLFIQLVQTYNQLFEENPINASGVDAKAILSARLSKSRRLENLIAQLPGEKKNGLFGNLIALSLGLTPNFKSNFDLAEDAKLQLSKDTYDDDLDNLLAQIGDQYADLFLAAKNLSDAILLSDILRVNTEITKAPLSASMIKRYDEHHQDLTLLKALVRQQLPEKYKEIFFDQSKNGYAGYIDGGASQEEFYKFIKPILEKMDGTEELLVKLNREDLLRKQRTFDNGSIPHQIHLGELHAILRRQEDFYPFLKDNREKIEKILTFRIPYYVGPLARGNSRFAWMTRKSEETITPWNFEEVVDKGASAQSFIERMTNFDKNLPNEKVLPKHSLLYEYFTVYNELTKVKYVTEGMRKPAFLSGEQKKAIVDLLFKTNRKVTVKQLKEDYFKKIECFDSVEISGVEDRFNASLGTYHDLLKIIKDKDFLDNEENEDILEDIVLTLTLFEDREMIEERLKTYAHLFDDKVMKQLKRRRYTGWGRLSRKLINGIRDKQSGKTILDFLKSDGFANRNFMQLIHDDSLTFKEDIQKAQVSGQGDSLHEHIANLAGSPAIKKGILQTVKVVDELVKVMGRHKPENIVIEMARENQTTQKGQKNSRERMKRIEEGIKELGSQILKEHPVENTQLQNEKLYLYYLQNGRDMYVDQELDINRLSDYDVDHIVPQSFLKDDSIDNKVLTRSDKARGKSDNVPSEEVVKKMKNYWRQLLNAKLITQRKFDNLTKAERGGLSELDKAGFIKRQLVETRQITKHVAQILDSRMNTKYDENDKLIREVKVITLKSKLVSDFRKDFQFYKVREINNYHHAHDAYLNAVVGTALIKKYPKLESEFVYGDYKVYDVRKMIAKSEQEIGKATAKYFFYSNIMNFFKTEITLANGEIRKRPLIETNGETGEIVWDKGRDFATVRKVLSMPQVNIVKKTEVQTGGFSKESILPKRNSDKLIARKKDWDPKKYGGFDSPTVAYSVLVVAKVEKGKSKKLKSVKELLGITIMERSSFEKNPIDFLEAKGYKEVKKDLIIKLPKYSLFELENGRKRMLASAGELQKGNELALPSKYVNFLYLASHYEKLKGSPEDNEQKQLFVEQHKHYLDEIIEQISEFSKRVILADANLDKVLSAYNKHRDKPIREQAENIIHLFTLTNLGAPAAFKYFDTTIDRKRYTSTKEVLDATLIHQSITGLYETRIDLSQLGGDGGGGSGSSEAAAKGGTLGDQGSRGSDPLPEPRVTLTVEGIPTEFLVNTGAEHSVLTKPMGKMGSKRTVVAGATGSKVYPWTTKRLLKIGQKQVTHSFLVIPECPAPLLGRDLLTKLKAQIQFSTEGPQVTWEDRPAMCLVLNLEEEYRLHEKPVPPSIDPSWLQLFPMVWAEKAGMGLANQVPPVVVELKSDASPVAVRQYPMSKEAREGIRPHIQRFLDLGILVPCQSPWNTPLLPVKKPGTNDYRPVQDLREVNKRVQDIHPTVPNPYNLLSSLPPSHTWYSVLDLKDAFFCLKLHPNSQPLFAFEWRDPEKGNTGQLTWTRLPQGFKNSPTLFNEALHRDLASFRALNPQVVMLQYVDDLLVAAPTYRDCKEGTRRLLQELSKLGYRVSAKKAQLCREEVTYLGYLLKGGKRWLTPARKATVMKIPTPTTPRQVREFLGKAGFCRLFIPGFASLAAPLYPLTRPKVPFTWTEAHQEAFGRIKEALLSAPALALPDLTKPFALYVDEKEGVARGVLTQTLGPWRRPVAYLSKKLDPVASGWPTCLKAIAAVALLLKDADKLTLGQNVLVIAPHNLESIVRQPPDRWMTNARMTHYQSLLLNERVSFAPPAILNPATLLPVESDDTPIHICSEILAEETGTRPDLRDQPLPGVPAWYTDGSSFIMDGRRQAGAAIVDNKRTVWASNLPEGTSAQKAELIALTQALRLAEGKSINIYTDSRYAFATAHVHGAIYKQRGWLTSAGKDIKNKEEILALLEAIHLPKRVAIIHCPGHQRGTDPVATGNRKADEAAKQAAQSTRILTETTKNAGKRTADGSEFEKRTADGSEFESPKKKAKVE

SEQ ID NO: 1806 - protein, 2216 aa, synthetic construct
MPAAKRVKLDGGDKKYSIGLDIGTNSVGWAVITDEYKVPSKKFKVLGNTDRHSIKKNLIGALLFDSGETAEATRLKRTARRRYTRRKNRICYLQEIFSNEMAKVDDSFFHRLEESFLVEEDKKHERHPIFGNIVDEVAYHEKYPTIYHLRKKLVDSTDKADLRLIYLALAHMIKFRGHFLIEGDLNPDNSDVDKLFIQLVQTYNQLFEENPINASGVDAKAILSARLSKSRRLENLIAQLPGEKKNGLFGNLIALSLGLTPNFKSNFDLAEDAKLQLSKDTYDDDLDNLLAQIGDQYADLFLAAKNLSDAILLSDILRVNTEITKAPLSASMIKRYDEHHQDLTLLKALVRQQLPEKYKEIFFDQSKNGYAGYIDGGASQEEFYKFIKPILEKMDGTEELLVKLNREDLLRKQRTFDNGSIPHQIHLGELHAILRRQEDFYPFLKDNREKIEKILTFRIPYYVGPLARGNSRFAWMTRKSEETITPWNFEEVVDKGASAQSFIERMTNFDKNLPNEKVLPKHSLLYEYFTVYNELTKVKYVTEGMRKPAFLSGEQKKAIVDLLFKTNRKVTVKQLKEDYFKKIECFDSVEISGVEDRFNASLGTYHDLLKIIKDKDFLDNEENEDILEDIVLTLTLFEDREMIEERLKTYAHLFDDKVMKQLKRRRYTGWGRLSRKLINGIRDKQSGKTILDFLKSDGFANRNFMQLIHDDSLTFKEDIQKAQVSGQGDSLHEHIANLAGSPAIKKGILQTVKVVDELVKVMGRHKPENIVIEMARENQTTQKGQKNSRERMKRIEEGIKELGSQILKEHPVENTQLQNEKLYLYYLQNGRDMYVDQELDINRLSDYDVDHIVPQSFLKDDSIDNKVLTRSDKARGKSDNVPSEEVVKKMKNYWRQLLNAKLITQRKFDNLTKAERGGLSELDKAGFIKRQLVETRQITKHVAQILDSRMNTKYDENDKLIREVKVITLKSKLVSDFRKDFQFYKVREINNYHHAHDAYLNAVVGTALIKKYPKLESEFVYGDYKVYDVRKMIAKSEQEIGKATAKYFFYSNIMNFFKTEITLANGEIRKRPLIETNGETGEIVWDKGRDFATVRKVLSMPQVNIVKKTEVQTGGFSKESILPKRNSDKLIARKKDWDPKKYGGFDSPTVAYSVLVVAKVEKGKSKKLKSVKELLGITIMERSSFEKNPIDFLEAKGYKEVKKDLIIKLPKYSLFELENGRKRMLASAGELQKGNELALPSKYVNFLYLASHYEKLKGSPEDNEQKQLFVEQHKHYLDEIIEQISEFSKRVILADANLDKVLSAYNKHRDKPIREQAENIIHLFTLTNLGAPAAFKYFDTTIDRKRYTSTKEVLDATLIHQSITGLYETRIDLSQLGGDGGPAPGSSGGGGGTLGDQGSRGSDPLPEPRVTLTVEGIPTEFLVNTGAEHSVLTKPMGKMGSKRTVVAGATGSKVYPWTTKRLLKIGQKQVTHSFLVIPECPAPLLGRDLLTKLKAQIQFSTEGPQVTWEDRPAMCLVLNLEEEYRLHEKPVPPSIDPSWLQLFPMVWAEKAGMGLANQVPPVVVELKSDASPVAVRQYPMSKEAREGIRPHIQRFLDLGILVPCQSPWNTPLLPVKKPGTNDYRPVQDLREVNKRVQDIHPTVPNPYNLLSSLPPSHTWYSVLDLKDAFFCLKLHPNSQPLFAFEWRDPEKGNTGQLTWTRLPQGFKNSPTLFNEALHRDLASFRALNPQVVMLQYVDDLLVAAPTYRDCKEGTRRLLQELSKLGYRVSAKKAQLCREEVTYLGYLLKGGKRWLTPARKATVMKIPTPTTPRQVREFLGKAGFCRLFIPGFASLAAPLYPLTRPKVPFTWTEAHQEAFGRIKEALLSAPALALPDLTKPFALYVDEKEGVARGVLTQTLGPWRRPVAYLSKKLDPVASGWPTCLKAIAAVALLLKDADKLTLGQNVLVIAPHNLESIVRQPPDRWMTNARMTHYQSLLLNERVSFAPPAILNPATLLPVESDDTPIHICSEILAEETGTRPDLRDQPLPGVPAWYTDGSSFIMDGRRQAGAAIVDNKRTVWASNLPEGTSAQKAELIALTQALRLAEGKSINIYTDSRYAFATAHVHGAIYKQRGWLTSAGKDIKNKEEILALLEAIHLPKRVAIIHCPGHQRGTDPVATGNRKADEAAKQAAQSTRILTETTKNAGKRTADGSEFEKRTADGSEFESPKKKAKVE

SEQ ID NO: 1807 - protein, 2213 aa, synthetic construct
MPAAKRVKLDGGDKKYSIGLDIGTNSVGWAVITDEYKVPSKKFKVLGNTDRHSIKKNLIGALLFDSGETAEATRLKRTARRRYTRRKNRICYLQEIFSNEMAKVDDSFFHRLEESFLVEEDKKHERHPIFGNIVDEVAYHEKYPTIYHLRKKLVDSTDKADLRLIYLALAHMIKFRGHFLIEGDLNPDNSDVDKLFIQLVQTYNQLFEENPINASGVDAKAILSARLSKSRRLENLIAQLPGEKKNGLFGNLIALSLGLTPNFKSNFDLAEDAKLQLSKDTYDDDLDNLLAQIGDQYADLFLAAKNLSDAILLSDILRVNTEITKAPLSASMIKRYDEHHQDLTLLKALVRQQLPEKYKEIFFDQSKNGYAGYIDGGASQEEFYKFIKPILEKMDGTEELLVKLNREDLLRKQRTFDNGSIPHQIHLGELHAILRRQEDFYPFLKDNREKIEKILTFRIPYYVGPLARGNSRFAWMTRKSEETITPWNFEEVVDKGASAQSFIERMTNFDKNLPNEKVLPKHSLLYEYFTVYNELTKVKYVTEGMRKPAFLSGEQKKAIVDLLFKTNRKVTVKQLKEDYFKKIECFDSVEISGVEDRFNASLGTYHDLLKIIKDKDFLDNEENEDILEDIVLTLTLFEDREMIEERLKTYAHLFDDKVMKQLKRRRYTGWGRLSRKLINGIRDKQSGKTILDFLKSDGFANRNFMQLIHDDSLTFKEDIQKAQVSGQGDSLHEHIANLAGSPAIKKGILQTVKVVDELVKVMGRHKPENIVIEMARENQTTQKGQKNSRERMKRIEEGIKELGSQILKEHPVENTQLQNEKLYLYYLQNGRDMYVDQELDINRLSDYDVDHIVPQSFLKDDSIDNKVLTRSDKARGKSDNVPSEEVVKKMKNYWRQLLNAKLITQRKFDNLTKAERGGLSELDKAGFIKRQLVETRQITKHVAQILDSRMNTKYDENDKLIREVKVITLKSKLVSDFRKDFQFYKVREINNYHHAHDAYLNAVVGTALIKKYPKLESEFVYGDYKVYDVRKMIAKSEQEIGKATAKYFFYSNIMNFFKTEITLANGEIRKRPLIETNGETGEIVWDKGRDFATVRKVLSMPQVNIVKKTEVQTGGFSKESILPKRNSDKLIARKKDWDPKKYGGFDSPTVAYSVLVVAKVEKGKSKKLKSVKELLGITIMERSSFEKNPIDFLEAKGYKEVKKDLIIKLPKYSLFELENGRKRMLASAGELQKGNELALPSKYVNFLYLASHYEKLKGSPEDNEQKQLFVEQHKHYLDEIIEQISEFSKRVILADANLDKVLSAYNKHRDKPIREQAENIIHLFTLTNLGAPAAFKYFDTTIDRKRYTSTKEVLDATLIHQSITGLYETRIDLSQLGGDGGGGGPAPGGTLGDQGSRGSDPLPEPRVTLTVEGIPTEFLVNTGAEHSVLTKPMGKMGSKRTVVAGATGSKVYPWTTKRLLKIGQKQVTHSFLVIPECPAPLLGRDLLTKLKAQIQFSTEGPQVTWEDRPAMCLVLNLEEEYRLHEKPVPPSIDPSWLQLFPMVWAEKAGMGLANQVPPVVVELKSDASPVAVRQYPMSKEAREGIRPHIQRFLDLGILVPCQSPWNTPLLPVKKPGTNDYRPVQDLREVNKRVQDIHPTVPNPYNLLSSLPPSHTWYSVLDLKDAFFCLKLHPNSQPLFAFEWRDPEKGNTGQLTWTRLPQGFKNSPTLFNEALHRDLASFRALNPQVVMLQYVDDLLVAAPTYRDCKEGTRRLLQELSKLGYRVSAKKAQLCREEVTYLGYLLKGGKRWLTPARKATVMKIPTPTTPRQVREFLGKAGFCRLFIPGFASLAAPLYPLTRPKVPFTWTEAHQEAFGRIKEALLSAPALALPDLTKPFALYVDEKEGVARGVLTQTLGPWRRPVAYLSKKLDPVASGWPTCLKAIAAVALLLKDADKLTLGQNVLVIAPHNLESIVRQPPDRWMTNARMTHYQSLLLNERVSFAPPAILNPATLLPVESDDTPIHICSEILAEETGTRPDLRDQPLPGVPAWYTDGSSFIMDGRRQAGAAIVDNKRTVWASNLPEGTSAQKAELIALTQALRLAEGKSINIYTDSRYAFATAHVHGAIYKQRGWLTSAGKDIKNKEEILALLEAIHLPKRVAIIHCPGHQRGTDPVATGNRKADEAAKQAAQSTRILTETTKNAGKRTADGSEFEKRTADGSEFESPKKKAKVE

SEQ ID NO: 1808 - protein, 2213 aa, synthetic construct
MPAAKRVKLDGGDKKYSIGLDIGTNSVGWAVITDEYKVPSKKFKVLGNTDRHSIKKNLIGALLFDSGETAEATRLKRTARRRYTRRKNRICYLQEIFSNEMAKVDDSFFHRLEESFLVEEDKKHERHPIFGNIVDEVAYHEKYPTIYHLRKKLVDSTDKADLRLIYLALAHMIKFRGHFLIEGDLNPDNSDVDKLFIQLVQTYNQLFEENPINASGVDAKAILSARLSKSRRLENLIAQLPGEKKNGLFGNLIALSLGLTPNFKSNFDLAEDAKLQLSKDTYDDDLDNLLAQIGDQYADLFLAAKNLSDAILLSDILRVNTEITKAPLSASMIKRYDEHHQDLTLLKALVRQQLPEKYKEIFFDQSKNGYAGYIDGGASQEEFYKFIKPILEKMDGTEELLVKLNREDLLRKQRTFDNGSIPHQIHLGELHAILRRQEDFYPFLKDNREKIEKILTFRIPYYVGPLARGNSRFAWMTRKSEETITPWNFEEVVDKGASAQSFIERMTNFDKNLPNEKVLPKHSLLYEYFTVYNELTKVKYVTEGMRKPAFLSGEQKKAIVDLLFKTNRKVTVKQLKEDYFKKIECFDSVEISGVEDRFNASLGTYHDLLKIIKDKDFLDNEENEDILEDIVLTLTLFEDREMIEERLKTYAHLFDDKVMKQLKRRRYTGWGRLSRKLINGIRDKQSGKTILDFLKSDGFANRNFMQLIHDDSLTFKEDIQKAQVSGQGDSLHEHIANLAGSPAIKKGILQTVKVVDELVKVMGRHKPENIVIEMARENQTTQKGQKNSRERMKRIEEGIKELGSQILKEHPVENTQLQNEKLYLYYLQNGRDMYVDQELDINRLSDYDVDHIVPQSFLKDDSIDNKVLTRSDKARGKSDNVPSEEVVKKMKNYWRQLLNAKLITQRKFDNLTKAERGGLSELDKAGFIKRQLVETRQITKHVAQILDSRMNTKYDENDKLIREVKVITLKSKLVSDFRKDFQFYKVREINNYHHAHDAYLNAVVGTALIKKYPKLESEFVYGDYKVYDVRKMIAKSEQEIGKATAKYFFYSNIMNFFKTEITLANGEIRKRPLIETNGETGEIVWDKGRDFATVRKVLSMPQVNIVKKTEVQTGGFSKESILPKRNSDKLIARKKDWDPKKYGGFDSPTVAYSVLVVAKVEKGKSKKLKSVKELLGITIMERSSFEKNPIDFLEAKGYKEVKKDLIIKLPKYSLFELENGRKRMLASAGELQKGNELALPSKYVNFLYLASHYEKLKGSPEDNEQKQLFVEQHKHYLDEIIEQISEFSKRVILADANLDKVLSAYNKHRDKPIREQAENIIHLFTLTNLGAPAAFKYFDTTIDRKRYTSTKEVLDATLIHQSITGLYETRIDLSQLGGDGGGGSGSSGGTLGDQGSRGSDPLPEPRVTLTVEGIPTEFLVNTGAEHSVLTKPMGKMGSKRTVVAGATGSKVYPWTTKRLLKIGQKQVTHSFLVIPECPAPLLGRDLLTKLKAQIQFSTEGPQVTWEDRPAMCLVLNLEEEYRLHEKPVPPSIDPSWLQLFPMVWAEKAGMGLANQVPPVVVELKSDASPVAVRQYPMSKEAREGIRPHIQRFLDLGILVPCQSPWNTPLLPVKKPGTNDYRPVQDLREVNKRVQDIHPTVPNPYNLLSSLPPSHTWYSVLDLKDAFFCLKLHPNSQPLFAFEWRDPEKGNTGQLTWTRLPQGFKNSPTLFNEALHRDLASFRALNPQVVMLQYVDDLLVAAPTYRDCKEGTRRLLQELSKLGYRVSAKKAQLCREEVTYLGYLLKGGKRWLTPARKATVMKIPTPTTPRQVREFLGKAGFCRLFIPGFASLAAPLYPLTRPKVPFTWTEAHQEAFGRIKEALLSAPALALPDLTKPFALYVDEKEGVARGVLTQTLGPWRRPVAYLSKKLDPVASGWPTCLKAIAAVALLLKDADKLTLGQNVLVIAPHNLESIVRQPPDRWMTNARMTHYQSLLLNERVSFAPPAILNPATLLPVESDDTPIHICSEILAEETGTRPDLRDQPLPGVPAWYTDGSSFIMDGRRQAGAAIVDNKRTVWASNLPEGTSAQKAELIALTQALRLAEGKSINIYTDSRYAFATAHVHGAIYKQRGWLTSAGKDIKNKEEILALLEAIHLPKRVAIIHCPGHQRGTDPVATGNRKADEAAKQAAQSTRILTETTKNAGKRTADGSEFEKRTADGSEFESPKKKAKVE

SEQ ID NO: 1809 - protein, 2227 aa, synthetic construct
MPAAKRVKLDGGDKKYSIGLDIGTNSVGWAVITDEYKVPSKKFKVLGNTDRHSIKKNLIGALLFDSGETAEATRLKRTARRRYTRRKNRICYLQEIFSNEMAKVDDSFFHRLEESFLVEEDKKHERHPIFGNIVDEVAYHEKYPTIYHLRKKLVDSTDKADLRLIYLALAHMIKFRGHFLIEGDLNPDNSDVDKLFIQLVQTYNQLFEENPINASGVDAKAILSARLSKSRRLENLIAQLPGEKKNGLFGNLIALSLGLTPNFKSNFDLAEDAKLQLSKDTYDDDLDNLLAQIGDQYADLFLAAKNLSDAILLSDILRVNTEITKAPLSASMIKRYDEHHQDLTLLKALVRQQLPEKYKEIFFDQSKNGYAGYIDGGASQEEFYKFIKPILEKMDGTEELLVKLNREDLLRKQRTFDNGSIPHQIHLGELHAILRRQEDFYPFLKDNREKIEKILTFRIPYYVGPLARGNSRFAWMTRKSEETITPWNFEEVVDKGASAQSFIERMTNFDKNLPNEKVLPKHSLLYEYFTVYNELTKVKYVTEGMRKPAFLSGEQKKAIVDLLFKTNRKVTVKQLKEDYFKKIECFDSVEISGVEDRFNASLGTYHDLLKIIKDKDFLDNEENEDILEDIVLTLTLFEDREMIEERLKTYAHLFDDKVMKQLKRRRYTGWGRLSRKLINGIRDKQSGKTILDFLKSDGFANRNFMQLIHDDSLTFKEDIQKAQVSGQGDSLHEHIANLAGSPAIKKGILQTVKVVDELVKVMGRHKPENIVIEMARENQTTQKGQKNSRERMKRIEEGIKELGSQILKEHPVENTQLQNEKLYLYYLQNGRDMYVDQELDINRLSDYDVDHIVPQSFLKDDSIDNKVLTRSDKARGKSDNVPSEEVVKKMKNYWRQLLNAKLITQRKFDNLTKAERGGLSELDKAGFIKRQLVETRQITKHVAQILDSRMNTKYDENDKLIREVKVITLKSKLVSDFRKDFQFYKVREINNYHHAHDAYLNAVVGTALIKKYPKLESEFVYGDYKVYDVRKMIAKSEQEIGKATAKYFFYSNIMNFFKTEITLANGEIRKRPLIETNGETGEIVWDKGRDFATVRKVLSMPQVNIVKKTEVQTGGFSKESILPKRNSDKLIARKKDWDPKKYGGFDSPTVAYSVLVVAKVEKGKSKKLKSVKELLGITIMERSSFEKNPIDFLEAKGYKEVKKDLIIKLPKYSLFELENGRKRMLASAGELQKGNELALPSKYVNFLYLASHYEKLKGSPEDNEQKQLFVEQHKHYLDEIIEQISEFSKRVILADANLDKVLSAYNKHRDKPIREQAENIIHLFTLTNLGAPAAFKYFDTTIDRKRYTSTKEVLDATLIHQSITGLYETRIDLSQLGGDGGEAAAKEAAAKEAAAKEAAAKGGTLGDQGSRGSDPLPEPRVTLTVEGIPTEFLVNTGAEHSVLTKPMGKMGSKRTVVAGATGSKVYPWTTKRLLKIGQKQVTHSFLVIPECPAPLLGRDLLTKLKAQIQFSTEGPQVTWEDRPAMCLVLNLEEEYRLHEKPVPPSIDPSWLQLFPMVWAEKAGMGLANQVPPVVVELKSDASPVAVRQYPMSKEAREGIRPHIQRFLDLGILVPCQSPWNTPLLPVKKPGTNDYRPVQDLREVNKRVQDIHPTVPNPYNLLSSLPPSHTWYSVLDLKDAFFCLKLHPNSQPLFAFEWRDPEKGNTGQLTWTRLPQGFKNSPTLFNEALHRDLASFRALNPQVVMLQYVDDLLVAAPTYRDCKEGTRRLLQELSKLGYRVSAKKAQLCREEVTYLGYLLKGGKRWLTPARKATVMKIPTPTTPRQVREFLGKAGFCRLFIPGFASLAAPLYPLTRPKVPFTWTEAHQEAFGRIKEALLSAPALALPDLTKPFALYVDEKEGVARGVLTQTLGPWRRPVAYLSKKLDPVASGWPTCLKAIAAVALLLKDADKLTLGQNVLVIAPHNLESIVRQPPDRWMTNARMTHYQSLLLNERVSFAPPAILNPATLLPVESDDTPIHICSEILAEETGTRPDLRDQPLPGVPAWYTDGSSFIMDGRRQAGAAIVDNKRTVWASNLPEGTSAQKAELIALTQALRLAEGKSINIYTDSRYAFATAHVHGAIYKQRGWLTSAGKDIKNKEEILALLEAIHLPKRVAIIHCPGHQRGTDPVATGNRKADEAAKQAAQSTRILTETTKNAGKRTADGSEFEKRTADGSEFESPKKKAKVE

SEQ ID NO: 1810 - protein, 2218 aa, synthetic construct
MPAAKRVKLDGGDKKYSIGLDIGTNSVGWAVITDEYKVPSKKFKVLGNTDRHSIKKNLIGALLFDSGETAEATRLKRTARRRYTRRKNRICYLQEIFSNEMAKVDDSFFHRLEESFLVEEDKKHERHPIFGNIVDEVAYHEKYPTIYHLRKKLVDSTDKADLRLIYLALAHMIKFRGHFLIEGDLNPDNSDVDKLFIQLVQTYNQLFEENPINASGVDAKAILSARLSKSRRLENLIAQLPGEKKNGLFGNLIALSLGLTPNFKSNFDLAEDAKLQLSKDTYDDDLDNLLAQIGDQYADLFLAAKNLSDAILLSDILRVNTEITKAPLSASMIKRYDEHHQDLTLLKALVRQQLPEKYKEIFFDQSKNGYAGYIDGGASQEEFYKFIKPILEKMDGTEELLVKLNREDLLRKQRTFDNGSIPHQIHLGELHAILRRQEDFYPFLKDNREKIEKILTFRIPYYVGPLARGNSRFAWMTRKSEETITPWNFEEVVDKGASAQSFIERMTNFDKNLPNEKVLPKHSLLYEYFTVYNELTKVKYVTEGMRKPAFLSGEQKKAIVDLLFKTNRKVTVKQLKEDYFKKIECFDSVEISGVEDRFNASLGTYHDLLKIIKDKDFLDNEENEDILEDIVLTLTLFEDREMIEERLKTYAHLFDDKVMKQLKRRRYTGWGRLSRKLINGIRDKQSGKTILDFLKSDGFANRNFMQLIHDDSLTFKEDIQKAQVSGQGDSLHEHIANLAGSPAIKKGILQTVKVVDELVKVMGRHKPENIVIEMARENQTTQKGQKNSRERMKRIEEGIKELGSQILKEHPVENTQLQNEKLYLYYLQNGRDMYVDQELDINRLSDYDVDHIVPQSFLKDDSIDNKVLTRSDKARGKSDNVPSEEVVKKMKNYWRQLLNAKLITQRKFDNLTKAERGGLSELDKAGFIKRQLVETRQITKHVAQILDSRMNTKYDENDKLIREVKVITLKSKLVSDFRKDFQFYKVREINNYHHAHDAYLNAVVGTALIKKYPKLESEFVYGDYKVYDVRKMIAKSEQEIGKATAKYFFYSNIMNFFKTEITLANGEIRKRPLIETNGETGEIVWDKGRDFATVRKVLSMPQVNIVKKTEVQTGGFSKESILPKRNSDKLIARKKDWDPKKYGGFDSPTVAYSVLVVAKVEKGKSKKLKSVKELLGITIMERSSFEKNPIDFLEAKGYKEVKKDLIIKLPKYSLFELENGRKRMLASAGELQKGNELALPSKYVNFLYLASHYEKLKGSPEDNEQKQLFVEQHKHYLDEIIEQISEFSKRVILADANLDKVLSAYNKHRDKPIREQAENIIHLFTLTNLGAPAAFKYFDTTIDRKRYTSTKEVLDATLIHQSITGLYETRIDLSQLGGDGGPAPGGSEAAAKGGTLGDQGSRGSDPLPEPRVTLTVEGIPTEFLVNTGAEHSVLTKPMGKMGSKRTVVAGATGSKVYPWTTKRLLKIGQKQVTHSFLVIPECPAPLLGRDLLTKLKAQIQFSTEGPQVTWEDRPAMCLVLNLEEEYRLHEKPVPPSIDPSWLQLFPMVWAEKAGMGLANQVPPVVVELKSDASPVAVRQYPMSKEAREGIRPHIQRFLDLGILVPCQSPWNTPLLPVKKPGTNDYRPVQDLREVNKRVQDIHPTVPNPYNLLSSLPPSHTWYSVLDLKDAFFCLKLHPNSQPLFAFEWRDPEKGNTGQLTWTRLPQGFKNSPTLFNEALHRDLASFRALNPQVVMLQYVDDLLVAAPTYRDCKEGTRRLLQELSKLGYRVSAKKAQLCREEVTYLGYLLKGGKRWLTPARKATVMKIPTPTTPRQVREFLGKAGFCRLFIPGFASLAAPLYPLTRPKVPFTWTEAHQEAFGRIKEALLSAPALALPDLTKPFALYVDEKEGVARGVLTQTLGPWRRPVAYLSKKLDPVASGWPTCLKAIAAVALLLKDADKLTLGQNVLVIAPHNLESIVRQPPDRWMTNARMTHYQSLLLNERVSFAPPAILNPATLLPVESDDTPIHICSEILAEETGTRPDLRDQPLPGVPAWYTDGSSFIMDGRRQAGAAIVDNKRTVWASNLPEGTSAQKAELIALTQALRLAEGKSINIYTDSRYAFATAHVHGAIYKQRGWLTSAGKDIKNKEEILALLEAIHLPKRVAIIHCPGHQRGTDPVATGNRKADEAAKQAAQSTRILTETTKNAGKRTADGSEFEKRTADGSEFESPKKKAKVE

SEQ ID NO: 1811 - protein, 2213 aa, synthetic construct
MPAAKRVKLDGGDKKYSIGLDIGTNSVGWAVITDEYKVPSKKFKVLGNTDRHSIKKNLIGALLFDSGETAEATRLKRTARRRYTRRKNRICYLQEIFSNEMAKVDDSFFHRLEESFLVEEDKKHERHPIFGNIVDEVAYHEKYPTIYHLRKKLVDSTDKADLRLIYLALAHMIKFRGHFLIEGDLNPDNSDVDKLFIQLVQTYNQLFEENPINASGVDAKAILSARLSKSRRLENLIAQLPGEKKNGLFGNLIALSLGLTPNFKSNFDLAEDAKLQLSKDTYDDDLDNLLAQIGDQYADLFLAAKNLSDAILLSDILRVNTEITKAPLSASMIKRYDEHHQDLTLLKALVRQQLPEKYKEIFFDQSKNGYAGYIDGGASQEEFYKFIKPILEKMDGTEELLVKLNREDLLRKQRTFDNGSIPHQIHLGELHAILRRQEDFYPFLKDNREKIEKILTFRIPYYVGPLARGNSRFAWMTRKSEETITPWNFEEVVDKGASAQSFIERMTNFDKNLPNEKVLPKHSLLYEYFTVYNELTKVKYVTEGMRKPAFLSGEQKKAIVDLLFKTNRKVTVKQLKEDYFKKIECFDSVEISGVEDRFNASLGTYHDLLKIIKDKDFLDNEENEDILEDIVLTLTLFEDREMIEERLKTYAHLFDDKVMKQLKRRRYTGWGRLSRKLINGIRDKQSGKTILDFLKSDGFANRNFMQLIHDDSLTFKEDIQKAQVSGQGDSLHEHIANLAGSPAIKKGILQTVKVVDELVKVMGRHKPENIVIEMARENQTTQKGQKNSRERMKRIEEGIKELGSQILKEHPVENTQLQNEKLYLYYLQNGRDMYVDQELDINRLSDYDVDHIVPQSFLKDDSIDNKVLTRSDKARGKSDNVPSEEVVKKMKNYWRQLLNAKLITQRKFDNLTKAERGGLSELDKAGFIKRQLVETRQITKHVAQILDSRMNTKYDENDKLIREVKVITLKSKLVSDFRKDFQFYKVREINNYHHAHDAYLNAVVGTALIKKYPKLESEFVYGDYKVYDVRKMIAKSEQEIGKATAKYFFYSNIMNFFKTEITLANGEIRKRPLIETNGETGEIVWDKGRDFATVRKVLSMPQVNIVKKTEVQTGGFSKESILPKRNSDKLIARKKDWDPKKYGGFDSPTVAYSVLVVAKVEKGKSKKLKSVKELLGITIMERSSFEKNPIDFLEAKGYKEVKKDLIIKLPKYSLFELENGRKRMLASAGELQKGNELALPSKYVNFLYLASHYEKLKGSPEDNEQKQLFVEQHKHYLDEIIEQISEFSKRVILADANLDKVLSAYNKHRDKPIREQAENIIHLFTLTNLGAPAAFKYFDTTIDRKRYTSTKEVLDATLIHQSITGLYETRIDLSQLGGDGGPAPGGSGGTLGDQGSRGSDPLPEPRVTLTVEGIPTEFLVNTGAEHSVLTKPMGKMGSKRTVVAGATGSKVYPWTTKRLLKIGQKQVTHSFLVIPECPAPLLGRDLLTKLKAQIQFSTEGPQVTWEDRPAMCLVLNLEEEYRLHEKPVPPSIDPSWLQLFPMVWAEKAGMGLANQVPPVVVELKSDASPVAVRQYPMSKEAREGIRPHIQRFLDLGILVPCQSPWNTPLLPVKKPGTNDYRPVQDLREVNKRVQDIHPTVPNPYNLLSSLPPSHTWYSVLDLKDAFFCLKLHPNSQPLFAFEWRDPEKGNTGQLTWTRLPQGFKNSPTLFNEALHRDLASFRALNPQVVMLQYVDDLLVAAPTYRDCKEGTRRLLQELSKLGYRVSAKKAQLCREEVTYLGYLLKGGKRWLTPARKATVMKIPTPTTPRQVREFLGKAGFCRLFIPGFASLAAPLYPLTRPKVPFTWTEAHQEAFGRIKEALLSAPALALPDLTKPFALYVDEKEGVARGVLTQTLGPWRRPVAYLSKKLDPVASGWPTCLKAIAAVALLLKDADKLTLGQNVLVIAPHNLESIVRQPPDRWMTNARMTHYQSLLLNERVSFAPPAILNPATLLPVESDDTPIHICSEILAEETGTRPDLRDQPLPGVPAWYTDGSSFIMDGRRQAGAAIVDNKRTVWASNLPEGTSAQKAELIALTQALRLAEGKSINIYTDSRYAFATAHVHGAIYKQRGWLTSAGKDIKNKEEILALLEAIHLPKRVAIIHCPGHQRGTDPVATGNRKADEAAKQAAQSTRILTETTKNAGKRTADGSEFEKRTADGSEFESPKKKAKVE

SEQ ID NO: 1812 - protein, 2218 aa, synthetic construct
MPAAKRVKLDGGDKKYSIGLDIGTNSVGWAVITDEYKVPSKKFKVLGNTDRHSIKKNLIGALLFDSGETAEATRLKRTARRRYTRRKNRICYLQEIFSNEMAKVDDSFFHRLEESFLVEEDKKHERHPIFGNIVDEVAYHEKYPTIYHLRKKLVDSTDKADLRLIYLALAHMIKFRGHFLIEGDLNPDNSDVDKLFIQLVQTYNQLFEENPINASGVDAKAILSARLSKSRRLENLIAQLPGEKKNGLFGNLIALSLGLTPNFKSNFDLAEDAKLQLSKDTYDDDLDNLLAQIGDQYADLFLAAKNLSDAILLSDILRVNTEITKAPLSASMIKRYDEHHQDLTLLKALVRQQLPEKYKEIFFDQSKNGYAGYIDGGASQEEFYKFIKPILEKMDGTEELLVKLNREDLLRKQRTFDNGSIPHQIHLGELHAILRRQEDFYPFLKDNREKIEKILTFRIPYYVGPLARGNSRFAWMTRKSEETITPWNFEEVVDKGASAQSFIERMTNFDKNLPNEKVLPKHSLLYEYFTVYNELTKVKYVTEGMRKPAFLSGEQKKAIVDLLFKTNRKVTVKQLKEDYFKKIECFDSVEISGVEDRFNASLGTYHDLLKIIKDKDFLDNEENEDILEDIVLTLTLFEDREMIEERLKTYAHLFDDKVMKQLKRRRYTGWGRLSRKLINGIRDKQSGKTILDFLKSDGFANRNFMQLIHDDSLTFKEDIQKAQVSGQGDSLHEHIANLAGSPAIKKGILQTVKVVDELVKVMGRHKPENIVIEMARENQTTQKGQKNSRERMKRIEEGIKELGSQILKEHPVENTQLQNEKLYLYYLQNGRDMYVDQELDINRLSDYDVDHIVPQSFLKDDSIDNKVLTRSDKARGKSDNVPSEEVVKKMKNYWRQLLNAKLITQRKFDNLTKAERGGLSELDKAGFIKRQLVETRQITKHVAQILDSRMNTKYDENDKLIREVKVITLKSKLVSDFRKDFQFYKVREINNYHHAHDAYLNAVVGTALIKKYPKLESEFVYGDYKVYDVRKMIAKSEQEIGKATAKYFFYSNIMNFFKTEITLANGEIRKRPLIETNGETGEIVWDKGRDFATVRKVLSMPQVNIVKKTEVQTGGFSKESILPKRNSDKLIARKKDWDPKKYGGFDSPTVAYSVLVVAKVEKGKSKKLKSVKELLGITIMERSSFEKNPIDFLEAKGYKEVKKDLIIKLPKYSLFELENGRKRMLASAGELQKGNELALPSKYVNFLYLASHYEKLKGSPEDNEQKQLFVEQHKHYLDEIIEQISEFSKRVILADANLDKVLSAYNKHRDKPIREQAENIIHLFTLTNLGAPAAFKYFDTTIDRKRYTSTKEVLDATLIHQSITGLYETRIDLSQLGGDGGGGGPAPEAAAKGGTLGDQGSRGSDPLPEPRVTLTVEGIPTEFLVNTGAEHSVLTKPMGKMGSKRTVVAGATGSKVYPWTTKRLLKIGQKQVTHSFLVIPECPAPLLGRDLLTKLKAQIQFSTEGPQVTWEDRPAMCLVLNLEEEYRLHEKPVPPSIDPSWLQLFPMVWAEKAGMGLANQVPPVVVELKSDASPVAVRQYPMSKEAREGIRPHIQRFLDLGILVPCQSPWNTPLLPVKKPGTNDYRPVQDLREVNKRVQDIHPTVPNPYNLLSSLPPSHTWYSVLDLKDAFFCLKLHPNSQPLFAFEWRDPEKGNTGQLTWTRLPQGFKNSPTLFNEALHRDLASFRALNPQVVMLQYVDDLLVAAPTYRDCKEGTRRLLQELSKLGYRVSAKKAQLCREEVTYLGYLLKGGKRWLTPARKATVMKIPTPTTPRQVREFLGKAGFCRLFIPGFASLAAPLYPLTRPKVPFTWTEAHQEAFGRIKEALLSAPALALPDLTKPFALYVDEKEGVARGVLTQTLGPWRRPVAYLSKKLDPVASGWPTCLKAIAAVALLLKDADKLTLGQNVLVIAPHNLESIVRQPPDRWMTNARMTHYQSLLLNERVSFAPPAILNPATLLPVESDDTPIHICSEILAEETGTRPDLRDQPLPGVPAWYTDGSSFIMDGRRQAGAAIVDNKRTVWASNLPEGTSAQKAELIALTQALRLAEGKSINIYTDSRYAFATAHVHGAIYKQRGWLTSAGKDIKNKEEILALLEAIHLPKRVAIIHCPGHQRGTDPVATGNRKADEAAKQAAQSTRILTETTKNAGKRTADGSEFEKRTADGSEFESPKKKAKVE

SEQ ID NO: 1813 - protein, 2222 aa, synthetic construct
MPAAKRVKLDGGDKKYSIGLDIGTNSVGWAVITDEYKVPSKKFKVLGNTDRHSIKKNLIGALLFDSGETAEATRLKRTARRRYTRRKNRICYLQEIFSNEMAKVDDSFFHRLEESFLVEEDKKHERHPIFGNIVDEVAYHEKYPTIYHLRKKLVDSTDKADLRLIYLALAHMIKFRGHFLIEGDLNPDNSDVDKLFIQLVQTYNQLFEENPINASGVDAKAILSARLSKSRRLENLIAQLPGEKKNGLFGNLIALSLGLTPNFKSNFDLAEDAKLQLSKDTYDDDLDNLLAQIGDQYADLFLAAKNLSDAILLSDILRVNTEITKAPLSASMIKRYDEHHQDLTLLKALVRQQLPEKYKEIFFDQSKNGYAGYIDGGASQEEFYKFIKPILEKMDGTEELLVKLNREDLLRKQRTFDNGSIPHQIHLGELHAILRRQEDFYPFLKDNREKIEKILTFRIPYYVGPLARGNSRFAWMTRKSEETITPWNFEEVVDKGASAQSFIERMTNFDKNLPNEKVLPKHSLLYEYFTVYNELTKVKYVTEGMRKPAFLSGEQKKAIVDLLFKTNRKVTVKQLKEDYFKKIECFDSVEISGVEDRFNASLGTYHDLLKIIKDKDFLDNEENEDILEDIVLTLTLFEDREMIEERLKTYAHLFDDKVMKQLKRRRYTGWGRLSRKLINGIRDKQSGKTILDFLKSDGFANRNFMQLIHDDSLTFKEDIQKAQVSGQGDSLHEHIANLAGSPAIKKGILQTVKVVDELVKVMGRHKPENIVIEMARENQTTQKGQKNSRERMKRIEEGIKELGSQILKEHPVENTQLQNEKLYLYYLQNGRDMYVDQELDINRLSDYDVDHIVPQSFLKDDSIDNKVLTRSDKARGKSDNVPSEEVVKKMKNYWRQLLNAKLITQRKFDNLTKAERGGLSELDKAGFIKRQLVETRQITKHVAQILDSRMNTKYDENDKLIREVKVITLKSKLVSDFRKDFQFYKVREINNYHHAHDAYLNAVVGTALIKKYPKLESEFVYGDYKVYDVRKMIAKSEQEIGKATAKYFFYSNIMNFFKTEITLANGEIRKRPLIETNGETGEIVWDKGRDFATVRKVLSMPQVNIVKKTEVQTGGFSKESILPKRNSDKLIARKKDWDPKKYGGFDSPTVAYSVLVVAKVEKGKSKKLKSVKELLGITIMERSSFEKNPIDFLEAKGYKEVKKDLIIKLPKYSLFELENGRKRMLASAGELQKGNELALPSKYVNFLYLASHYEKLKGSPEDNEQKQLFVEQHKHYLDEIIEQISEFSKRVILADANLDKVLSAYNKHRDKPIREQAENIIHLFTLTNLGAPAAFKYFDTTIDRKRYTSTKEVLDATLIHQSITGLYETRIDLSQLGGDGGGSSGSSGSSGSSGSSGGTLGDQGSRGSDPLPEPRVTLTVEGIPTEFLVNTGAEHSVLTKPMGKMGSKRTVVAGATGSKVYPWTTKRLLKIGQKQVTHSFLVIPECPAPLLGRDLLTKLKAQIQFSTEGPQVTWEDRPAMCLVLNLEEEYRLHEKPVPPSIDPSWLQLFPMVWAEKAGMGLANQVPPVVVELKSDASPVAVRQYPMSKEAREGIRPHIQRFLDLGILVPCQSPWNTPLLPVKKPGTNDYRPVQDLREVNKRVQDIHPTVPNPYNLLSSLPPSHTWYSVLDLKDAFFCLKLHPNSQPLFAFEWRDPEKGNTGQLTWTRLPQGFKNSPTLFNEALHRDLASFRALNPQVVMLQYVDDLLVAAPTYRDCKEGTRRLLQELSKLGYRVSAKKAQLCREEVTYLGYLLKGGKRWLTPARKATVMKIPTPTTPRQVREFLGKAGFCRLFIPGFASLAAPLYPLTRPKVPFTWTEAHQEAFGRIKEALLSAPALALPDLTKPFALYVDEKEGVARGVLTQTLGPWRRPVAYLSKKLDPVASGWPTCLKAIAAVALLLKDADKLTLGQNVLVIAPHNLESIVRQPPDRWMTNARMTHYQSLLLNERVSFAPPAILNPATLLPVESDDTPIHICSEILAEETGTRPDLRDQPLPGVPAWYTDGSSFIMDGRRQAGAAIVDNKRTVWASNLPEGTSAQKAELIALTQALRLAEGKSINIYTDSRYAFATAHVHGAIYKQRGWLTSAGKDIKNKEEILALLEAIHLPKRVAIIHCPGHQRGTDPVATGNRKADEAAKQAAQSTRILTETTKNAGKRTADGSEFEKRTADGSEFESPKKKAKVE

SEQ ID NO: 1814 - protein, 2216 aa, synthetic construct
MPAAKRVKLDGGDKKYSIGLDIGTNSVGWAVITDEYKVPSKKFKVLGNTDRHSIKKNLIGALLFDSGETAEATRLKRTARRRYTRRKNRICYLQEIFSNEMAKVDDSFFHRLEESFLVEEDKKHERHPIFGNIVDEVAYHEKYPTIYHLRKKLVDSTDKADLRLIYLALAHMIKFRGHFLIEGDLNPDNSDVDKLFIQLVQTYNQLFEENPINASGVDAKAILSARLSKSRRLENLIAQLPGEKKNGLFGNLIALSLGLTPNFKSNFDLAEDAKLQLSKDTYDDDLDNLLAQIGDQYADLFLAAKNLSDAILLSDILRVNTEITKAPLSASMIKRYDEHHQDLTLLKALVRQQLPEKYKEIFFDQSKNGYAGYIDGGASQEEFYKFIKPILEKMDGTEELLVKLNREDLLRKQRTFDNGSIPHQIHLGELHAILRRQEDFYPFLKDNREKIEKILTFRIPYYVGPLARGNSRFAWMTRKSEETITPWNFEEVVDKGASAQSFIERMTNFDKNLPNEKVLPKHSLLYEYFTVYNELTKVKYVTEGMRKPAFLSGEQKKAIVDLLFKTNRKVTVKQLKEDYFKKIECFDSVEISGVEDRFNASLGTYHDLLKIIKDKDFLDNEENEDILEDIVLTLTLFEDREMIEERLKTYAHLFDDKVMKQLKRRRYTGWGRLSRKLINGIRDKQSGKTILDFLKSDGFANRNFMQLIHDDSLTFKEDIQKAQVSGQGDSLHEHIANLAGSPAIKKGILQTVKVVDELVKVMGRHKPENIVIEMARENQTTQKGQKNSRERMKRIEEGIKELGSQILKEHPVENTQLQNEKLYLYYLQNGRDMYVDQELDINRLSDYDVDHIVPQSFLKDDSIDNKVLTRSDKARGKSDNVPSEEVVKKMKNYWRQLLNAKLITQRKFDNLTKAERGGLSELDKAGFIKRQLVETRQITKHVAQILDSRMNTKYDENDKLIREVKVITLKSKLVSDFRKDFQFYKVREINNYHHAHDAYLNAVVGTALIKKYPKLESEFVYGDYKVYDVRKMIAKSEQEIGKATAKYFFYSNIMNFFKTEITLANGEIRKRPLIETNGETGEIVWDKGRDFATVRKVLSMPQVNIVKKTEVQTGGFSKESILPKRNSDKLIARKKDWDPKKYGGFDSPTVAYSVLVVAKVEKGKSKKLKSVKELLGITIMERSSFEKNPIDFLEAKGYKEVKKDLIIKLPKYSLFELENGRKRMLASAGELQKGNELALPSKYVNFLYLASHYEKLKGSPEDNEQKQLFVEQHKHYLDEIIEQISEFSKRVILADANLDKVLSAYNKHRDKPIREQAENIIHLFTLTNLGAPAAFKYFDTTIDRKRYTSTKEVLDATLIHQSITGLYETRIDLSQLGGDGGGSSGSSGSSGGTLGDQGSRGSDPLPEPRVTLTVEGIPTEFLVNTGAEHSVLTKPMGKMGSKRTVVAGATGSKVYPWTTKRLLKIGQKQVTHSFLVIPECPAPLLGRDLLTKLKAQIQFSTEGPQVTWEDRPAMCLVLNLEEEYRLHEKPVPPSIDPSWLQLFPMVWAEKAGMGLANQVPPVVVELKSDASPVAVRQYPMSKEAREGIRPHIQRFLDLGILVPCQSPWNTPLLPVKKPGTNDYRPVQDLREVNKRVQDIHPTVPNPYNLLSSLPPSHTWYSVLDLKDAFFCLKLHPNSQPLFAFEWRDPEKGNTGQLTWTRLPQGFKNSPTLFNEALHRDLASFRALNPQVVMLQYVDDLLVAAPTYRDCKEGTRRLLQELSKLGYRVSAKKAQLCREEVTYLGYLLKGGKRWLTPARKATVMKIPTPTTPRQVREFLGKAGFCRLFIPGFASLAAPLYPLTRPKVPFTWTEAHQEAFGRIKEALLSAPALALPDLTKPFALYVDEKEGVARGVLTQTLGPWRRPVAYLSKKLDPVASGWPTCLKAIAAVALLLKDADKLTLGQNVLVIAPHNLESIVRQPPDRWMTNARMTHYQSLLLNERVSFAPPAILNPATLLPVESDDTPIHICSEILAEETGTRPDLRDQPLPGVPAWYTDGSSFIMDGRRQAGAAIVDNKRTVWASNLPEGTSAQKAELIALTQALRLAEGKSINIYTDSRYAFATAHVHGAIYKQRGWLTSAGKDIKNKEEILALLEAIHLPKRVAIIHCPGHQRGTDPVATGNRKADEAAKQAAQSTRILTETTKNAGKRTADGSEFEKRTADGSEFESPKKKAKVE

SEQ ID NO: 1815 - protein, 2213 aa, synthetic construct
MPAAKRVKLDGGDKKYSIGLDIGTNSVGWAVITDEYKVPSKKFKVLGNTDRHSIKKNLIGALLFDSGETAEATRLKRTARRRYTRRKNRICYLQEIFSNEMAKVDDSFFHRLEESFLVEEDKKHERHPIFGNIVDEVAYHEKYPTIYHLRKKLVDSTDKADLRLIYLALAHMIKFRGHFLIEGDLNPDNSDVDKLFIQLVQTYNQLFEENPINASGVDAKAILSARLSKSRRLENLIAQLPGEKKNGLFGNLIALSLGLTPNFKSNFDLAEDAKLQLSKDTYDDDLDNLLAQIGDQYADLFLAAKNLSDAILLSDILRVNTEITKAPLSASMIKRYDEHHQDLTLLKALVRQQLPEKYKEIFFDQSKNGYAGYIDGGASQEEFYKFIKPILEKMDGTEELLVKLNREDLLRKQRTFDNGSIPHQIHLGELHAILRRQEDFYPFLKDNREKIEKILTFRIPYYVGPLARGNSRFAWMTRKSEETITPWNFEEVVDKGASAQSFIERMTNFDKNLPNEKVLPKHSLLYEYFTVYNELTKVKYVTEGMRKPAFLSGEQKKAIVDLLFKTNRKVTVKQLKEDYFKKIECFDSVEISGVEDRFNASLGTYHDLLKIIKDKDFLDNEENEDILEDIVLTLTLFEDREMIEERLKTYAHLFDDKVMKQLKRRRYTGWGRLSRKLINGIRDKQSGKTILDFLKSDGFANRNFMQLIHDDSLTFKEDIQKAQVSGQGDSLHEHIANLAGSPAIKKGILQTVKVVDELVKVMGRHKPENIVIEMARENQTTQKGQKNSRERMKRIEEGIKELGSQILKEHPVENTQLQNEKLYLYYLQNGRDMYVDQELDINRLSDYDVDHIVPQSFLKDDSIDNKVLTRSDKARGKSDNVPSEEVVKKMKNYWRQLLNAKLITQRKFDNLTKAERGGLSELDKAGFIKRQLVETRQITKHVAQILDSRMNTKYDENDKLIREVKVITLKSKLVSDFRKDFQFYKVREINNYHHAHDAYLNAVVGTALIKKYPKLESEFVYGDYKVYDVRKMIAKSEQEIGKATAKYFFYSNIMNFFKTEITLANGEIRKRPLIETNGETGEIVWDKGRDFATVRKVLSMPQVNIVKKTEVQTGGFSKESILPKRNSDKLIARKKDWDPKKYGGFDSPTVAYSVLVVAKVEKGKSKKLKSVKELLGITIMERSSFEKNPIDFLEAKGYKEVKKDLIIKLPKYSLFELENGRKRMLASAGELQKGNELALPSKYVNFLYLASHYEKLKGSPEDNEQKQLFVEQHKHYLDEIIEQISEFSKRVILADANLDKVLSAYNKHRDKPIREQAENIIHLFTLTNLGAPAAFKYFDTTIDRKRYTSTKEVLDATLIHQSITGLYETRIDLSQLGGDGGGSSPAPGGTLGDQGSRGSDPLPEPRVTLTVEGIPTEFLVNTGAEHSVLTKPMGKMGSKRTVVAGATGSKVYPWTTKRLLKIGQKQVTHSFLVIPECPAPLLGRDLLTKLKAQIQFSTEGPQVTWEDRPAMCLVLNLEEEYRLHEKPVPPSIDPSWLQLFPMVWAEKAGMGLANQVPPVVVELKSDASPVAVRQYPMSKEAREGIRPHIQRFLDLGILVPCQSPWNTPLLPVKKPGTNDYRPVQDLREVNKRVQDIHPTVPNPYNLLSSLPPSHTWYSVLDLKDAFFCLKLHPNSQPLFAFEWRDPEKGNTGQLTWTRLPQGFKNSPTLFNEALHRDLASFRALNPQVVMLQYVDDLLVAAPTYRDCKEGTRRLLQELSKLGYRVSAKKAQLCREEVTYLGYLLKGGKRWLTPARKATVMKIPTPTTPRQVREFLGKAGFCRLFIPGFASLAAPLYPLTRPKVPFTWTEAHQEAFGRIKEALLSAPALALPDLTKPFALYVDEKEGVARGVLTQTLGPWRRPVAYLSKKLDPVASGWPTCLKAIAAVALLLKDADKLTLGQNVLVIAPHNLESIVRQPPDRWMTNARMTHYQSLLLNERVSFAPPAILNPATLLPVESDDTPIHICSEILAEETGTRPDLRDQPLPGVPAWYTDGSSFIMDGRRQAGAAIVDNKRTVWASNLPEGTSAQKAELIALTQALRLAEGKSINIYTDSRYAFATAHVHGAIYKQRGWLTSAGKDIKNKEEILALLEAIHLPKRVAIIHCPGHQRGTDPVATGNRKADEAAKQAAQSTRILTETTKNAGKRTADGSEFEKRTADGSEFESPKKKAKVE

SEQ ID NO: 1816 - protein, 2218 aa, synthetic construct
MPAAKRVKLDGGDKKYSIGLDIGTNSVGWAVITDEYKVPSKKFKVLGNTDRHSIKKNLIGALLFDSGETAEATRLKRTARRRYTRRKNRICYLQEIFSNEMAKVDDSFFHRLEESFLVEEDKKHERHPIFGNIVDEVAYHEKYPTIYHLRKKLVDSTDKADLRLIYLALAHMIKFRGHFLIEGDLNPDNSDVDKLFIQLVQTYNQLFEENPINASGVDAKAILSARLSKSRRLENLIAQLPGEKKNGLFGNLIALSLGLTPNFKSNFDLAEDAKLQLSKDTYDDDLDNLLAQIGDQYADLFLAAKNLSDAILLSDILRVNTEITKAPLSASMIKRYDEHHQDLTLLKALVRQQLPEKYKEIFFDQSKNGYAGYIDGGASQEEFYKFIKPILEKMDGTEELLVKLNREDLLRKQRTFDNGSIPHQIHLGELHAILRRQEDFYPFLKDNREKIEKILTFRIPYYVGPLARGNSRFAWMTRKSEETITPWNFEEVVDKGASAQSFIERMTNFDKNLPNEKVLPKHSLLYEYFTVYNELTKVKYVTEGMRKPAFLSGEQKKAIVDLLFKTNRKVTVKQLKEDYFKKIECFDSVEISGVEDRFNASLGTYHDLLKIIKDKDFLDNEENEDILEDIVLTLTLFEDREMIEERLKTYAHLFDDKVMKQLKRRRYTGWGRLSRKLINGIRDKQSGKTILDFLKSDGFANRNFMQLIHDDSLTFKEDIQKAQVSGQGDSLHEHIANLAGSPAIKKGILQTVKVVDELVKVMGRHKPENIVIEMARENQTTQKGQKNSRERMKRIEEGIKELGSQILKEHPVENTQLQNEKLYLYYLQNGRDMYVDQELDINRLSDYDVDHIVPQSFLKDDSIDNKVLTRSDKARGKSDNVPSEEVVKKMKNYWRQLLNAKLITQRKFDNLTKAERGGLSELDKAGFIKRQLVETRQITKHVAQILDSRMNTKYDENDKLIREVKVITLKSKLVSDFRKDFQFYKVREINNYHHAHDAYLNAVVGTALIKKYPKLESEFVYGDYKVYDVRKMIAKSEQEIGKATAKYFFYSNIMNFFKTEITLANGEIRKRPLIETNGETGEIVWDKGRDFATVRKVLSMPQVNIVKKTEVQTGGFSKESILPKRNSDKLIARKKDWDPKKYGGFDSPTVAYSVLVVAKVEKGKSKKLKSVKELLGITIMERSSFEKNPIDFLEAKGYKEVKKDLIIKLPKYSLFELENGRKRMLASAGELQKGNELALPSKYVNFLYLASHYEKLKGSPEDNEQKQLFVEQHKHYLDEIIEQISEFSKRVILADANLDKVLSAYNKHRDKPIREQAENIIHLFTLTNLGAPAAFKYFDTTIDRKRYTSTKEVLDATLIHQSITGLYETRIDLSQLGGDGGPAPEAAAKGSSGGTLGDQGSRGSDPLPEPRVTLTVEGIPTEFLVNTGAEHSVLTKPMGKMGSKRTVVAGATGSKVYPWTTKRLLKIGQKQVTHSFLVIPECPAPLLGRDLLTKLKAQIQFSTEGPQVTWEDRPAMCLVLNLEEEYRLHEKPVPPSIDPSWLQLFPMVWAEKAGMGLANQVPPVVVELKSDASPVAVRQYPMSKEAREGIRPHIQRFLDLGILVPCQSPWNTPLLPVKKPGTNDYRPVQDLREVNKRVQDIHPTVPNPYNLLSSLPPSHTWYSVLDLKDAFFCLKLHPNSQPLFAFEWRDPEKGNTGQLTWTRLPQGFKNSPTLFNEALHRDLASFRALNPQVVMLQYVDDLLVAAPTYRDCKEGTRRLLQELSKLGYRVSAKKAQLCREEVTYLGYLLKGGKRWLTPARKATVMKIPTPTTPRQVREFLGKAGFCRLFIPGFASLAAPLYPLTRPKVPFTWTEAHQEAFGRIKEALLSAPALALPDLTKPFALYVDEKEGVARGVLTQTLGPWRRPVAYLSKKLDPVASGWPTCLKAIAAVALLLKDADKLTLGQNVLVIAPHNLESIVRQPPDRWMTNARMTHYQSLLLNERVSFAPPAILNPATLLPVESDDTPIHICSEILAEETGTRPDLRDQPLPGVPAWYTDGSSFIMDGRRQAGAAIVDNKRTVWASNLPEGTSAQKAELIALTQALRLAEGKSINIYTDSRYAFATAHVHGAIYKQRGWLTSAGKDIKNKEEILALLEAIHLPKRVAIIHCPGHQRGTDPVATGNRKADEAAKQAAQSTRILTETTKNAGKRTADGSEFEKRTADGSEFESPKKKAKVE

SEQ ID NO: 1817 - protein, 2218 aa, synthetic construct
MPAAKRVKLDGGDKKYSIGLDIGTNSVGWAVITDEYKVPSKKFKVLGNTDRHSIKKNLIGALLFDSGETAEATRLKRTARRRYTRRKNRICYLQEIFSNEMAKVDDSFFHRLEESFLVEEDKKHERHPIFGNIVDEVAYHEKYPTIYHLRKKLVDSTDKADLRLIYLALAHMIKFRGHFLIEGDLNPDNSDVDKLFIQLVQTYNQLFEENPINASGVDAKAILSARLSKSRRLENLIAQLPGEKKNGLFGNLIALSLGLTPNFKSNFDLAEDAKLQLSKDTYDDDLDNLLAQIGDQYADLFLAAKNLSDAILLSDILRVNTEITKAPLSASMIKRYDEHHQDLTLLKALVRQQLPEKYKEIFFDQSKNGYAGYIDGGASQEEFYKFIKPILEKMDGTEELLVKLNREDLLRKQRTFDNGSIPHQIHLGELHAILRRQEDFYPFLKDNREKIEKILTFRIPYYVGPLARGNSRFAWMTRKSEETITPWNFEEVVDKGASAQSFIERMTNFDKNLPNEKVLPKHSLLYEYFTVYNELTKVKYVTEGMRKPAFLSGEQKKAIVDLLFKTNRKVTVKQLKEDYFKKIECFDSVEISGVEDRFNASLGTYHDLLKIIKDKDFLDNEENEDILEDIVLTLTLFEDREMIEERLKTYAHLFDDKVMKQLKRRRYTGWGRLSRKLINGIRDKQSGKTILDFLKSDGFANRNFMQLIHDDSLTFKEDIQKAQVSGQGDSLHEHIANLAGSPAIKKGILQTVKVVDELVKVMGRHKPENIVIEMARENQTTQKGQKNSRERMKRIEEGIKELGSQILKEHPVENTQLQNEKLYLYYLQNGRDMYVDQELDINRLSDYDVDHIVPQSFLKDDSIDNKVLTRSDKARGKSDNVPSEEVVKKMKNYWRQLLNAKLITQRKFDNLTKAERGGLSELDKAGFIKRQLVETRQITKHVAQILDSRMNTKYDENDKLIREVKVITLKSKLVSDFRKDFQFYKVREINNYHHAHDAYLNAVVGTALIKKYPKLESEFVYGDYKVYDVRKMIAKSEQEIGKATAKYFFYSNIMNFFKTEITLANGEIRKRPLIETNGETGEIVWDKGRDFATVRKVLSMPQVNIVKKTEVQTGGFSKESILPKRNSDKLIARKKDWDPKKYGGFDSPTVAYSVLVVAKVEKGKSKKLKSVKELLGITIMERSSFEKNPIDFLEAKGYKEVKKDLIIKLPKYSLFELENGRKRMLASAGELQKGNELALPSKYVNFLYLASHYEKLKGSPEDNEQKQLFVEQHKHYLDEIIEQISEFSKRVILADANLDKVLSAYNKHRDKPIREQAENIIHLFTLTNLGAPAAFKYFDTTIDRKRYTSTKEVLDATLIHQSITGLYETRIDLSQLGGDGGGSSGGGEAAAKGGTLGDQGSRGSDPLPEPRVTLTVEGIPTEFLVNTGAEHSVLTKPMGKMGSKRTVVAGATGSKVYPWTTKRLLKIGQKQVTHSFLVIPECPAPLLGRDLLTKLKAQIQFSTEGPQVTWEDRPAMCLVLNLEEEYRLHEKPVPPSIDPSWLQLFPMVWAEKAGMGLANQVPPVVVELKSDASPVAVRQYPMSKEAREGIRPHIQRFLDLGILVPCQSPWNTPLLPVKKPGTNDYRPVQDLREVNKRVQDIHPTVPNPYNLLSSLPPSHTWYSVLDLKDAFFCLKLHPNSQPLFAFEWRDPEKGNTGQLTWTRLPQGFKNSPTLFNEALHRDLASFRALNPQVVMLQYVDDLLVAAPTYRDCKEGTRRLLQELSKLGYRVSAKKAQLCREEVTYLGYLLKGGKRWLTPARKATVMKIPTPTTPRQVREFLGKAGFCRLFIPGFASLAAPLYPLTRPKVPFTWTEAHQEAFGRIKEALLSAPALALPDLTKPFALYVDEKEGVARGVLTQTLGPWRRPVAYLSKKLDPVASGWPTCLKAIAAVALLLKDADKLTLGQNVLVIAPHNLESIVRQPPDRWMTNARMTHYQSLLLNERVSFAPPAILNPATLLPVESDDTPIHICSEILAEETGTRPDLRDQPLPGVPAWYTDGSSFIMDGRRQAGAAIVDNKRTVWASNLPEGTSAQKAELIALTQALRLAEGKSINIYTDSRYAFATAHVHGAIYKQRGWLTSAGKDIKNKEEILALLEAIHLPKRVAIIHCPGHQRGTDPVATGNRKADEAAKQAAQSTRILTETTKNAGKRTADGSEFEKRTADGSEFESPKKKAKVE

SEQ ID NO: 1818 - protein, 2216 aa, synthetic construct
MPAAKRVKLDGGDKKYSIGLDIGTNSVGWAVITDEYKVPSKKFKVLGNTDRHSIKKNLIGALLFDSGETAEATRLKRTARRRYTRRKNRICYLQEIFSNEMAKVDDSFFHRLEESFLVEEDKKHERHPIFGNIVDEVAYHEKYPTIYHLRKKLVDSTDKADLRLIYLALAHMIKFRGHFLIEGDLNPDNSDVDKLFIQLVQTYNQLFEENPINASGVDAKAILSARLSKSRRLENLIAQLPGEKKNGLFGNLIALSLGLTPNFKSNFDLAEDAKLQLSKDTYDDDLDNLLAQIGDQYADLFLAAKNLSDAILLSDILRVNTEITKAPLSASMIKRYDEHHQDLTLLKALVRQQLPEKYKEIFFDQSKNGYAGYIDGGASQEEFYKFIKPILEKMDGTEELLVKLNREDLLRKQRTFDNGSIPHQIHLGELHAILRRQEDFYPFLKDNREKIEKILTFRIPYYVGPLARGNSRFAWMTRKSEETITPWNFEEVVDKGASAQSFIERMTNFDKNLPNEKVLPKHSLLYEYFTVYNELTKVKYVTEGMRKPAFLSGEQKKAIVDLLFKTNRKVTVKQLKEDYFKKIECFDSVEISGVEDRFNASLGTYHDLLKIIKDKDFLDNEENEDILEDIVLTLTLFEDREMIEERLKTYAHLFDDKVMKQLKRRRYTGWGRLSRKLINGIRDKQSGKTILDFLKSDGFANRNFMQLIHDDSLTFKEDIQKAQVSGQGDSLHEHIANLAGSPAIKKGILQTVKVVDELVKVMGRHKPENIVIEMARENQTTQKGQKNSRERMKRIEEGIKELGSQILKEHPVENTQLQNEKLYLYYLQNGRDMYVDQELDINRLSDYDVDHIVPQSFLKDDSIDNKVLTRSDKARGKSDNVPSEEVVKKMKNYWRQLLNAKLITQRKFDNLTKAERGGLSELDKAGFIKRQLVETRQITKHVAQILDSRMNTKYDENDKLIREVKVITLKSKLVSDFRKDFQFYKVREINNYHHAHDAYLNAVVGTALIKKYPKLESEFVYGDYKVYDVRKMIAKSEQEIGKATAKYFFYSNIMNFFKTEITLANGEIRKRPLIETNGETGEIVWDKGRDFATVRKVLSMPQVNIVKKTEVQTGGFSKESILPKRNSDKLIARKKDWDPKKYGGFDSPTVAYSVLVVAKVEKGKSKKLKSVKELLGITIMERSSFEKNPIDFLEAKGYKEVKKDLIIKLPKYSLFELENGRKRMLASAGELQKGNELALPSKYVNFLYLASHYEKLKGSPEDNEQKQLFVEQHKHYLDEIIEQISEFSKRVILADANLDKVLSAYNKHRDKPIREQAENIIHLFTLTNLGAPAAFKYFDTTIDRKRYTSTKEVLDATLIHQSITGLYETRIDLSQLGGDGGGGGGSSPAPGGTLGDQGSRGSDPLPEPRVTLTVEGIPTEFLVNTGAEHSVLTKPMGKMGSKRTVVAGATGSKVYPWTTKRLLKIGQKQVTHSFLVIPECPAPLLGRDLLTKLKAQIQFSTEGPQVTWEDRPAMCLVLNLEEEYRLHEKPVPPSIDPSWLQLFPMVWAEKAGMGLANQVPPVVVELKSDASPVAVRQYPMSKEAREGIRPHIQRFLDLGILVPCQSPWNTPLLPVKKPGTNDYRPVQDLREVNKRVQDIHPTVPNPYNLLSSLPPSHTWYSVLDLKDAFFCLKLHPNSQPLFAFEWRDPEKGNTGQLTWTRLPQGFKNSPTLFNEALHRDLASFRALNPQVVMLQYVDDLLVAAPTYRDCKEGTRRLLQELSKLGYRVSAKKAQLCREEVTYLGYLLKGGKRWLTPARKATVMKIPTPTTPRQVREFLGKAGFCRLFIPGFASLAAPLYPLTRPKVPFTWTEAHQEAFGRIKEALLSAPALALPDLTKPFALYVDEKEGVARGVLTQTLGPWRRPVAYLSKKLDPVASGWPTCLKAIAAVALLLKDADKLTLGQNVLVIAPHNLESIVRQPPDRWMTNARMTHYQSLLLNERVSFAPPAILNPATLLPVESDDTPIHICSEILAEETGTRPDLRDQPLPGVPAWYTDGSSFIMDGRRQAGAAIVDNKRTVWASNLPEGTSAQKAELIALTQALRLAEGKSINIYTDSRYAFATAHVHGAIYKQRGWLTSAGKDIKNKEEILALLEAIHLPKRVAIIHCPGHQRGTDPVATGNRKADEAAKQAAQSTRILTETTKNAGKRTADGSEFEKRTADGSEFESPKKKAKVE

SEQ ID NO: 1819 - protein, 2216 aa, synthetic construct
MPAAKRVKLDGGDKKYSIGLDIGTNSVGWAVITDEYKVPSKKFKVLGNTDRHSIKKNLIGALLFDSGETAEATRLKRTARRRYTRRKNRICYLQEIFSNEMAKVDDSFFHRLEESFLVEEDKKHERHPIFGNIVDEVAYHEKYPTIYHLRKKLVDSTDKADLRLIYLALAHMIKFRGHFLIEGDLNPDNSDVDKLFIQLVQTYNQLFEENPINASGVDAKAILSARLSKSRRLENLIAQLPGEKKNGLFGNLIALSLGLTPNFKSNFDLAEDAKLQLSKDTYDDDLDNLLAQIGDQYADLFLAAKNLSDAILLSDILRVNTEITKAPLSASMIKRYDEHHQDLTLLKALVRQQLPEKYKEIFFDQSKNGYAGYIDGGASQEEFYKFIKPILEKMDGTEELLVKLNREDLLRKQRTFDNGSIPHQIHLGELHAILRRQEDFYPFLKDNREKIEKILTFRIPYYVGPLARGNSRFAWMTRKSEETITPWNFEEVVDKGASAQSFIERMTNFDKNLPNEKVLPKHSLLYEYFTVYNELTKVKYVTEGMRKPAFLSGEQKKAIVDLLFKTNRKVTVKQLKEDYFKKIECFDSVEISGVEDRFNASLGTYHDLLKIIKDKDFLDNEENEDILEDIVLTLTLFEDREMIEERLKTYAHLFDDKVMKQLKRRRYTGWGRLSRKLINGIRDKQSGKTILDFLKSDGFANRNFMQLIHDDSLTFKEDIQKAQVSGQGDSLHEHIANLAGSPAIKKGILQTVKVVDELVKVMGRHKPENIVIEMARENQTTQKGQKNSRERMKRIEEGIKELGSQILKEHPVENTQLQNEKLYLYYLQNGRDMYVDQELDINRLSDYDVDHIVPQSFLKDDSIDNKVLTRSDKARGKSDNVPSEEVVKKMKNYWRQLLNAKLITQRKFDNLTKAERGGLSELDKAGFIKRQLVETRQITKHVAQILDSRMNTKYDENDKLIREVKVITLKSKLVSDFRKDFQFYKVREINNYHHAHDAYLNAVVGTALIKKYPKLESEFVYGDYKVYDVRKMIAKSEQEIGKATAKYFFYSNIMNFFKTEITLANGEIRKRPLIETNGETGEIVWDKGRDFATVRKVLSMPQVNIVKKTEVQTGGFSKESILPKRNSDKLIARKKDWDPKKYGGFDSPTVAYSVLVVAKVEKGKSKKLKSVKELLGITIMERSSFEKNPIDFLEAKGYKEVKKDLIIKLPKYSLFELENGRKRMLASAGELQKGNELALPSKYVNFLYLASHYEKLKGSPEDNEQKQLFVEQHKHYLDEIIEQISEFSKRVILADANLDKVLSAYNKHRDKPIREQAENIIHLFTLTNLGAPAAFKYFDTTIDRKRYTSTKEVLDATLIHQSITGLYETRIDLSQLGGDGGGGSGGGGSSGGTLGDQGSRGSDPLPEPRVTLTVEGIPTEFLVNTGAEHSVLTKPMGKMGSKRTVVAGATGSKVYPWTTKRLLKIGQKQVTHSFLVIPECPAPLLGRDLLTKLKAQIQFSTEGPQVTWEDRPAMCLVLNLEEEYRLHEKPVPPSIDPSWLQLFPMVWAEKAGMGLANQVPPVVVELKSDASPVAVRQYPMSKEAREGIRPHIQRFLDLGILVPCQSPWNTPLLPVKKPGTNDYRPVQDLREVNKRVQDIHPTVPNPYNLLSSLPPSHTWYSVLDLKDAFFCLKLHPNSQPLFAFEWRDPEKGNTGQLTWTRLPQGFKNSPTLFNEALHRDLASFRALNPQVVMLQYVDDLLVAAPTYRDCKEGTRRLLQELSKLGYRVSAKKAQLCREEVTYLGYLLKGGKRWLTPARKATVMKIPTPTTPRQVREFLGKAGFCRLFIPGFASLAAPLYPLTRPKVPFTWTEAHQEAFGRIKEALLSAPALALPDLTKPFALYVDEKEGVARGVLTQTLGPWRRPVAYLSKKLDPVASGWPTCLKAIAAVALLLKDADKLTLGQNVLVIAPHNLESIVRQPPDRWMTNARMTHYQSLLLNERVSFAPPAILNPATLLPVESDDTPIHICSEILAEETGTRPDLRDQPLPGVPAWYTDGSSFIMDGRRQAGAAIVDNKRTVWASNLPEGTSAQKAELIALTQALRLAEGKSINIYTDSRYAFATAHVHGAIYKQRGWLTSAGKDIKNKEEILALLEAIHLPKRVAIIHCPGHQRGTDPVATGNRKADEAAKQAAQSTRILTETTKNAGKRTADGSEFEKRTADGSEFESPKKKAKVE

SEQ ID NO: 1820 - protein, 2215 aa, synthetic construct
MPAAKRVKLDGGDKKYSIGLDIGTNSVGWAVITDEYKVPSKKFKVLGNTDRHSIKKNLIGALLFDSGETAEATRLKRTARRRYTRRKNRICYLQEIFSNEMAKVDDSFFHRLEESFLVEEDKKHERHPIFGNIVDEVAYHEKYPTIYHLRKKLVDSTDKADLRLIYLALAHMIKFRGHFLIEGDLNPDNSDVDKLFIQLVQTYNQLFEENPINASGVDAKAILSARLSKSRRLENLIAQLPGEKKNGLFGNLIALSLGLTPNFKSNFDLAEDAKLQLSKDTYDDDLDNLLAQIGDQYADLFLAAKNLSDAILLSDILRVNTEITKAPLSASMIKRYDEHHQDLTLLKALVRQQLPEKYKEIFFDQSKNGYAGYIDGGASQEEFYKFIKPILEKMDGTEELLVKLNREDLLRKQRTFDNGSIPHQIHLGELHAILRRQEDFYPFLKDNREKIEKILTFRIPYYVGPLARGNSRFAWMTRKSEETITPWNFEEVVDKGASAQSFIERMTNFDKNLPNEKVLPKHSLLYEYFTVYNELTKVKYVTEGMRKPAFLSGEQKKAIVDLLFKTNRKVTVKQLKEDYFKKIECFDSVEISGVEDRFNASLGTYHDLLKIIKDKDFLDNEENEDILEDIVLTLTLFEDREMIEERLKTYAHLFDDKVMKQLKRRRYTGWGRLSRKLINGIRDKQSGKTILDFLKSDGFANRNFMQLIHDDSLTFKEDIQKAQVSGQGDSLHEHIANLAGSPAIKKGILQTVKVVDELVKVMGRHKPENIVIEMARENQTTQKGQKNSRERMKRIEEGIKELGSQILKEHPVENTQLQNEKLYLYYLQNGRDMYVDQELDINRLSDYDVDHIVPQSFLKDDSIDNKVLTRSDKARGKSDNVPSEEVVKKMKNYWRQLLNAKLITQRKFDNLTKAERGGLSELDKAGFIKRQLVETRQITKHVAQILDSRMNTKYDENDKLIREVKVITLKSKLVSDFRKDFQFYKVREINNYHHAHDAYLNAVVGTALIKKYPKLESEFVYGDYKVYDVRKMIAKSEQEIGKATAKYFFYSNIMNFFKTEITLANGEIRKRPLIETNGETGEIVWDKGRDFATVRKVLSMPQVNIVKKTEVQTGGFSKESILPKRNSDKLIARKKDWDPKKYGGFDSPTVAYSVLVVAKVEKGKSKKLKSVKELLGITIMERSSFEKNPIDFLEAKGYKEVKKDLIIKLPKYSLFELENGRKRMLASAGELQKGNELALPSKYVNFLYLASHYEKLKGSPEDNEQKQLFVEQHKHYLDEIIEQISEFSKRVILADANLDKVLSAYNKHRDKPIREQAENIIHLFTLTNLGAPAAFKYFDTTIDRKRYTSTKEVLDATLIHQSITGLYETRIDLSQLGGDGGEAAAKGGGGGTLGDQGSRGSDPLPEPRVTLTVEGIPTEFLVNTGAEHSVLTKPMGKMGSKRTVVAGATGSKVYPWTTKRLLKIGQKQVTHSFLVIPECPAPLLGRDLLTKLKAQIQFSTEGPQVTWEDRPAMCLVLNLEEEYRLHEKPVPPSIDPSWLQLFPMVWAEKAGMGLANQVPPVVVELKSDASPVAVRQYPMSKEAREGIRPHIQRFLDLGILVPCQSPWNTPLLPVKKPGTNDYRPVQDLREVNKRVQDIHPTVPNPYNLLSSLPPSHTWYSVLDLKDAFFCLKLHPNSQPLFAFEWRDPEKGNTGQLTWTRLPQGFKNSPTLFNEALHRDLASFRALNPQVVMLQYVDDLLVAAPTYRDCKEGTRRLLQELSKLGYRVSAKKAQLCREEVTYLGYLLKGGKRWLTPARKATVMKIPTPTTPRQVREFLGKAGFCRLFIPGFASLAAPLYPLTRPKVPFTWTEAHQEAFGRIKEALLSAPALALPDLTKPFALYVDEKEGVARGVLTQTLGPWRRPVAYLSKKLDPVASGWPTCLKAIAAVALLLKDADKLTLGQNVLVIAPHNLESIVRQPPDRWMTNARMTHYQSLLLNERVSFAPPAILNPATLLPVESDDTPIHICSEILAEETGTRPDLRDQPLPGVPAWYTDGSSFIMDGRRQAGAAIVDNKRTVWASNLPEGTSAQKAELIALTQALRLAEGKSINIYTDSRYAFATAHVHGAIYKQRGWLTSAGKDIKNKEEILALLEAIHLPKRVAIIHCPGHQRGTDPVATGNRKADEAAKQAAQSTRILTETTKNAGKRTADGSEFEKRTADGSEFESPKKKAKVE

SEQ ID NO: 1821 - protein, 2215 aa, synthetic construct
MPAAKRVKLDGGDKKYSIGLDIGTNSVGWAVITDEYKVPSKKFKVLGNTDRHSIKKNLIGALLFDSGETAEATRLKRTARRRYTRRKNRICYLQEIFSNEMAKVDDSFFHRLEESFLVEEDKKHERHPIFGNIVDEVAYHEKYPTIYHLRKKLVDSTDKADLRLIYLALAHMIKFRGHFLIEGDLNPDNSDVDKLFIQLVQTYNQLFEENPINASGVDAKAILSARLSKSRRLENLIAQLPGEKKNGLFGNLIALSLGLTPNFKSNFDLAEDAKLQLSKDTYDDDLDNLLAQIGDQYADLFLAAKNLSDAILLSDILRVNTEITKAPLSASMIKRYDEHHQDLTLLKALVRQQLPEKYKEIFFDQSKNGYAGYIDGGASQEEFYKFIKPILEKMDGTEELLVKLNREDLLRKQRTFDNGSIPHQIHLGELHAILRRQEDFYPFLKDNREKIEKILTFRIPYYVGPLARGNSRFAWMTRKSEETITPWNFEEVVDKGASAQSFIERMTNFDKNLPNEKVLPKHSLLYEYFTVYNELTKVKYVTEGMRKPAFLSGEQKKAIVDLLFKTNRKVTVKQLKEDYFKKIECFDSVEISGVEDRFNASLGTYHDLLKIIKDKDFLDNEENEDILEDIVLTLTLFEDREMIEERLKTYAHLFDDKVMKQLKRRRYTGWGRLSRKLINGIRDKQSGKTILDFLKSDGFANRNFMQLIHDDSLTFKEDIQKAQVSGQGDSLHEHIANLAGSPAIKKGILQTVKVVDELVKVMGRHKPENIVIEMARENQTTQKGQKNSRERMKRIEEGIKELGSQILKEHPVENTQLQNEKLYLYYLQNGRDMYVDQELDINRLSDYDVDHIVPQSFLKDDSIDNKVLTRSDKARGKSDNVPSEEVVKKMKNYWRQLLNAKLITQRKFDNLTKAERGGLSELDKAGFIKRQLVETRQITKHVAQILDSRMNTKYDENDKLIREVKVITLKSKLVSDFRKDFQFYKVREINNYHHAHDAYLNAVVGTALIKKYPKLESEFVYGDYKVYDVRKMIAKSEQEIGKATAKYFFYSNIMNFFKTEITLANGEIRKRPLIETNGETGEIVWDKGRDFATVRKVLSMPQVNIVKKTEVQTGGFSKESILPKRNSDKLIARKKDWDPKKYGGFDSPTVAYSVLVVAKVEKGKSKKLKSVKELLGITIMERSSFEKNPIDFLEAKGYKEVKKDLIIKLPKYSLFELENGRKRMLASAGELQKGNELALPSKYVNFLYLASHYEKLKGSPEDNEQKQLFVEQHKHYLDEIIEQISEFSKRVILADANLDKVLSAYNKHRDKPIREQAENIIHLFTLTNLGAPAAFKYFDTTIDRKRYTSTKEVLDATLIHQSITGLYETRIDLSQLGGDGGEAAAKGGSGGTLGDQGSRGSDPLPEPRVTLTVEGIPTEFLVNTGAEHSVLTKPMGKMGSKRTVVAGATGSKVYPWTTKRLLKIGQKQVTHSFLVIPECPAPLLGRDLLTKLKAQIQFSTEGPQVTWEDRPAMCLVLNLEEEYRLHEKPVPPSIDPSWLQLFPMVWAEKAGMGLANQVPPVVVELKSDASPVAVRQYPMSKEAREGIRPHIQRFLDLGILVPCQSPWNTPLLPVKKPGTNDYRPVQDLREVNKRVQDIHPTVPNPYNLLSSLPPSHTWYSVLDLKDAFFCLKLHPNSQPLFAFEWRDPEKGNTGQLTWTRLPQGFKNSPTLFNEALHRDLASFRALNPQVVMLQYVDDLLVAAPTYRDCKEGTRRLLQELSKLGYRVSAKKAQLCREEVTYLGYLLKGGKRWLTPARKATVMKIPTPTTPRQVREFLGKAGFCRLFIPGFASLAAPLYPLTRPKVPFTWTEAHQEAFGRIKEALLSAPALALPDLTKPFALYVDEKEGVARGVLTQTLGPWRRPVAYLSKKLDPVASGWPTCLKAIAAVALLLKDADKLTLGQNVLVIAPHNLESIVRQPPDRWMTNARMTHYQSLLLNERVSFAPPAILNPATLLPVESDDTPIHICSEILAEETGTRPDLRDQPLPGVPAWYTDGSSFIMDGRRQAGAAIVDNKRTVWASNLPEGTSAQKAELIALTQALRLAEGKSINIYTDSRYAFATAHVHGAIYKQRGWLTSAGKDIKNKEEILALLEAIHLPKRVAIIHCPGHQRGTDPVATGNRKADEAAKQAAQSTRILTETTKNAGKRTADGSEFEKRTADGSEFESPKKKAKVE

SEQ ID NO: 1822 - protein, 2218 aa, synthetic construct
MPAAKRVKLDGGDKKYSIGLDIGTNSVGWAVITDEYKVPSKKFKVLGNTDRHSIKKNLIGALLFDSGETAEATRLKRTARRRYTRRKNRICYLQEIFSNEMAKVDDSFFHRLEESFLVEEDKKHERHPIFGNIVDEVAYHEKYPTIYHLRKKLVDSTDKADLRLIYLALAHMIKFRGHFLIEGDLNPDNSDVDKLFIQLVQTYNQLFEENPINASGVDAKAILSARLSKSRRLENLIAQLPGEKKNGLFGNLIALSLGLTPNFKSNFDLAEDAKLQLSKDTYDDDLDNLLAQIGDQYADLFLAAKNLSDAILLSDILRVNTEITKAPLSASMIKRYDEHHQDLTLLKALVRQQLPEKYKEIFFDQSKNGYAGYIDGGASQEEFYKFIKPILEKMDGTEELLVKLNREDLLRKQRTFDNGSIPHQIHLGELHAILRRQEDFYPFLKDNREKIEKILTFRIPYYVGPLARGNSRFAWMTRKSEETITPWNFEEVVDKGASAQSFIERMTNFDKNLPNEKVLPKHSLLYEYFTVYNELTKVKYVTEGMRKPAFLSGEQKKAIVDLLFKTNRKVTVKQLKEDYFKKIECFDSVEISGVEDRFNASLGTYHDLLKIIKDKDFLDNEENEDILEDIVLTLTLFEDREMIEERLKTYAHLFDDKVMKQLKRRRYTGWGRLSRKLINGIRDKQSGKTILDFLKSDGFANRNFMQLIHDDSLTFKEDIQKAQVSGQGDSLHEHIANLAGSPAIKKGILQTVKVVDELVKVMGRHKPENIVIEMARENQTTQKGQKNSRERMKRIEEGIKELGSQILKEHPVENTQLQNEKLYLYYLQNGRDMYVDQELDINRLSDYDVDHIVPQSFLKDDSIDNKVLTRSDKARGKSDNVPSEEVVKKMKNYWRQLLNAKLITQRKFDNLTKAERGGLSELDKAGFIKRQLVETRQITKHVAQILDSRMNTKYDENDKLIREVKVITLKSKLVSDFRKDFQFYKVREINNYHHAHDAYLNAVVGTALIKKYPKLESEFVYGDYKVYDVRKMIAKSEQEIGKATAKYFFYSNIMNFFKTEITLANGEIRKRPLIETNGETGEIVWDKGRDFATVRKVLSMPQVNIVKKTEVQTGGFSKESILPKRNSDKLIARKKDWDPKKYGGFDSPTVAYSVLVVAKVEKGKSKKLKSVKELLGITIMERSSFEKNPIDFLEAKGYKEVKKDLIIKLPKYSLFELENGRKRMLASAGELQKGNELALPSKYVNFLYLASHYEKLKGSPEDNEQKQLFVEQHKHYLDEIIEQISEFSKRVILADANLDKVLSAYNKHRDKPIREQAENIIHLFTLTNLGAPAAFKYFDTTIDRKRYTSTKEVLDATLIHQSITGLYETRIDLSQLGGDGGEAAAKPAPGSSGGTLGDQGSRGSDPLPEPRVTLTVEGIPTEFLVNTGAEHSVLTKPMGKMGSKRTVVAGATGSKVYPWTTKRLLKIGQKQVTHSFLVIPECPAPLLGRDLLTKLKAQIQFSTEGPQVTWEDRPAMCLVLNLEEEYRLHEKPVPPSIDPSWLQLFPMVWAEKAGMGLANQVPPVVVELKSDASPVAVRQYPMSKEAREGIRPHIQRFLDLGILVPCQSPWNTPLLPVKKPGTNDYRPVQDLREVNKRVQDIHPTVPNPYNLLSSLPPSHTWYSVLDLKDAFFCLKLHPNSQPLFAFEWRDPEKGNTGQLTWTRLPQGFKNSPTLFNEALHRDLASFRALNPQVVMLQYVDDLLVAAPTYRDCKEGTRRLLQELSKLGYRVSAKKAQLCREEVTYLGYLLKGGKRWLTPARKATVMKIPTPTTPRQVREFLGKAGFCRLFIPGFASLAAPLYPLTRPKVPFTWTEAHQEAFGRIKEALLSAPALALPDLTKPFALYVDEKEGVARGVLTQTLGPWRRPVAYLSKKLDPVASGWPTCLKAIAAVALLLKDADKLTLGQNVLVIAPHNLESIVRQPPDRWMTNARMTHYQSLLLNERVSFAPPAILNPATLLPVESDDTPIHICSEILAEETGTRPDLRDQPLPGVPAWYTDGSSFIMDGRRQAGAAIVDNKRTVWASNLPEGTSAQKAELIALTQALRLAEGKSINIYTDSRYAFATAHVHGAIYKQRGWLTSAGKDIKNKEEILALLEAIHLPKRVAIIHCPGHQRGTDPVATGNRKADEAAKQAAQSTRILTETTKNAGKRTADGSEFEKRTADGSEFESPKKKAKVE

SEQ ID NO: 1823 - protein, 2218 aa, synthetic construct
MPAAKRVKLDGGDKKYSIGLDIGTNSVGWAVITDEYKVPSKKFKVLGNTDRHSIKKNLIGALLFDSGETAEATRLKRTARRRYTRRKNRICYLQEIFSNEMAKVDDSFFHRLEESFLVEEDKKHERHPIFGNIVDEVAYHEKYPTIYHLRKKLVDSTDKADLRLIYLALAHMIKFRGHFLIEGDLNPDNSDVDKLFIQLVQTYNQLFEENPINASGVDAKAILSARLSKSRRLENLIAQLPGEKKNGLFGNLIALSLGLTPNFKSNFDLAEDAKLQLSKDTYDDDLDNLLAQIGDQYADLFLAAKNLSDAILLSDILRVNTEITKAPLSASMIKRYDEHHQDLTLLKALVRQQLPEKYKEIFFDQSKNGYAGYIDGGASQEEFYKFIKPILEKMDGTEELLVKLNREDLLRKQRTFDNGSIPHQIHLGELHAILRRQEDFYPFLKDNREKIEKILTFRIPYYVGPLARGNSRFAWMTRKSEETITPWNFEEVVDKGASAQSFIERMTNFDKNLPNEKVLPKHSLLYEYFTVYNELTKVKYVTEGMRKPAFLSGEQKKAIVDLLFKTNRKVTVKQLKEDYFKKIECFDSVEISGVEDRFNASLGTYHDLLKIIKDKDFLDNEENEDILEDIVLTLTLFEDREMIEERLKTYAHLFDDKVMKQLKRRRYTGWGRLSRKLINGIRDKQSGKTILDFLKSDGFANRNFMQLIHDDSLTFKEDIQKAQVSGQGDSLHEHIANLAGSPAIKKGILQTVKVVDELVKVMGRHKPENIVIEMARENQTTQKGQKNSRERMKRIEEGIKELGSQILKEHPVENTQLQNEKLYLYYLQNGRDMYVDQELDINRLSDYDVDHIVPQSFLKDDSIDNKVLTRSDKARGKSDNVPSEEVVKKMKNYWRQLLNAKLITQRKFDNLTKAERGGLSELDKAGFIKRQLVETRQITKHVAQILDSRMNTKYDENDKLIREVKVITLKSKLVSDFRKDFQFYKVREINNYHHAHDAYLNAVVGTALIKKYPKLESEFVYGDYKVYDVRKMIAKSEQEIGKATAKYFFYSNIMNFFKTEITLANGEIRKRPLIETNGETGEIVWDKGRDFATVRKVLSMPQVNIVKKTEVQTGGFSKESILPKRNSDKLIARKKDWDPKKYGGFDSPTVAYSVLVVAKVEKGKSKKLKSVKELLGITIMERSSFEKNPIDFLEAKGYKEVKKDLIIKLPKYSLFELENGRKRMLASAGELQKGNELALPSKYVNFLYLASHYEKLKGSPEDNEQKQLFVEQHKHYLDEIIEQISEFSKRVILADANLDKVLSAYNKHRDKPIREQAENIIHLFTLTNLGAPAAFKYFDTTIDRKRYTSTKEVLDATLIHQSITGLYETRIDLSQLGGDGGGGGGSSEAAAKGGTLGDQGSRGSDPLPEPRVTLTVEGIPTEFLVNTGAEHSVLTKPMGKMGSKRTVVAGATGSKVYPWTTKRLLKIGQKQVTHSFLVIPECPAPLLGRDLLTKLKAQIQFSTEGPQVTWEDRPAMCLVLNLEEEYRLHEKPVPPSIDPSWLQLFPMVWAEKAGMGLANQVPPVVVELKSDASPVAVRQYPMSKEAREGIRPHIQRFLDLGILVPCQSPWNTPLLPVKKPGTNDYRPVQDLREVNKRVQDIHPTVPNPYNLLSSLPPSHTWYSVLDLKDAFFCLKLHPNSQPLFAFEWRDPEKGNTGQLTWTRLPQGFKNSPTLFNEALHRDLASFRALNPQVVMLQYVDDLLVAAPTYRDCKEGTRRLLQELSKLGYRVSAKKAQLCREEVTYLGYLLKGGKRWLTPARKATVMKIPTPTTPRQVREFLGKAGFCRLFIPGFASLAAPLYPLTRPKVPFTWTEAHQEAFGRIKEALLSAPALALPDLTKPFALYVDEKEGVARGVLTQTLGPWRRPVAYLSKKLDPVASGWPTCLKAIAAVALLLKDADKLTLGQNVLVIAPHNLESIVRQPPDRWMTNARMTHYQSLLLNERVSFAPPAILNPATLLPVESDDTPIHICSEILAEETGTRPDLRDQPLPGVPAWYTDGSSFIMDGRRQAGAAIVDNKRTVWASNLPEGTSAQKAELIALTQALRLAEGKSINIYTDSRYAFATAHVHGAIYKQRGWLTSAGKDIKNKEEILALLEAIHLPKRVAIIHCPGHQRGTDPVATGNRKADEAAKQAAQSTRILTETTKNAGKRTADGSEFEKRTADGSEFESPKKKAKVE

SEQ ID NO: 1824 - protein, 2216 aa, synthetic construct
MPAAKRVKLDGGDKKYSIGLDIGTNSVGWAVITDEYKVPSKKFKVLGNTDRHSIKKNLIGALLFDSGETAEATRLKRTARRRYTRRKNRICYLQEIFSNEMAKVDDSFFHRLEESFLVEEDKKHERHPIFGNIVDEVAYHEKYPTIYHLRKKLVDSTDKADLRLIYLALAHMIKFRGHFLIEGDLNPDNSDVDKLFIQLVQTYNQLFEENPINASGVDAKAILSARLSKSRRLENLIAQLPGEKKNGLFGNLIALSLGLTPNFKSNFDLAEDAKLQLSKDTYDDDLDNLLAQIGDQYADLFLAAKNLSDAILLSDILRVNTEITKAPLSASMIKRYDEHHQDLTLLKALVRQQLPEKYKEIFFDQSKNGYAGYIDGGASQEEFYKFIKPILEKMDGTEELLVKLNREDLLRKQRTFDNGSIPHQIHLGELHAILRRQEDFYPFLKDNREKIEKILTFRIPYYVGPLARGNSRFAWMTRKSEETITPWNFEEVVDKGASAQSFIERMTNFDKNLPNEKVLPKHSLLYEYFTVYNELTKVKYVTEGMRKPAFLSGEQKKAIVDLLFKTNRKVTVKQLKEDYFKKIECFDSVEISGVEDRFNASLGTYHDLLKIIKDKDFLDNEENEDILEDIVLTLTLFEDREMIEERLKTYAHLFDDKVMKQLKRRRYTGWGRLSRKLINGIRDKQSGKTILDFLKSDGFANRNFMQLIHDDSLTFKEDIQKAQVSGQGDSLHEHIANLAGSPAIKKGILQTVKVVDELVKVMGRHKPENIVIEMARENQTTQKGQKNSRERMKRIEEGIKELGSQILKEHPVENTQLQNEKLYLYYLQNGRDMYVDQELDINRLSDYDVDHIVPQSFLKDDSIDNKVLTRSDKARGKSDNVPSEEVVKKMKNYWRQLLNAKLITQRKFDNLTKAERGGLSELDKAGFIKRQLVETRQITKHVAQILDSRMNTKYDENDKLIREVKVITLKSKLVSDFRKDFQFYKVREINNYHHAHDAYLNAVVGTALIKKYPKLESEFVYGDYKVYDVRKMIAKSEQEIGKATAKYFFYSNIMNFFKTEITLANGEIRKRPLIETNGETGEIVWDKGRDFATVRKVLSMPQVNIVKKTEVQTGGFSKESILPKRNSDKLIARKKDWDPKKYGGFDSPTVAYSVLVVAKVEKGKSKKLKSVKELLGITIMERSSFEKNPIDFLEAKGYKEVKKDLIIKLPKYSLFELENGRKRMLASAGELQKGNELALPSKYVNFLYLASHYEKLKGSPEDNEQKQLFVEQHKHYLDEIIEQISEFSKRVILADANLDKVLSAYNKHRDKPIREQAENIIHLFTLTNLGAPAAFKYFDTTIDRKRYTSTKEVLDATLIHQSITGLYETRIDLSQLGGDGGPAPAPAPAPGGTLGDQGSRGSDPLPEPRVTLTVEGIPTEFLVNTGAEHSVLTKPMGKMGSKRTVVAGATGSKVYPWTTKRLLKIGQKQVTHSFLVIPECPAPLLGRDLLTKLKAQIQFSTEGPQVTWEDRPAMCLVLNLEEEYRLHEKPVPPSIDPSWLQLFPMVWAEKAGMGLANQVPPVVVELKSDASPVAVRQYPMSKEAREGIRPHIQRFLDLGILVPCQSPWNTPLLPVKKPGTNDYRPVQDLREVNKRVQDIHPTVPNPYNLLSSLPPSHTWYSVLDLKDAFFCLKLHPNSQPLFAFEWRDPEKGNTGQLTWTRLPQGFKNSPTLFNEALHRDLASFRALNPQVVMLQYVDDLLVAAPTYRDCKEGTRRLLQELSKLGYRVSAKKAQLCREEVTYLGYLLKGGKRWLTPARKATVMKIPTPTTPRQVREFLGKAGFCRLFIPGFASLAAPLYPLTRPKVPFTWTEAHQEAFGRIKEALLSAPALALPDLTKPFALYVDEKEGVARGVLTQTLGPWRRPVAYLSKKLDPVASGWPTCLKAIAAVALLLKDADKLTLGQNVLVIAPHNLESIVRQPPDRWMTNARMTHYQSLLLNERVSFAPPAILNPATLLPVESDDTPIHICSEILAEETGTRPDLRDQPLPGVPAWYTDGSSFIMDGRRQAGAAIVDNKRTVWASNLPEGTSAQKAELIALTQALRLAEGKSINIYTDSRYAFATAHVHGAIYKQRGWLTSAGKDIKNKEEILALLEAIHLPKRVAIIHCPGHQRGTDPVATGNRKADEAAKQAAQSTRILTETTKNAGKRTADGSEFEKRTADGSEFESPKKKAKVE

SEQ ID NO: 1825 - protein, 2215 aa, synthetic construct
MPAAKRVKLDGGDKKYSIGLDIGTNSVGWAVITDEYKVPSKKFKVLGNTDRHSIKKNLIGALLFDSGETAEATRLKRTARRRYTRRKNRICYLQEIFSNEMAKVDDSFFHRLEESFLVEEDKKHERHPIFGNIVDEVAYHEKYPTIYHLRKKLVDSTDKADLRLIYLALAHMIKFRGHFLIEGDLNPDNSDVDKLFIQLVQTYNQLFEENPINASGVDAKAILSARLSKSRRLENLIAQLPGEKKNGLFGNLIALSLGLTPNFKSNFDLAEDAKLQLSKDTYDDDLDNLLAQIGDQYADLFLAAKNLSDAILLSDILRVNTEITKAPLSASMIKRYDEHHQDLTLLKALVRQQLPEKYKEIFFDQSKNGYAGYIDGGASQEEFYKFIKPILEKMDGTEELLVKLNREDLLRKQRTFDNGSIPHQIHLGELHAILRRQEDFYPFLKDNREKIEKILTFRIPYYVGPLARGNSRFAWMTRKSEETITPWNFEEVVDKGASAQSFIERMTNFDKNLPNEKVLPKHSLLYEYFTVYNELTKVKYVTEGMRKPAFLSGEQKKAIVDLLFKTNRKVTVKQLKEDYFKKIECFDSVEISGVEDRFNASLGTYHDLLKIIKDKDFLDNEENEDILEDIVLTLTLFEDREMIEERLKTYAHLFDDKVMKQLKRRRYTGWGRLSRKLINGIRDKQSGKTILDFLKSDGFANRNFMQLIHDDSLTFKEDIQKAQVSGQGDSLHEHIANLAGSPAIKKGILQTVKVVDELVKVMGRHKPENIVIEMARENQTTQKGQKNSRERMKRIEEGIKELGSQILKEHPVENTQLQNEKLYLYYLQNGRDMYVDQELDINRLSDYDVDHIVPQSFLKDDSIDNKVLTRSDKARGKSDNVPSEEVVKKMKNYWRQLLNAKLITQRKFDNLTKAERGGLSELDKAGFIKRQLVETRQITKHVAQILDSRMNTKYDENDKLIREVKVITLKSKLVSDFRKDFQFYKVREINNYHHAHDAYLNAVVGTALIKKYPKLESEFVYGDYKVYDVRKMIAKSEQEIGKATAKYFFYSNIMNFFKTEITLANGEIRKRPLIETNGETGEIVWDKGRDFATVRKVLSMPQVNIVKKTEVQTGGFSKESILPKRNSDKLIARKKDWDPKKYGGFDSPTVAYSVLVVAKVEKGKSKKLKSVKELLGITIMERSSFEKNPIDFLEAKGYKEVKKDLIIKLPKYSLFELENGRKRMLASAGELQKGNELALPSKYVNFLYLASHYEKLKGSPEDNEQKQLFVEQHKHYLDEIIEQISEFSKRVILADANLDKVLSAYNKHRDKPIREQAENIIHLFTLTNLGAPAAFKYFDTTIDRKRYTSTKEVLDATLIHQSITGLYETRIDLSQLGGDGGGGSEAAAKGGTLGDQGSRGSDPLPEPRVTLTVEGIPTEFLVNTGAEHSVLTKPMGKMGSKRTVVAGATGSKVYPWTTKRLLKIGQKQVTHSFLVIPECPAPLLGRDLLTKLKAQIQFSTEGPQVTWEDRPAMCLVLNLEEEYRLHEKPVPPSIDPSWLQLFPMVWAEKAGMGLANQVPPVVVELKSDASPVAVRQYPMSKEAREGIRPHIQRFLDLGILVPCQSPWNTPLLPVKKPGTNDYRPVQDLREVNKRVQDIHPTVPNPYNLLSSLPPSHTWYSVLDLKDAFFCLKLHPNSQPLFAFEWRDPEKGNTGQLTWTRLPQGFKNSPTLFNEALHRDLASFRALNPQVVMLQYVDDLLVAAPTYRDCKEGTRRLLQELSKLGYRVSAKKAQLCREEVTYLGYLLKGGKRWLTPARKATVMKIPTPTTPRQVREFLGKAGFCRLFIPGFASLAAPLYPLTRPKVPFTWTEAHQEAFGRIKEALLSAPALALPDLTKPFALYVDEKEGVARGVLTQTLGPWRRPVAYLSKKLDPVASGWPTCLKAIAAVALLLKDADKLTLGQNVLVIAPHNLESIVRQPPDRWMTNARMTHYQSLLLNERVSFAPPAILNPATLLPVESDDTPIHICSEILAEETGTRPDLRDQPLPGVPAWYTDGSSFIMDGRRQAGAAIVDNKRTVWASNLPEGTSAQKAELIALTQALRLAEGKSINIYTDSRYAFATAHVHGAIYKQRGWLTSAGKDIKNKEEILALLEAIHLPKRVAIIHCPGHQRGTDPVATGNRKADEAAKQAAQSTRILTETTKNAGKRTADGSEFEKRTADGSEFESPKKKAKVE

SEQ ID NO: 1826 - protein, 2216 aa, synthetic construct
MPAAKRVKLDGGDKKYSIGLDIGTNSVGWAVITDEYKVPSKKFKVLGNTDRHSIKKNLIGALLFDSGETAEATRLKRTARRRYTRRKNRICYLQEIFSNEMAKVDDSFFHRLEESFLVEEDKKHERHPIFGNIVDEVAYHEKYPTIYHLRKKLVDSTDKADLRLIYLALAHMIKFRGHFLIEGDLNPDNSDVDKLFIQLVQTYNQLFEENPINASGVDAKAILSARLSKSRRLENLIAQLPGEKKNGLFGNLIALSLGLTPNFKSNFDLAEDAKLQLSKDTYDDDLDNLLAQIGDQYADLFLAAKNLSDAILLSDILRVNTEITKAPLSASMIKRYDEHHQDLTLLKALVRQQLPEKYKEIFFDQSKNGYAGYIDGGASQEEFYKFIKPILEKMDGTEELLVKLNREDLLRKQRTFDNGSIPHQIHLGELHAILRRQEDFYPFLKDNREKIEKILTFRIPYYVGPLARGNSRFAWMTRKSEETITPWNFEEVVDKGASAQSFIERMTNFDKNLPNEKVLPKHSLLYEYFTVYNELTKVKYVTEGMRKPAFLSGEQKKAIVDLLFKTNRKVTVKQLKEDYFKKIECFDSVEISGVEDRFNASLGTYHDLLKIIKDKDFLDNEENEDILEDIVLTLTLFEDREMIEERLKTYAHLFDDKVMKQLKRRRYTGWGRLSRKLINGIRDKQSGKTILDFLKSDGFANRNFMQLIHDDSLTFKEDIQKAQVSGQGDSLHEHIANLAGSPAIKKGILQTVKVVDELVKVMGRHKPENIVIEMARENQTTQKGQKNSRERMKRIEEGIKELGSQILKEHPVENTQLQNEKLYLYYLQNGRDMYVDQELDINRLSDYDVDHIVPQSFLKDDSIDNKVLTRSDKARGKSDNVPSEEVVKKMKNYWRQLLNAKLITQRKFDNLTKAERGGLSELDKAGFIKRQLVETRQITKHVAQILDSRMNTKYDENDKLIREVKVITLKSKLVSDFRKDFQFYKVREINNYHHAHDAYLNAVVGTALIKKYPKLESEFVYGDYKVYDVRKMIAKSEQEIGKATAKYFFYSNIMNFFKTEITLANGEIRKRPLIETNGETGEIVWDKGRDFATVRKVLSMPQVNIVKKTEVQTGGFSKESILPKRNSDKLIARKKDWDPKKYGGFDSPTVAYSVLVVAKVEKGKSKKLKSVKELLGITIMERSSFEKNPIDFLEAKGYKEVKKDLIIKLPKYSLFELENGRKRMLASAGELQKGNELALPSKYVNFLYLASHYEKLKGSPEDNEQKQLFVEQHKHYLDEIIEQISEFSKRVILADANLDKVLSAYNKHRDKPIREQAENIIHLFTLTNLGAPAAFKYFDTTIDRKRYTSTKEVLDATLIHQSITGLYETRIDLSQLGGDGGGGGPAPGGSGGTLGDQGSRGSDPLPEPRVTLTVEGIPTEFLVNTGAEHSVLTKPMGKMGSKRTVVAGATGSKVYPWTTKRLLKIGQKQVTHSFLVIPECPAPLLGRDLLTKLKAQIQFSTEGPQVTWEDRPAMCLVLNLEEEYRLHEKPVPPSIDPSWLQLFPMVWAEKAGMGLANQVPPVVVELKSDASPVAVRQYPMSKEAREGIRPHIQRFLDLGILVPCQSPWNTPLLPVKKPGTNDYRPVQDLREVNKRVQDIHPTVPNPYNLLSSLPPSHTWYSVLDLKDAFFCLKLHPNSQPLFAFEWRDPEKGNTGQLTWTRLPQGFKNSPTLFNEALHRDLASFRALNPQVVMLQYVDDLLVAAPTYRDCKEGTRRLLQELSKLGYRVSAKKAQLCREEVTYLGYLLKGGKRWLTPARKATVMKIPTPTTPRQVREFLGKAGFCRLFIPGFASLAAPLYPLTRPKVPFTWTEAHQEAFGRIKEALLSAPALALPDLTKPFALYVDEKEGVARGVLTQTLGPWRRPVAYLSKKLDPVASGWPTCLKAIAAVALLLKDADKLTLGQNVLVIAPHNLESIVRQPPDRWMTNARMTHYQSLLLNERVSFAPPAILNPATLLPVESDDTPIHICSEILAEETGTRPDLRDQPLPGVPAWYTDGSSFIMDGRRQAGAAIVDNKRTVWASNLPEGTSAQKAELIALTQALRLAEGKSINIYTDSRYAFATAHVHGAIYKQRGWLTSAGKDIKNKEEILALLEAIHLPKRVAIIHCPGHQRGTDPVATGNRKADEAAKQAAQSTRILTETTKNAGKRTADGSEFEKRTADGSEFESPKKKAKVE

SEQ ID NO: 1827 - protein, 2216 aa, synthetic construct
MPAAKRVKLDGGDKKYSIGLDIGTNSVGWAVITDEYKVPSKKFKVLGNTDRHSIKKNLIGALLFDSGETAEATRLKRTARRRYTRRKNRICYLQEIFSNEMAKVDDSFFHRLEESFLVEEDKKHERHPIFGNIVDEVAYHEKYPTIYHLRKKLVDSTDKADLRLIYLALAHMIKFRGHFLIEGDLNPDNSDVDKLFIQLVQTYNQLFEENPINASGVDAKAILSARLSKSRRLENLIAQLPGEKKNGLFGNLIALSLGLTPNFKSNFDLAEDAKLQLSKDTYDDDLDNLLAQIGDQYADLFLAAKNLSDAILLSDILRVNTEITKAPLSASMIKRYDEHHQDLTLLKALVRQQLPEKYKEIFFDQSKNGYAGYIDGGASQEEFYKFIKPILEKMDGTEELLVKLNREDLLRKQRTFDNGSIPHQIHLGELHAILRRQEDFYPFLKDNREKIEKILTFRIPYYVGPLARGNSRFAWMTRKSEETITPWNFEEVVDKGASAQSFIERMTNFDKNLPNEKVLPKHSLLYEYFTVYNELTKVKYVTEGMRKPAFLSGEQKKAIVDLLFKTNRKVTVKQLKEDYFKKIECFDSVEISGVEDRFNASLGTYHDLLKIIKDKDFLDNEENEDILEDIVLTLTLFEDREMIEERLKTYAHLFDDKVMKQLKRRRYTGWGRLSRKLINGIRDKQSGKTILDFLKSDGFANRNFMQLIHDDSLTFKEDIQKAQVSGQGDSLHEHIANLAGSPAIKKGILQTVKVVDELVKVMGRHKPENIVIEMARENQTTQKGQKNSRERMKRIEEGIKELGSQILKEHPVENTQLQNEKLYLYYLQNGRDMYVDQELDINRLSDYDVDHIVPQSFLKDDSIDNKVLTRSDKARGKSDNVPSEEVVKKMKNYWRQLLNAKLITQRKFDNLTKAERGGLSELDKAGFIKRQLVETRQITKHVAQILDSRMNTKYDENDKLIREVKVITLKSKLVSDFRKDFQFYKVREINNYHHAHDAYLNAVVGTALIKKYPKLESEFVYGDYKVYDVRKMIAKSEQEIGKATAKYFFYSNIMNFFKTEITLANGEIRKRPLIETNGETGEIVWDKGRDFATVRKVLSMPQVNIVKKTEVQTGGFSKESILPKRNSDKLIARKKDWDPKKYGGFDSPTVAYSVLVVAKVEKGKSKKLKSVKELLGITIMERSSFEKNPIDFLEAKGYKEVKKDLIIKLPKYSLFELENGRKRMLASAGELQKGNELALPSKYVNFLYLASHYEKLKGSPEDNEQKQLFVEQHKHYLDEIIEQISEFSKRVILADANLDKVLSAYNKHRDKPIREQAENIIHLFTLTNLGAPAAFKYFDTTIDRKRYTSTKEVLDATLIHQSITGLYETRIDLSQLGGDGGPAPGGSGSSGGTLGDQGSRGSDPLPEPRVTLTVEGIPTEFLVNTGAEHSVLTKPMGKMGSKRTVVAGATGSKVYPWTTKRLLKIGQKQVTHSFLVIPECPAPLLGRDLLTKLKAQIQFSTEGPQVTWEDRPAMCLVLNLEEEYRLHEKPVPPSIDPSWLQLFPMVWAEKAGMGLANQVPPVVVELKSDASPVAVRQYPMSKEAREGIRPHIQRFLDLGILVPCQSPWNTPLLPVKKPGTNDYRPVQDLREVNKRVQDIHPTVPNPYNLLSSLPPSHTWYSVLDLKDAFFCLKLHPNSQPLFAFEWRDPEKGNTGQLTWTRLPQGFKNSPTLFNEALHRDLASFRALNPQVVMLQYVDDLLVAAPTYRDCKEGTRRLLQELSKLGYRVSAKKAQLCREEVTYLGYLLKGGKRWLTPARKATVMKIPTPTTPRQVREFLGKAGFCRLFIPGFASLAAPLYPLTRPKVPFTWTEAHQEAFGRIKEALLSAPALALPDLTKPFALYVDEKEGVARGVLTQTLGPWRRPVAYLSKKLDPVASGWPTCLKAIAAVALLLKDADKLTLGQNVLVIAPHNLESIVRQPPDRWMTNARMTHYQSLLLNERVSFAPPAILNPATLLPVESDDTPIHICSEILAEETGTRPDLRDQPLPGVPAWYTDGSSFIMDGRRQAGAAIVDNKRTVWASNLPEGTSAQKAELIALTQALRLAEGKSINIYTDSRYAFATAHVHGAIYKQRGWLTSAGKDIKNKEEILALLEAIHLPKRVAIIHCPGHQRGTDPVATGNRKADEAAKQAAQSTRILTETTKNAGKRTADGSEFEKRTADGSEFESPKKKAKVE

SEQ ID NO: 1828 - protein, 2212 aa, synthetic construct
MPAAKRVKLDGGDKKYSIGLDIGTNSVGWAVITDEYKVPSKKFKVLGNTDRHSIKKNLIGALLFDSGETAEATRLKRTARRRYTRRKNRICYLQEIFSNEMAKVDDSFFHRLEESFLVEEDKKHERHPIFGNIVDEVAYHEKYPTIYHLRKKLVDSTDKADLRLIYLALAHMIKFRGHFLIEGDLNPDNSDVDKLFIQLVQTYNQLFEENPINASGVDAKAILSARLSKSRRLENLIAQLPGEKKNGLFGNLIALSLGLTPNFKSNFDLAEDAKLQLSKDTYDDDLDNLLAQIGDQYADLFLAAKNLSDAILLSDILRVNTEITKAPLSASMIKRYDEHHQDLTLLKALVRQQLPEKYKEIFFDQSKNGYAGYIDGGASQEEFYKFIKPILEKMDGTEELLVKLNREDLLRKQRTFDNGSIPHQIHLGELHAILRRQEDFYPFLKDNREKIEKILTFRIPYYVGPLARGNSRFAWMTRKSEETITPWNFEEVVDKGASAQSFIERMTNFDKNLPNEKVLPKHSLLYEYFTVYNELTKVKYVTEGMRKPAFLSGEQKKAIVDLLFKTNRKVTVKQLKEDYFKKIECFDSVEISGVEDRFNASLGTYHDLLKIIKDKDFLDNEENEDILEDIVLTLTLFEDREMIEERLKTYAHLFDDKVMKQLKRRRYTGWGRLSRKLINGIRDKQSGKTILDFLKSDGFANRNFMQLIHDDSLTFKEDIQKAQVSGQGDSLHEHIANLAGSPAIKKGILQTVKVVDELVKVMGRHKPENIVIEMARENQTTQKGQKNSRERMKRIEEGIKELGSQILKEHPVENTQLQNEKLYLYYLQNGRDMYVDQELDINRLSDYDVDHIVPQSFLKDDSIDNKVLTRSDKARGKSDNVPSEEVVKKMKNYWRQLLNAKLITQRKFDNLTKAERGGLSELDKAGFIKRQLVETRQITKHVAQILDSRMNTKYDENDKLIREVKVITLKSKLVSDFRKDFQFYKVREINNYHHAHDAYLNAVVGTALIKKYPKLESEFVYGDYKVYDVRKMIAKSEQEIGKATAKYFFYSNIMNFFKTEITLANGEIRKRPLIETNGETGEIVWDKGRDFATVRKVLSMPQVNIVKKTEVQTGGFSKESILPKRNSDKLIARKKDWDPKKYGGFDSPTVAYSVLVVAKVEKGKSKKLKSVKELLGITIMERSSFEKNPIDFLEAKGYKEVKKDLIIKLPKYSLFELENGRKRMLASAGELQKGNELALPSKYVNFLYLASHYEKLKGSPEDNEQKQLFVEQHKHYLDEIIEQISEFSKRVILADANLDKVLSAYNKHRDKPIREQAENIIHLFTLTNLGAPAAFKYFDTTIDRKRYTSTKEVLDATLIHQSITGLYETRIDLSQLGGDGGGGGGGGGTLGDQGSRGSDPLPEPRVTLTVEGIPTEFLVNTGAEHSVLTKPMGKMGSKRTVVAGATGSKVYPWTTKRLLKIGQKQVTHSFLVIPECPAPLLGRDLLTKLKAQIQFSTEGPQVTWEDRPAMCLVLNLEEEYRLHEKPVPPSIDPSWLQLFPMVWAEKAGMGLANQVPPVVVELKSDASPVAVRQYPMSKEAREGIRPHIQRFLDLGILVPCQSPWNTPLLPVKKPGTNDYRPVQDLREVNKRVQDIHPTVPNPYNLLSSLPPSHTWYSVLDLKDAFFCLKLHPNSQPLFAFEWRDPEKGNTGQLTWTRLPQGFKNSPTLFNEALHRDLASFRALNPQVVMLQYVDDLLVAAPTYRDCKEGTRRLLQELSKLGYRVSAKKAQLCREEVTYLGYLLKGGKRWLTPARKATVMKIPTPTTPRQVREFLGKAGFCRLFIPGFASLAAPLYPLTRPKVPFTWTEAHQEAFGRIKEALLSAPALALPDLTKPFALYVDEKEGVARGVLTQTLGPWRRPVAYLSKKLDPVASGWPTCLKAIAAVALLLKDADKLTLGQNVLVIAPHNLESIVRQPPDRWMTNARMTHYQSLLLNERVSFAPPAILNPATLLPVESDDTPIHICSEILAEETGTRPDLRDQPLPGVPAWYTDGSSFIMDGRRQAGAAIVDNKRTVWASNLPEGTSAQKAELIALTQALRLAEGKSINIYTDSRYAFATAHVHGAIYKQRGWLTSAGKDIKNKEEILALLEAIHLPKRVAIIHCPGHQRGTDPVATGNRKADEAAKQAAQSTRILTETTKNAGKRTADGSEFEKRTADGSEFESPKKKAKVE

SEQ ID NO: 1829 - protein, 2218 aa, synthetic construct
MPAAKRVKLDGGDKKYSIGLDIGTNSVGWAVITDEYKVPSKKFKVLGNTDRHSIKKNLIGALLFDSGETAEATRLKRTARRRYTRRKNRICYLQEIFSNEMAKVDDSFFHRLEESFLVEEDKKHERHPIFGNIVDEVAYHEKYPTIYHLRKKLVDSTDKADLRLIYLALAHMIKFRGHFLIEGDLNPDNSDVDKLFIQLVQTYNQLFEENPINASGVDAKAILSARLSKSRRLENLIAQLPGEKKNGLFGNLIALSLGLTPNFKSNFDLAEDAKLQLSKDTYDDDLDNLLAQIGDQYADLFLAAKNLSDAILLSDILRVNTEITKAPLSASMIKRYDEHHQDLTLLKALVRQQLPEKYKEIFFDQSKNGYAGYIDGGASQEEFYKFIKPILEKMDGTEELLVKLNREDLLRKQRTFDNGSIPHQIHLGELHAILRRQEDFYPFLKDNREKIEKILTFRIPYYVGPLARGNSRFAWMTRKSEETITPWNFEEVVDKGASAQSFIERMTNFDKNLPNEKVLPKHSLLYEYFTVYNELTKVKYVTEGMRKPAFLSGEQKKAIVDLLFKTNRKVTVKQLKEDYFKKIECFDSVEISGVEDRFNASLGTYHDLLKIIKDKDFLDNEENEDILEDIVLTLTLFEDREMIEERLKTYAHLFDDKVMKQLKRRRYTGWGRLSRKLINGIRDKQSGKTILDFLKSDGFANRNFMQLIHDDSLTFKEDIQKAQVSGQGDSLHEHIANLAGSPAIKKGILQTVKVVDELVKVMGRHKPENIVIEMARENQTTQKGQKNSRERMKRIEEGIKELGSQILKEHPVENTQLQNEKLYLYYLQNGRDMYVDQELDINRLSDYDVDHIVPQSFLKDDSIDNKVLTRSDKARGKSDNVPSEEVVKKMKNYWRQLLNAKLITQRKFDNLTKAERGGLSELDKAGFIKRQLVETRQITKHVAQILDSRMNTKYDENDKLIREVKVITLKSKLVSDFRKDFQFYKVREINNYHHAHDAYLNAVVGTALIKKYPKLESEFVYGDYKVYDVRKMIAKSEQEIGKATAKYFFYSNIMNFFKTEITLANGEIRKRPLIETNGETGEIVWDKGRDFATVRKVLSMPQVNIVKKTEVQTGGFSKESILPKRNSDKLIARKKDWDPKKYGGFDSPTVAYSVLVVAKVEKGKSKKLKSVKELLGITIMERSSFEKNPIDFLEAKGYKEVKKDLIIKLPKYSLFELENGRKRMLASAGELQKGNELALPSKYVNFLYLASHYEKLKGSPEDNEQKQLFVEQHKHYLDEIIEQISEFSKRVILADANLDKVLSAYNKHRDKPIREQAENIIHLFTLTNLGAPAAFKYFDTTIDRKRYTSTKEVLDATLIHQSITGLYETRIDLSQLGGDGGGGSEAAAKGGGGGTLGDQGSRGSDPLPEPRVTLTVEGIPTEFLVNTGAEHSVLTKPMGKMGSKRTVVAGATGSKVYPWTTKRLLKIGQKQVTHSFLVIPECPAPLLGRDLLTKLKAQIQFSTEGPQVTWEDRPAMCLVLNLEEEYRLHEKPVPPSIDPSWLQLFPMVWAEKAGMGLANQVPPVVVELKSDASPVAVRQYPMSKEAREGIRPHIQRFLDLGILVPCQSPWNTPLLPVKKPGTNDYRPVQDLREVNKRVQDIHPTVPNPYNLLSSLPPSHTWYSVLDLKDAFFCLKLHPNSQPLFAFEWRDPEKGNTGQLTWTRLPQGFKNSPTLFNEALHRDLASFRALNPQVVMLQYVDDLLVAAPTYRDCKEGTRRLLQELSKLGYRVSAKKAQLCREEVTYLGYLLKGGKRWLTPARKATVMKIPTPTTPRQVREFLGKAGFCRLFIPGFASLAAPLYPLTRPKVPFTWTEAHQEAFGRIKEALLSAPALALPDLTKPFALYVDEKEGVARGVLTQTLGPWRRPVAYLSKKLDPVASGWPTCLKAIAAVALLLKDADKLTLGQNVLVIAPHNLESIVRQPPDRWMTNARMTHYQSLLLNERVSFAPPAILNPATLLPVESDDTPIHICSEILAEETGTRPDLRDQPLPGVPAWYTDGSSFIMDGRRQAGAAIVDNKRTVWASNLPEGTSAQKAELIALTQALRLAEGKSINIYTDSRYAFATAHVHGAIYKQRGWLTSAGKDIKNKEEILALLEAIHLPKRVAIIHCPGHQRGTDPVATGNRKADEAAKQAAQSTRILTETTKNAGKRTADGSEFEKRTADGSEFESPKKKAKVE

SEQ ID NO: 1830 - protein, 2216 aa, synthetic construct
MPAAKRVKLDGGDKKYSIGLDIGTNSVGWAVITDEYKVPSKKFKVLGNTDRHSIKKNLIGALLFDSGETAEATRLKRTARRRYTRRKNRICYLQEIFSNEMAKVDDSFFHRLEESFLVEEDKKHERHPIFGNIVDEVAYHEKYPTIYHLRKKLVDSTDKADLRLIYLALAHMIKFRGHFLIEGDLNPDNSDVDKLFIQLVQTYNQLFEENPINASGVDAKAILSARLSKSRRLENLIAQLPGEKKNGLFGNLIALSLGLTPNFKSNFDLAEDAKLQLSKDTYDDDLDNLLAQIGDQYADLFLAAKNLSDAILLSDILRVNTEITKAPLSASMIKRYDEHHQDLTLLKALVRQQLPEKYKEIFFDQSKNGYAGYIDGGASQEEFYKFIKPILEKMDGTEELLVKLNREDLLRKQRTFDNGSIPHQIHLGELHAILRRQEDFYPFLKDNREKIEKILTFRIPYYVGPLARGNSRFAWMTRKSEETITPWNFEEVVDKGASAQSFIERMTNFDKNLPNEKVLPKHSLLYEYFTVYNELTKVKYVTEGMRKPAFLSGEQKKAIVDLLFKTNRKVTVKQLKEDYFKKIECFDSVEISGVEDRFNASLGTYHDLLKIIKDKDFLDNEENEDILEDIVLTLTLFEDREMIEERLKTYAHLFDDKVMKQLKRRRYTGWGRLSRKLINGIRDKQSGKTILDFLKSDGFANRNFMQLIHDDSLTFKEDIQKAQVSGQGDSLHEHIANLAGSPAIKKGILQTVKVVDELVKVMGRHKPENIVIEMARENQTTQKGQKNSRERMKRIEEGIKELGSQILKEHPVENTQLQNEKLYLYYLQNGRDMYVDQELDINRLSDYDVDHIVPQSFLKDDSIDNKVLTRSDKARGKSDNVPSEEVVKKMKNYWRQLLNAKLITQRKFDNLTKAERGGLSELDKAGFIKRQLVETRQITKHVAQILDSRMNTKYDENDKLIREVKVITLKSKLVSDFRKDFQFYKVREINNYHHAHDAYLNAVVGTALIKKYPKLESEFVYGDYKVYDVRKMIAKSEQEIGKATAKYFFYSNIMNFFKTEITLANGEIRKRPLIETNGETGEIVWDKGRDFATVRKVLSMPQVNIVKKTEVQTGGFSKESILPKRNSDKLIARKKDWDPKKYGGFDSPTVAYSVLVVAKVEKGKSKKLKSVKELLGITIMERSSFEKNPIDFLEAKGYKEVKKDLIIKLPKYSLFELENGRKRMLASAGELQKGNELALPSKYVNFLYLASHYEKLKGSPEDNEQKQLFVEQHKHYLDEIIEQISEFSKRVILADANLDKVLSAYNKHRDKPIREQAENIIHLFTLTNLGAPAAFKYFDTTIDRKRYTSTKEVLDATLIHQSITGLYETRIDLSQLGGDGGGSSGGSPAPGGTLGDQGSRGSDPLPEPRVTLTVEGIPTEFLVNTGAEHSVLTKPMGKMGSKRTVVAGATGSKVYPWTTKRLLKIGQKQVTHSFLVIPECPAPLLGRDLLTKLKAQIQFSTEGPQVTWEDRPAMCLVLNLEEEYRLHEKPVPPSIDPSWLQLFPMVWAEKAGMGLANQVPPVVVELKSDASPVAVRQYPMSKEAREGIRPHIQRFLDLGILVPCQSPWNTPLLPVKKPGTNDYRPVQDLREVNKRVQDIHPTVPNPYNLLSSLPPSHTWYSVLDLKDAFFCLKLHPNSQPLFAFEWRDPEKGNTGQLTWTRLPQGFKNSPTLFNEALHRDLASFRALNPQVVMLQYVDDLLVAAPTYRDCKEGTRRLLQELSKLGYRVSAKKAQLCREEVTYLGYLLKGGKRWLTPARKATVMKIPTPTTPRQVREFLGKAGFCRLFIPGFASLAAPLYPLTRPKVPFTWTEAHQEAFGRIKEALLSAPALALPDLTKPFALYVDEKEGVARGVLTQTLGPWRRPVAYLSKKLDPVASGWPTCLKAIAAVALLLKDADKLTLGQNVLVIAPHNLESIVRQPPDRWMTNARMTHYQSLLLNERVSFAPPAILNPATLLPVESDDTPIHICSEILAEETGTRPDLRDQPLPGVPAWYTDGSSFIMDGRRQAGAAIVDNKRTVWASNLPEGTSAQKAELIALTQALRLAEGKSINIYTDSRYAFATAHVHGAIYKQRGWLTSAGKDIKNKEEILALLEAIHLPKRVAIIHCPGHQRGTDPVATGNRKADEAAKQAAQSTRILTETTKNAGKRTADGSEFEKRTADGSEFESPKKKAKVE

SEQ ID NO: 1831 - protein, 2213 aa, synthetic construct
MPAAKRVKLDGGDKKYSIGLDIGTNSVGWAVITDEYKVPSKKFKVLGNTDRHSIKKNLIGALLFDSGETAEATRLKRTARRRYTRRKNRICYLQEIFSNEMAKVDDSFFHRLEESFLVEEDKKHERHPIFGNIVDEVAYHEKYPTIYHLRKKLVDSTDKADLRLIYLALAHMIKFRGHFLIEGDLNPDNSDVDKLFIQLVQTYNQLFEENPINASGVDAKAILSARLSKSRRLENLIAQLPGEKKNGLFGNLIALSLGLTPNFKSNFDLAEDAKLQLSKDTYDDDLDNLLAQIGDQYADLFLAAKNLSDAILLSDILRVNTEITKAPLSASMIKRYDEHHQDLTLLKALVRQQLPEKYKEIFFDQSKNGYAGYIDGGASQEEFYKFIKPILEKMDGTEELLVKLNREDLLRKQRTFDNGSIPHQIHLGELHAILRRQEDFYPFLKDNREKIEKILTFRIPYYVGPLARGNSRFAWMTRKSEETITPWNFEEVVDKGASAQSFIERMTNFDKNLPNEKVLPKHSLLYEYFTVYNELTKVKYVTEGMRKPAFLSGEQKKAIVDLLFKTNRKVTVKQLKEDYFKKIECFDSVEISGVEDRFNASLGTYHDLLKIIKDKDFLDNEENEDILEDIVLTLTLFEDREMIEERLKTYAHLFDDKVMKQLKRRRYTGWGRLSRKLINGIRDKQSGKTILDFLKSDGFANRNFMQLIHDDSLTFKEDIQKAQVSGQGDSLHEHIANLAGSPAIKKGILQTVKVVDELVKVMGRHKPENIVIEMARENQTTQKGQKNSRERMKRIEEGIKELGSQILKEHPVENTQLQNEKLYLYYLQNGRDMYVDQELDINRLSDYDVDHIVPQSFLKDDSIDNKVLTRSDKARGKSDNVPSEEVVKKMKNYWRQLLNAKLITQRKFDNLTKAERGGLSELDKAGFIKRQLVETRQITKHVAQILDSRMNTKYDENDKLIREVKVITLKSKLVSDFRKDFQFYKVREINNYHHAHDAYLNAVVGTALIKKYPKLESEFVYGDYKVYDVRKMIAKSEQEIGKATAKYFFYSNIMNFFKTEITLANGEIRKRPLIETNGETGEIVWDKGRDFATVRKVLSMPQVNIVKKTEVQTGGFSKESILPKRNSDKLIARKKDWDPKKYGGFDSPTVAYSVLVVAKVEKGKSKKLKSVKELLGITIMERSSFEKNPIDFLEAKGYKEVKKDLIIKLPKYSLFELENGRKRMLASAGELQKGNELALPSKYVNFLYLASHYEKLKGSPEDNEQKQLFVEQHKHYLDEIIEQISEFSKRVILADANLDKVLSAYNKHRDKPIREQAENIIHLFTLTNLGAPAAFKYFDTTIDRKRYTSTKEVLDATLIHQSITGLYETRIDLSQLGGDGGGSSGSSGGTLGDQGSRGSDPLPEPRVTLTVEGIPTEFLVNTGAEHSVLTKPMGKMGSKRTVVAGATGSKVYPWTTKRLLKIGQKQVTHSFLVIPECPAPLLGRDLLTKLKAQIQFSTEGPQVTWEDRPAMCLVLNLEEEYRLHEKPVPPSIDPSWLQLFPMVWAEKAGMGLANQVPPVVVELKSDASPVAVRQYPMSKEAREGIRPHIQRFLDLGILVPCQSPWNTPLLPVKKPGTNDYRPVQDLREVNKRVQDIHPTVPNPYNLLSSLPPSHTWYSVLDLKDAFFCLKLHPNSQPLFAFEWRDPEKGNTGQLTWTRLPQGFKNSPTLFNEALHRDLASFRALNPQVVMLQYVDDLLVAAPTYRDCKEGTRRLLQELSKLGYRVSAKKAQLCREEVTYLGYLLKGGKRWLTPARKATVMKIPTPTTPRQVREFLGKAGFCRLFIPGFASLAAPLYPLTRPKVPFTWTEAHQEAFGRIKEALLSAPALALPDLTKPFALYVDEKEGVARGVLTQTLGPWRRPVAYLSKKLDPVASGWPTCLKAIAAVALLLKDADKLTLGQNVLVIAPHNLESIVRQPPDRWMTNARMTHYQSLLLNERVSFAPPAILNPATLLPVESDDTPIHICSEILAEETGTRPDLRDQPLPGVPAWYTDGSSFIMDGRRQAGAAIVDNKRTVWASNLPEGTSAQKAELIALTQALRLAEGKSINIYTDSRYAFATAHVHGAIYKQRGWLTSAGKDIKNKEEILALLEAIHLPKRVAIIHCPGHQRGTDPVATGNRKADEAAKQAAQSTRILTETTKNAGKRTADGSEFEKRTADGSEFESPKKKAKVE

SEQ ID NO: 1832 - protein, 2216 aa, synthetic construct
MPAAKRVKLDGGDKKYSIGLDIGTNSVGWAVITDEYKVPSKKFKVLGNTDRHSIKKNLIGALLFDSGETAEATRLKRTARRRYTRRKNRICYLQEIFSNEMAKVDDSFFHRLEESFLVEEDKKHERHPIFGNIVDEVAYHEKYPTIYHLRKKLVDSTDKADLRLIYLALAHMIKFRGHFLIEGDLNPDNSDVDKLFIQLVQTYNQLFEENPINASGVDAKAILSARLSKSRRLENLIAQLPGEKKNGLFGNLIALSLGLTPNFKSNFDLAEDAKLQLSKDTYDDDLDNLLAQIGDQYADLFLAAKNLSDAILLSDILRVNTEITKAPLSASMIKRYDEHHQDLTLLKALVRQQLPEKYKEIFFDQSKNGYAGYIDGGASQEEFYKFIKPILEKMDGTEELLVKLNREDLLRKQRTFDNGSIPHQIHLGELHAILRRQEDFYPFLKDNREKIEKILTFRIPYYVGPLARGNSRFAWMTRKSEETITPWNFEEVVDKGASAQSFIERMTNFDKNLPNEKVLPKHSLLYEYFTVYNELTKVKYVTEGMRKPAFLSGEQKKAIVDLLFKTNRKVTVKQLKEDYFKKIECFDSVEISGVEDRFNASLGTYHDLLKIIKDKDFLDNEENEDILEDIVLTLTLFEDREMIEERLKTYAHLFDDKVMKQLKRRRYTGWGRLSRKLINGIRDKQSGKTILDFLKSDGFANRNFMQLIHDDSLTFKEDIQKAQVSGQGDSLHEHIANLAGSPAIKKGILQTVKVVDELVKVMGRHKPENIVIEMARENQTTQKGQKNSRERMKRIEEGIKELGSQILKEHPVENTQLQNEKLYLYYLQNGRDMYVDQELDINRLSDYDVDHIVPQSFLKDDSIDNKVLTRSDKARGKSDNVPSEEVVKKMKNYWRQLLNAKLITQRKFDNLTKAERGGLSELDKAGFIKRQLVETRQITKHVAQILDSRMNTKYDENDKLIREVKVITLKSKLVSDFRKDFQFYKVREINNYHHAHDAYLNAVVGTALIKKYPKLESEFVYGDYKVYDVRKMIAKSEQEIGKATAKYFFYSNIMNFFKTEITLANGEIRKRPLIETNGETGEIVWDKGRDFATVRKVLSMPQVNIVKKTEVQTGGFSKESILPKRNSDKLIARKKDWDPKKYGGFDSPTVAYSVLVVAKVEKGKSKKLKSVKELLGITIMERSSFEKNPIDFLEAKGYKEVKKDLIIKLPKYSLFELENGRKRMLASAGELQKGNELALPSKYVNFLYLASHYEKLKGSPEDNEQKQLFVEQHKHYLDEIIEQISEFSKRVILADANLDKVLSAYNKHRDKPIREQAENIIHLFTLTNLGAPAAFKYFDTTIDRKRYTSTKEVLDATLIHQSITGLYETRIDLSQLGGDGGGGSGGGPAPGGTLGDQGSRGSDPLPEPRVTLTVEGIPTEFLVNTGAEHSVLTKPMGKMGSKRTVVAGATGSKVYPWTTKRLLKIGQKQVTHSFLVIPECPAPLLGRDLLTKLKAQIQFSTEGPQVTWEDRPAMCLVLNLEEEYRLHEKPVPPSIDPSWLQLFPMVWAEKAGMGLANQVPPVVVELKSDASPVAVRQYPMSKEAREGIRPHIQRFLDLGILVPCQSPWNTPLLPVKKPGTNDYRPVQDLREVNKRVQDIHPTVPNPYNLLSSLPPSHTWYSVLDLKDAFFCLKLHPNSQPLFAFEWRDPEKGNTGQLTWTRLPQGFKNSPTLFNEALHRDLASFRALNPQVVMLQYVDDLLVAAPTYRDCKEGTRRLLQELSKLGYRVSAKKAQLCREEVTYLGYLLKGGKRWLTPARKATVMKIPTPTTPRQVREFLGKAGFCRLFIPGFASLAAPLYPLTRPKVPFTWTEAHQEAFGRIKEALLSAPALALPDLTKPFALYVDEKEGVARGVLTQTLGPWRRPVAYLSKKLDPVASGWPTCLKAIAAVALLLKDADKLTLGQNVLVIAPHNLESIVRQPPDRWMTNARMTHYQSLLLNERVSFAPPAILNPATLLPVESDDTPIHICSEILAEETGTRPDLRDQPLPGVPAWYTDGSSFIMDGRRQAGAAIVDNKRTVWASNLPEGTSAQKAELIALTQALRLAEGKSINIYTDSRYAFATAHVHGAIYKQRGWLTSAGKDIKNKEEILALLEAIHLPKRVAIIHCPGHQRGTDPVATGNRKADEAAKQAAQSTRILTETTKNAGKRTADGSEFEKRTADGSEFESPKKKAKVE

SEQ ID NO: 1833 - protein, 2218 aa, synthetic construct
MPAAKRVKLDGGDKKYSIGLDIGTNSVGWAVITDEYKVPSKKFKVLGNTDRHSIKKNLIGALLFDSGETAEATRLKRTARRRYTRRKNRICYLQEIFSNEMAKVDDSFFHRLEESFLVEEDKKHERHPIFGNIVDEVAYHEKYPTIYHLRKKLVDSTDKADLRLIYLALAHMIKFRGHFLIEGDLNPDNSDVDKLFIQLVQTYNQLFEENPINASGVDAKAILSARLSKSRRLENLIAQLPGEKKNGLFGNLIALSLGLTPNFKSNFDLAEDAKLQLSKDTYDDDLDNLLAQIGDQYADLFLAAKNLSDAILLSDILRVNTEITKAPLSASMIKRYDEHHQDLTLLKALVRQQLPEKYKEIFFDQSKNGYAGYIDGGASQEEFYKFIKPILEKMDGTEELLVKLNREDLLRKQRTFDNGSIPHQIHLGELHAILRRQEDFYPFLKDNREKIEKILTFRIPYYVGPLARGNSRFAWMTRKSEETITPWNFEEVVDKGASAQSFIERMTNFDKNLPNEKVLPKHSLLYEYFTVYNELTKVKYVTEGMRKPAFLSGEQKKAIVDLLFKTNRKVTVKQLKEDYFKKIECFDSVEISGVEDRFNASLGTYHDLLKIIKDKDFLDNEENEDILEDIVLTLTLFEDREMIEERLKTYAHLFDDKVMKQLKRRRYTGWGRLSRKLINGIRDKQSGKTILDFLKSDGFANRNFMQLIHDDSLTFKEDIQKAQVSGQGDSLHEHIANLAGSPAIKKGILQTVKVVDELVKVMGRHKPENIVIEMARENQTTQKGQKNSRERMKRIEEGIKELGSQILKEHPVENTQLQNEKLYLYYLQNGRDMYVDQELDINRLSDYDVDHIVPQSFLKDDSIDNKVLTRSDKARGKSDNVPSEEVVKKMKNYWRQLLNAKLITQRKFDNLTKAERGGLSELDKAGFIKRQLVETRQITKHVAQILDSRMNTKYDENDKLIREVKVITLKSKLVSDFRKDFQFYKVREINNYHHAHDAYLNAVVGTALIKKYPKLESEFVYGDYKVYDVRKMIAKSEQEIGKATAKYFFYSNIMNFFKTEITLANGEIRKRPLIETNGETGEIVWDKGRDFATVRKVLSMPQVNIVKKTEVQTGGFSKESILPKRNSDKLIARKKDWDPKKYGGFDSPTVAYSVLVVAKVEKGKSKKLKSVKELLGITIMERSSFEKNPIDFLEAKGYKEVKKDLIIKLPKYSLFELENGRKRMLASAGELQKGNELALPSKYVNFLYLASHYEKLKGSPEDNEQKQLFVEQHKHYLDEIIEQISEFSKRVILADANLDKVLSAYNKHRDKPIREQAENIIHLFTLTNLGAPAAFKYFDTTIDRKRYTSTKEVLDATLIHQSITGLYETRIDLSQLGGDGGEAAAKGGSPAPGGTLGDQGSRGSDPLPEPRVTLTVEGIPTEFLVNTGAEHSVLTKPMGKMGSKRTVVAGATGSKVYPWTTKRLLKIGQKQVTHSFLVIPECPAPLLGRDLLTKLKAQIQFSTEGPQVTWEDRPAMCLVLNLEEEYRLHEKPVPPSIDPSWLQLFPMVWAEKAGMGLANQVPPVVVELKSDASPVAVRQYPMSKEAREGIRPHIQRFLDLGILVPCQSPWNTPLLPVKKPGTNDYRPVQDLREVNKRVQDIHPTVPNPYNLLSSLPPSHTWYSVLDLKDAFFCLKLHPNSQPLFAFEWRDPEKGNTGQLTWTRLPQGFKNSPTLFNEALHRDLASFRALNPQVVMLQYVDDLLVAAPTYRDCKEGTRRLLQELSKLGYRVSAKKAQLCREEVTYLGYLLKGGKRWLTPARKATVMKIPTPTTPRQVREFLGKAGFCRLFIPGFASLAAPLYPLTRPKVPFTWTEAHQEAFGRIKEALLSAPALALPDLTKPFALYVDEKEGVARGVLTQTLGPWRRPVAYLSKKLDPVASGWPTCLKAIAAVALLLKDADKLTLGQNVLVIAPHNLESIVRQPPDRWMTNARMTHYQSLLLNERVSFAPPAILNPATLLPVESDDTPIHICSEILAEETGTRPDLRDQPLPGVPAWYTDGSSFIMDGRRQAGAAIVDNKRTVWASNLPEGTSAQKAELIALTQALRLAEGKSINIYTDSRYAFATAHVHGAIYKQRGWLTSAGKDIKNKEEILALLEAIHLPKRVAIIHCPGHQRGTDPVATGNRKADEAAKQAAQSTRILTETTKNAGKRTADGSEFEKRTADGSEFESPKKKAKVE

SEQ ID NO: 1834 - protein, 2216 aa, synthetic construct
MPAAKRVKLDGGDKKYSIGLDIGTNSVGWAVITDEYKVPSKKFKVLGNTDRHSIKKNLIGALLFDSGETAEATRLKRTARRRYTRRKNRICYLQEIFSNEMAKVDDSFFHRLEESFLVEEDKKHERHPIFGNIVDEVAYHEKYPTIYHLRKKLVDSTDKADLRLIYLALAHMIKFRGHFLIEGDLNPDNSDVDKLFIQLVQTYNQLFEENPINASGVDAKAILSARLSKSRRLENLIAQLPGEKKNGLFGNLIALSLGLTPNFKSNFDLAEDAKLQLSKDTYDDDLDNLLAQIGDQYADLFLAAKNLSDAILLSDILRVNTEITKAPLSASMIKRYDEHHQDLTLLKALVRQQLPEKYKEIFFDQSKNGYAGYIDGGASQEEFYKFIKPILEKMDGTEELLVKLNREDLLRKQRTFDNGSIPHQIHLGELHAILRRQEDFYPFLKDNREKIEKILTFRIPYYVGPLARGNSRFAWMTRKSEETITPWNFEEVVDKGASAQSFIERMTNFDKNLPNEKVLPKHSLLYEYFTVYNELTKVKYVTEGMRKPAFLSGEQKKAIVDLLFKTNRKVTVKQLKEDYFKKIECFDSVEISGVEDRFNASLGTYHDLLKIIKDKDFLDNEENEDILEDIVLTLTLFEDREMIEERLKTYAHLFDDKVMKQLKRRRYTGWGRLSRKLINGIRDKQSGKTILDFLKSDGFANRNFMQLIHDDSLTFKEDIQKAQVSGQGDSLHEHIANLAGSPAIKKGILQTVKVVDELVKVMGRHKPENIVIEMARENQTTQKGQKNSRERMKRIEEGIKELGSQILKEHPVENTQLQNEKLYLYYLQNGRDMYVDQELDINRLSDYDVDHIVPQSFLKDDSIDNKVLTRSDKARGKSDNVPSEEVVKKMKNYWRQLLNAKLITQRKFDNLTKAERGGLSELDKAGFIKRQLVETRQITKHVAQILDSRMNTKYDENDKLIREVKVITLKSKLVSDFRKDFQFYKVREINNYHHAHDAYLNAVVGTALIKKYPKLESEFVYGDYKVYDVRKMIAKSEQEIGKATAKYFFYSNIMNFFKTEITLANGEIRKRPLIETNGETGEIVWDKGRDFATVRKVLSMPQVNIVKKTEVQTGGFSKESILPKRNSDKLIARKKDWDPKKYGGFDSPTVAYSVLVVAKVEKGKSKKLKSVKELLGITIMERSSFEKNPIDFLEAKGYKEVKKDLIIKLPKYSLFELENGRKRMLASAGELQKGNELALPSKYVNFLYLASHYEKLKGSPEDNEQKQLFVEQHKHYLDEIIEQISEFSKRVILADANLDKVLSAYNKHRDKPIREQAENIIHLFTLTNLGAPAAFKYFDTTIDRKRYTSTKEVLDATLIHQSITGLYETRIDLSQLGGDGGGGGGGSPAPGGTLGDQGSRGSDPLPEPRVTLTVEGIPTEFLVNTGAEHSVLTKPMGKMGSKRTVVAGATGSKVYPWTTKRLLKIGQKQVTHSFLVIPECPAPLLGRDLLTKLKAQIQFSTEGPQVTWEDRPAMCLVLNLEEEYRLHEKPVPPSIDPSWLQLFPMVWAEKAGMGLANQVPPVVVELKSDASPVAVRQYPMSKEAREGIRPHIQRFLDLGILVPCQSPWNTPLLPVKKPGTNDYRPVQDLREVNKRVQDIHPTVPNPYNLLSSLPPSHTWYSVLDLKDAFFCLKLHPNSQPLFAFEWRDPEKGNTGQLTWTRLPQGFKNSPTLFNEALHRDLASFRALNPQVVMLQYVDDLLVAAPTYRDCKEGTRRLLQELSKLGYRVSAKKAQLCREEVTYLGYLLKGGKRWLTPARKATVMKIPTPTTPRQVREFLGKAGFCRLFIPGFASLAAPLYPLTRPKVPFTWTEAHQEAFGRIKEALLSAPALALPDLTKPFALYVDEKEGVARGVLTQTLGPWRRPVAYLSKKLDPVASGWPTCLKAIAAVALLLKDADKLTLGQNVLVIAPHNLESIVRQPPDRWMTNARMTHYQSLLLNERVSFAPPAILNPATLLPVESDDTPIHICSEILAEETGTRPDLRDQPLPGVPAWYTDGSSFIMDGRRQAGAAIVDNKRTVWASNLPEGTSAQKAELIALTQALRLAEGKSINIYTDSRYAFATAHVHGAIYKQRGWLTSAGKDIKNKEEILALLEAIHLPKRVAIIHCPGHQRGTDPVATGNRKADEAAKQAAQSTRILTETTKNAGKRTADGSEFEKRTADGSEFESPKKKAKVE

SEQ ID NO: 1835 - protein, 2216 aa, synthetic construct
MPAAKRVKLDGGDKKYSIGLDIGTNSVGWAVITDEYKVPSKKFKVLGNTDRHSIKKNLIGALLFDSGETAEATRLKRTARRRYTRRKNRICYLQEIFSNEMAKVDDSFFHRLEESFLVEEDKKHERHPIFGNIVDEVAYHEKYPTIYHLRKKLVDSTDKADLRLIYLALAHMIKFRGHFLIEGDLNPDNSDVDKLFIQLVQTYNQLFEENPINASGVDAKAILSARLSKSRRLENLIAQLPGEKKNGLFGNLIALSLGLTPNFKSNFDLAEDAKLQLSKDTYDDDLDNLLAQIGDQYADLFLAAKNLSDAILLSDILRVNTEITKAPLSASMIKRYDEHHQDLTLLKALVRQQLPEKYKEIFFDQSKNGYAGYIDGGASQEEFYKFIKPILEKMDGTEELLVKLNREDLLRKQRTFDNGSIPHQIHLGELHAILRRQEDFYPFLKDNREKIEKILTFRIPYYVGPLARGNSRFAWMTRKSEETITPWNFEEVVDKGASAQSFIERMTNFDKNLPNEKVLPKHSLLYEYFTVYNELTKVKYVTEGMRKPAFLSGEQKKAIVDLLFKTNRKVTVKQLKEDYFKKIECFDSVEISGVEDRFNASLGTYHDLLKIIKDKDFLDNEENEDILEDIVLTLTLFEDREMIEERLKTYAHLFDDKVMKQLKRRRYTGWGRLSRKLINGIRDKQSGKTILDFLKSDGFANRNFMQLIHDDSLTFKEDIQKAQVSGQGDSLHEHIANLAGSPAIKKGILQTVKVVDELVKVMGRHKPENIVIEMARENQTTQKGQKNSRERMKRIEEGIKELGSQILKEHPVENTQLQNEKLYLYYLQNGRDMYVDQELDINRLSDYDVDHIVPQSFLKDDSIDNKVLTRSDKARGKSDNVPSEEVVKKMKNYWRQLLNAKLITQRKFDNLTKAERGGLSELDKAGFIKRQLVETRQITKHVAQILDSRMNTKYDENDKLIREVKVITLKSKLVSDFRKDFQFYKVREINNYHHAHDAYLNAVVGTALIKKYPKLESEFVYGDYKVYDVRKMIAKSEQEIGKATAKYFFYSNIMNFFKTEITLANGEIRKRPLIETNGETGEIVWDKGRDFATVRKVLSMPQVNIVKKTEVQTGGFSKESILPKRNSDKLIARKKDWDPKKYGGFDSPTVAYSVLVVAKVEKGKSKKLKSVKELLGITIMERSSFEKNPIDFLEAKGYKEVKKDLIIKLPKYSLFELENGRKRMLASAGELQKGNELALPSKYVNFLYLASHYEKLKGSPEDNEQKQLFVEQHKHYLDEIIEQISEFSKRVILADANLDKVLSAYNKHRDKPIREQAENIIHLFTLTNLGAPAAFKYFDTTIDRKRYTSTKEVLDATLIHQSITGLYETRIDLSQLGGDGGPAPGGGGGSGGTLGDQGSRGSDPLPEPRVTLTVEGIPTEFLVNTGAEHSVLTKPMGKMGSKRTVVAGATGSKVYPWTTKRLLKIGQKQVTHSFLVIPECPAPLLGRDLLTKLKAQIQFSTEGPQVTWEDRPAMCLVLNLEEEYRLHEKPVPPSIDPSWLQLFPMVWAEKAGMGLANQVPPVVVELKSDASPVAVRQYPMSKEAREGIRPHIQRFLDLGILVPCQSPWNTPLLPVKKPGTNDYRPVQDLREVNKRVQDIHPTVPNPYNLLSSLPPSHTWYSVLDLKDAFFCLKLHPNSQPLFAFEWRDPEKGNTGQLTWTRLPQGFKNSPTLFNEALHRDLASFRALNPQVVMLQYVDDLLVAAPTYRDCKEGTRRLLQELSKLGYRVSAKKAQLCREEVTYLGYLLKGGKRWLTPARKATVMKIPTPTTPRQVREFLGKAGFCRLFIPGFASLAAPLYPLTRPKVPFTWTEAHQEAFGRIKEALLSAPALALPDLTKPFALYVDEKEGVARGVLTQTLGPWRRPVAYLSKKLDPVASGWPTCLKAIAAVALLLKDADKLTLGQNVLVIAPHNLESIVRQPPDRWMTNARMTHYQSLLLNERVSFAPPAILNPATLLPVESDDTPIHICSEILAEETGTRPDLRDQPLPGVPAWYTDGSSFIMDGRRQAGAAIVDNKRTVWASNLPEGTSAQKAELIALTQALRLAEGKSINIYTDSRYAFATAHVHGAIYKQRGWLTSAGKDIKNKEEILALLEAIHLPKRVAIIHCPGHQRGTDPVATGNRKADEAAKQAAQSTRILTETTKNAGKRTADGSEFEKRTADGSEFESPKKKAKVE

SEQ ID NO: 1836 - protein, 2118 aa, synthetic construct
MPAAKRVKLDGGDKKYSIGLDIGTNSVGWAVITDEYKVPSKKFKVLGNTDRHSIKKNLIGALLFDSGETAEATRLKRTARRRYTRRKNRICYLQEIFSNEMAKVDDSFFHRLEESFLVEEDKKHERHPIFGNIVDEVAYHEKYPTIYHLRKKLVDSTDKADLRLIYLALAHMIKFRGHFLIEGDLNPDNSDVDKLFIQLVQTYNQLFEENPINASGVDAKAILSARLSKSRRLENLIAQLPGEKKNGLFGNLIALSLGLTPNFKSNFDLAEDAKLQLSKDTYDDDLDNLLAQIGDQYADLFLAAKNLSDAILLSDILRVNTEITKAPLSASMIKRYDEHHQDLTLLKALVRQQLPEKYKEIFFDQSKNGYAGYIDGGASQEEFYKFIKPILEKMDGTEELLVKLNREDLLRKQRTFDNGSIPHQIHLGELHAILRRQEDFYPFLKDNREKIEKILTFRIPYYVGPLARGNSRFAWMTRKSEETITPWNFEEVVDKGASAQSFIERMTNFDKNLPNEKVLPKHSLLYEYFTVYNELTKVKYVTEGMRKPAFLSGEQKKAIVDLLFKTNRKVTVKQLKEDYFKKIECFDSVEISGVEDRFNASLGTYHDLLKIIKDKDFLDNEENEDILEDIVLTLTLFEDREMIEERLKTYAHLFDDKVMKQLKRRRYTGWGRLSRKLINGIRDKQSGKTILDFLKSDGFANRNFMQLIHDDSLTFKEDIQKAQVSGQGDSLHEHIANLAGSPAIKKGILQTVKVVDELVKVMGRHKPENIVIEMARENQTTQKGQKNSRERMKRIEEGIKELGSQILKEHPVENTQLQNEKLYLYYLQNGRDMYVDQELDINRLSDYDVDHIVPQSFLKDDSIDNKVLTRSDKARGKSDNVPSEEVVKKMKNYWRQLLNAKLITQRKFDNLTKAERGGLSELDKAGFIKRQLVETRQITKHVAQILDSRMNTKYDENDKLIREVKVITLKSKLVSDFRKDFQFYKVREINNYHHAHDAYLNAVVGTALIKKYPKLESEFVYGDYKVYDVRKMIAKSEQEIGKATAKYFFYSNIMNFFKTEITLANGEIRKRPLIETNGETGEIVWDKGRDFATVRKVLSMPQVNIVKKTEVQTGGFSKESILPKRNSDKLIARKKDWDPKKYGGFDSPTVAYSVLVVAKVEKGKSKKLKSVKELLGITIMERSSFEKNPIDFLEAKGYKEVKKDLIIKLPKYSLFELENGRKRMLASAGELQKGNELALPSKYVNFLYLASHYEKLKGSPEDNEQKQLFVEQHKHYLDEIIEQISEFSKRVILADANLDKVLSAYNKHRDKPIREQAENIIHLFTLTNLGAPAAFKYFDTTIDRKRYTSTKEVLDATLIHQSITGLYETRIDLSQLGGDGGSGGSSGGSSGSETPGTSESATPESSGGSSGGSSGGTLNLEDEYRLYETSAEPEVSPGSTWLSDFPQAWAETGGMGLAVRQAPLIIPLKATSTPVSIKQYPMSQEAKLGIKPHIQRLLDQGILVPCQSPWNTPLLPVKKPGTNDYRPVQDLREVNKRVEDIHPTVPNPYNLLSGLPPSHRWYTVLDLKDAFFCLRLHPTSQPLFAFEWRDPGMGISGQLTWTRLPQGFKNSPTLFDEALHRDLADFRIQHPDLILLQYVDDILLAATSELDCQQGTRALLLTLGNLGYRASAKKAQLCQKQVKYLGYLLKEGQRWLTEARKETVMGQPTPKTPRQLREFLGTAGFCRLWIPGFAEMAAPLYPLTKTGTLFNWGPDQQKAYQEIKQALLTAPALGLPDLTKPFELFVDEKQGYAKGVLTQKLGPWRRPVAYLSKKLDPVAAGWPPCLRMVAAIAVLRKDAGKLTMGQPLVILAPHAVEALVKQPPDRWLSNARMTHYQAMLLDTDRVQFGPVVALNPATLLPLPEEGAPHDCLEILAETHGTRPDLTDQPIPDADHTWYTDGSSFLQEGQRKAGAAVTTETEVIWARALPAGTSAQRAELIALTQALKMAEGKRLNVYTDSRYAFATAHIHGEIYRRRGLLTSEGREIKNKSEILALLKALFLPKRLSIIHCLGHQKGDSAEARGNRLADQAAREAAIKTPPDTSTLLAGKRTADGSEFEKRTADGSEFESPKKKAKVE

SEQ ID NO: 1837 - protein, 2105 aa, synthetic construct
MPAAKRVKLDGGDKKYSIGLDIGTNSVGWAVITDEYKVPSKKFKVLGNTDRHSIKKNLIGALLFDSGETAEATRLKRTARRRYTRRKNRICYLQEIFSNEMAKVDDSFFHRLEESFLVEEDKKHERHPIFGNIVDEVAYHEKYPTIYHLRKKLVDSTDKADLRLIYLALAHMIKFRGHFLIEGDLNPDNSDVDKLFIQLVQTYNQLFEENPINASGVDAKAILSARLSKSRRLENLIAQLPGEKKNGLFGNLIALSLGLTPNFKSNFDLAEDAKLQLSKDTYDDDLDNLLAQIGDQYADLFLAAKNLSDAILLSDILRVNTEITKAPLSASMIKRYDEHHQDLTLLKALVRQQLPEKYKEIFFDQSKNGYAGYIDGGASQEEFYKFIKPILEKMDGTEELLVKLNREDLLRKQRTFDNGSIPHQIHLGELHAILRRQEDFYPFLKDNREKIEKILTFRIPYYVGPLARGNSRFAWMTRKSEETITPWNFEEVVDKGASAQSFIERMTNFDKNLPNEKVLPKHSLLYEYFTVYNELTKVKYVTEGMRKPAFLSGEQKKAIVDLLFKTNRKVTVKQLKEDYFKKIECFDSVEISGVEDRFNASLGTYHDLLKIIKDKDFLDNEENEDILEDIVLTLTLFEDREMIEERLKTYAHLFDDKVMKQLKRRRYTGWGRLSRKLINGIRDKQSGKTILDFLKSDGFANRNFMQLIHDDSLTFKEDIQKAQVSGQGDSLHEHIANLAGSPAIKKGILQTVKVVDELVKVMGRHKPENIVIEMARENQTTQKGQKNSRERMKRIEEGIKELGSQILKEHPVENTQLQNEKLYLYYLQNGRDMYVDQELDINRLSDYDVDHIVPQSFLKDDSIDNKVLTRSDKARGKSDNVPSEEVVKKMKNYWRQLLNAKLITQRKFDNLTKAERGGLSELDKAGFIKRQLVETRQITKHVAQILDSRMNTKYDENDKLIREVKVITLKSKLVSDFRKDFQFYKVREINNYHHAHDAYLNAVVGTALIKKYPKLESEFVYGDYKVYDVRKMIAKSEQEIGKATAKYFFYSNIMNFFKTEITLANGEIRKRPLIETNGETGEIVWDKGRDFATVRKVLSMPQVNIVKKTEVQTGGFSKESILPKRNSDKLIARKKDWDPKKYGGFDSPTVAYSVLVVAKVEKGKSKKLKSVKELLGITIMERSSFEKNPIDFLEAKGYKEVKKDLIIKLPKYSLFELENGRKRMLASAGELQKGNELALPSKYVNFLYLASHYEKLKGSPEDNEQKQLFVEQHKHYLDEIIEQISEFSKRVILADANLDKVLSAYNKHRDKPIREQAENIIHLFTLTNLGAPAAFKYFDTTIDRKRYTSTKEVLDATLIHQSITGLYETRIDLSQLGGDGGEAAAKEAAAKEAAAKEAAAKGGTLNLEDEYRLYETSAEPEVSPGSTWLSDFPQAWAETGGMGLAVRQAPLIIPLKATSTPVSIKQYPMSQEAKLGIKPHIQRLLDQGILVPCQSPWNTPLLPVKKPGTNDYRPVQDLREVNKRVEDIHPTVPNPYNLLSGLPPSHRWYTVLDLKDAFFCLRLHPTSQPLFAFEWRDPGMGISGQLTWTRLPQGFKNSPTLFDEALHRDLADFRIQHPDLILLQYVDDILLAATSELDCQQGTRALLLTLGNLGYRASAKKAQLCQKQVKYLGYLLKEGQRWLTEARKETVMGQPTPKTPRQLREFLGTAGFCRLWIPGFAEMAAPLYPLTKTGTLFNWGPDQQKAYQEIKQALLTAPALGLPDLTKPFELFVDEKQGYAKGVLTQKLGPWRRPVAYLSKKLDPVAAGWPPCLRMVAAIAVLRKDAGKLTMGQPLVILAPHAVEALVKQPPDRWLSNARMTHYQAMLLDTDRVQFGPVVALNPATLLPLPEEGAPHDCLEILAETHGTRPDLTDQPIPDADHTWYTDGSSFLQEGQRKAGAAVTTETEVIWARALPAGTSAQRAELIALTQALKMAEGKRLNVYTDSRYAFATAHIHGEIYRRRGLLTSEGREIKNKSEILALLKALFLPKRLSIIHCLGHQKGDSAEARGNRLADQAAREAAIKTPPDTSTLLAGKRTADGSEFEKRTADGSEFESPKKKAKVE

SEQ ID NO: 1838 - protein, 2094 aa, synthetic construct
MPAAKRVKLDGGDKKYSIGLDIGTNSVGWAVITDEYKVPSKKFKVLGNTDRHSIKKNLIGALLFDSGETAEATRLKRTARRRYTRRKNRICYLQEIFSNEMAKVDDSFFHRLEESFLVEEDKKHERHPIFGNIVDEVAYHEKYPTIYHLRKKLVDSTDKADLRLIYLALAHMIKFRGHFLIEGDLNPDNSDVDKLFIQLVQTYNQLFEENPINASGVDAKAILSARLSKSRRLENLIAQLPGEKKNGLFGNLIALSLGLTPNFKSNFDLAEDAKLQLSKDTYDDDLDNLLAQIGDQYADLFLAAKNLSDAILLSDILRVNTEITKAPLSASMIKRYDEHHQDLTLLKALVRQQLPEKYKEIFFDQSKNGYAGYIDGGASQEEFYKFIKPILEKMDGTEELLVKLNREDLLRKQRTFDNGSIPHQIHLGELHAILRRQEDFYPFLKDNREKIEKILTFRIPYYVGPLARGNSRFAWMTRKSEETITPWNFEEVVDKGASAQSFIERMTNFDKNLPNEKVLPKHSLLYEYFTVYNELTKVKYVTEGMRKPAFLSGEQKKAIVDLLFKTNRKVTVKQLKEDYFKKIECFDSVEISGVEDRFNASLGTYHDLLKIIKDKDFLDNEENEDILEDIVLTLTLFEDREMIEERLKTYAHLFDDKVMKQLKRRRYTGWGRLSRKLINGIRDKQSGKTILDFLKSDGFANRNFMQLIHDDSLTFKEDIQKAQVSGQGDSLHEHIANLAGSPAIKKGILQTVKVVDELVKVMGRHKPENIVIEMARENQTTQKGQKNSRERMKRIEEGIKELGSQILKEHPVENTQLQNEKLYLYYLQNGRDMYVDQELDINRLSDYDVDHIVPQSFLKDDSIDNKVLTRSDKARGKSDNVPSEEVVKKMKNYWRQLLNAKLITQRKFDNLTKAERGGLSELDKAGFIKRQLVETRQITKHVAQILDSRMNTKYDENDKLIREVKVITLKSKLVSDFRKDFQFYKVREINNYHHAHDAYLNAVVGTALIKKYPKLESEFVYGDYKVYDVRKMIAKSEQEIGKATAKYFFYSNIMNFFKTEITLANGEIRKRPLIETNGETGEIVWDKGRDFATVRKVLSMPQVNIVKKTEVQTGGFSKESILPKRNSDKLIARKKDWDPKKYGGFDSPTVAYSVLVVAKVEKGKSKKLKSVKELLGITIMERSSFEKNPIDFLEAKGYKEVKKDLIIKLPKYSLFELENGRKRMLASAGELQKGNELALPSKYVNFLYLASHYEKLKGSPEDNEQKQLFVEQHKHYLDEIIEQISEFSKRVILADANLDKVLSAYNKHRDKPIREQAENIIHLFTLTNLGAPAAFKYFDTTIDRKRYTSTKEVLDATLIHQSITGLYETRIDLSQLGGDGGGSSGGGPAPGGTLNLEDEYRLYETSAEPEVSPGSTWLSDFPQAWAETGGMGLAVRQAPLIIPLKATSTPVSIKQYPMSQEAKLGIKPHIQRLLDQGILVPCQSPWNTPLLPVKKPGTNDYRPVQDLREVNKRVEDIHPTVPNPYNLLSGLPPSHRWYTVLDLKDAFFCLRLHPTSQPLFAFEWRDPGMGISGQLTWTRLPQGFKNSPTLFDEALHRDLADFRIQHPDLILLQYVDDILLAATSELDCQQGTRALLLTLGNLGYRASAKKAQLCQKQVKYLGYLLKEGQRWLTEARKETVMGQPTPKTPRQLREFLGTAGFCRLWIPGFAEMAAPLYPLTKTGTLFNWGPDQQKAYQEIKQALLTAPALGLPDLTKPFELFVDEKQGYAKGVLTQKLGPWRRPVAYLSKKLDPVAAGWPPCLRMVAAIAVLRKDAGKLTMGQPLVILAPHAVEALVKQPPDRWLSNARMTHYQAMLLDTDRVQFGPVVALNPATLLPLPEEGAPHDCLEILAETHGTRPDLTDQPIPDADHTWYTDGSSFLQEGQRKAGAAVTTETEVIWARALPAGTSAQRAELIALTQALKMAEGKRLNVYTDSRYAFATAHIHGEIYRRRGLLTSEGREIKNKSEILALLKALFLPKRLSIIHCLGHQKGDSAEARGNRLADQAAREAAIKTPPDTSTLLAGKRTADGSEFEKRTADGSEFESPKKKAKVE

SEQ ID NO: 1839 - protein, 2096 aa, synthetic construct
MPAAKRVKLDGGDKKYSIGLDIGTNSVGWAVITDEYKVPSKKFKVLGNTDRHSIKKNLIGALLFDSGETAEATRLKRTARRRYTRRKNRICYLQEIFSNEMAKVDDSFFHRLEESFLVEEDKKHERHPIFGNIVDEVAYHEKYPTIYHLRKKLVDSTDKADLRLIYLALAHMIKFRGHFLIEGDLNPDNSDVDKLFIQLVQTYNQLFEENPINASGVDAKAILSARLSKSRRLENLIAQLPGEKKNGLFGNLIALSLGLTPNFKSNFDLAEDAKLQLSKDTYDDDLDNLLAQIGDQYADLFLAAKNLSDAILLSDILRVNTEITKAPLSASMIKRYDEHHQDLTLLKALVRQQLPEKYKEIFFDQSKNGYAGYIDGGASQEEFYKFIKPILEKMDGTEELLVKLNREDLLRKQRTFDNGSIPHQIHLGELHAILRRQEDFYPFLKDNREKIEKILTFRIPYYVGPLARGNSRFAWMTRKSEETITPWNFEEVVDKGASAQSFIERMTNFDKNLPNEKVLPKHSLLYEYFTVYNELTKVKYVTEGMRKPAFLSGEQKKAIVDLLFKTNRKVTVKQLKEDYFKKIECFDSVEISGVEDRFNASLGTYHDLLKIIKDKDFLDNEENEDILEDIVLTLTLFEDREMIEERLKTYAHLFDDKVMKQLKRRRYTGWGRLSRKLINGIRDKQSGKTILDFLKSDGFANRNFMQLIHDDSLTFKEDIQKAQVSGQGDSLHEHIANLAGSPAIKKGILQTVKVVDELVKVMGRHKPENIVIEMARENQTTQKGQKNSRERMKRIEEGIKELGSQILKEHPVENTQLQNEKLYLYYLQNGRDMYVDQELDINRLSDYDVDHIVPQSFLKDDSIDNKVLTRSDKARGKSDNVPSEEVVKKMKNYWRQLLNAKLITQRKFDNLTKAERGGLSELDKAGFIKRQLVETRQITKHVAQILDSRMNTKYDENDKLIREVKVITLKSKLVSDFRKDFQFYKVREINNYHHAHDAYLNAVVGTALIKKYPKLESEFVYGDYKVYDVRKMIAKSEQEIGKATAKYFFYSNIMNFFKTEITLANGEIRKRPLIETNGETGEIVWDKGRDFATVRKVLSMPQVNIVKKTEVQTGGFSKESILPKRNSDKLIARKKDWDPKKYGGFDSPTVAYSVLVVAKVEKGKSKKLKSVKELLGITIMERSSFEKNPIDFLEAKGYKEVKKDLIIKLPKYSLFELENGRKRMLASAGELQKGNELALPSKYVNFLYLASHYEKLKGSPEDNEQKQLFVEQHKHYLDEIIEQISEFSKRVILADANLDKVLSAYNKHRDKPIREQAENIIHLFTLTNLGAPAAFKYFDTTIDRKRYTSTKEVLDATLIHQSITGLYETRIDLSQLGGDGGEAAAKGGGPAPGGTLNLEDEYRLYETSAEPEVSPGSTWLSDFPQAWAETGGMGLAVRQAPLIIPLKATSTPVSIKQYPMSQEAKLGIKPHIQRLLDQGILVPCQSPWNTPLLPVKKPGTNDYRPVQDLREVNKRVEDIHPTVPNPYNLLSGLPPSHRWYTVLDLKDAFFCLRLHPTSQPLFAFEWRDPGMGISGQLTWTRLPQGFKNSPTLFDEALHRDLADFRIQHPDLILLQYVDDILLAATSELDCQQGTRALLLTLGNLGYRASAKKAQLCQKQVKYLGYLLKEGQRWLTEARKETVMGQPTPKTPRQLREFLGTAGFCRLWIPGFAEMAAPLYPLTKTGTLFNWGPDQQKAYQEIKQALLTAPALGLPDLTKPFELFVDEKQGYAKGVLTQKLGPWRRPVAYLSKKLDPVAAGWPPCLRMVAAIAVLRKDAGKLTMGQPLVILAPHAVEALVKQPPDRWLSNARMTHYQAMLLDTDRVQFGPVVALNPATLLPLPEEGAPHDCLEILAETHGTRPDLTDQPIPDADHTWYTDGSSFLQEGQRKAGAAVTTETEVIWARALPAGTSAQRAELIALTQALKMAEGKRLNVYTDSRYAFATAHIHGEIYRRRGLLTSEGREIKNKSEILALLKALFLPKRLSIIHCLGHQKGDSAEARGNRLADQAAREAAIKTPPDTSTLLAGKRTADGSEFEKRTADGSEFESPKKKAKVE

SEQ ID NO: 1840 - protein, 2096 aa, synthetic construct
MPAAKRVKLDGGDKKYSIGLDIGTNSVGWAVITDEYKVPSKKFKVLGNTDRHSIKKNLIGALLFDSGETAEATRLKRTARRRYTRRKNRICYLQEIFSNEMAKVDDSFFHRLEESFLVEEDKKHERHPIFGNIVDEVAYHEKYPTIYHLRKKLVDSTDKADLRLIYLALAHMIKFRGHFLIEGDLNPDNSDVDKLFIQLVQTYNQLFEENPINASGVDAKAILSARLSKSRRLENLIAQLPGEKKNGLFGNLIALSLGLTPNFKSNFDLAEDAKLQLSKDTYDDDLDNLLAQIGDQYADLFLAAKNLSDAILLSDILRVNTEITKAPLSASMIKRYDEHHQDLTLLKALVRQQLPEKYKEIFFDQSKNGYAGYIDGGASQEEFYKFIKPILEKMDGTEELLVKLNREDLLRKQRTFDNGSIPHQIHLGELHAILRRQEDFYPFLKDNREKIEKILTFRIPYYVGPLARGNSRFAWMTRKSEETITPWNFEEVVDKGASAQSFIERMTNFDKNLPNEKVLPKHSLLYEYFTVYNELTKVKYVTEGMRKPAFLSGEQKKAIVDLLFKTNRKVTVKQLKEDYFKKIECFDSVEISGVEDRFNASLGTYHDLLKIIKDKDFLDNEENEDILEDIVLTLTLFEDREMIEERLKTYAHLFDDKVMKQLKRRRYTGWGRLSRKLINGIRDKQSGKTILDFLKSDGFANRNFMQLIHDDSLTFKEDIQKAQVSGQGDSLHEHIANLAGSPAIKKGILQTVKVVDELVKVMGRHKPENIVIEMARENQTTQKGQKNSRERMKRIEEGIKELGSQILKEHPVENTQLQNEKLYLYYLQNGRDMYVDQELDINRLSDYDVDHIVPQSFLKDDSIDNKVLTRSDKARGKSDNVPSEEVVKKMKNYWRQLLNAKLITQRKFDNLTKAERGGLSELDKAGFIKRQLVETRQITKHVAQILDSRMNTKYDENDKLIREVKVITLKSKLVSDFRKDFQFYKVREINNYHHAHDAYLNAVVGTALIKKYPKLESEFVYGDYKVYDVRKMIAKSEQEIGKATAKYFFYSNIMNFFKTEITLANGEIRKRPLIETNGETGEIVWDKGRDFATVRKVLSMPQVNIVKKTEVQTGGFSKESILPKRNSDKLIARKKDWDPKKYGGFDSPTVAYSVLVVAKVEKGKSKKLKSVKELLGITIMERSSFEKNPIDFLEAKGYKEVKKDLIIKLPKYSLFELENGRKRMLASAGELQKGNELALPSKYVNFLYLASHYEKLKGSPEDNEQKQLFVEQHKHYLDEIIEQISEFSKRVILADANLDKVLSAYNKHRDKPIREQAENIIHLFTLTNLGAPAAFKYFDTTIDRKRYTSTKEVLDATLIHQSITGLYETRIDLSQLGGDGGGGGPAPEAAAKGGTLNLEDEYRLYETSAEPEVSPGSTWLSDFPQAWAETGGMGLAVRQAPLIIPLKATSTPVSIKQYPMSQEAKLGIKPHIQRLLDQGILVPCQSPWNTPLLPVKKPGTNDYRPVQDLREVNKRVEDIHPTVPNPYNLLSGLPPSHRWYTVLDLKDAFFCLRLHPTSQPLFAFEWRDPGMGISGQLTWTRLPQGFKNSPTLFDEALHRDLADFRIQHPDLILLQYVDDILLAATSELDCQQGTRALLLTLGNLGYRASAKKAQLCQKQVKYLGYLLKEGQRWLTEARKETVMGQPTPKTPRQLREFLGTAGFCRLWIPGFAEMAAPLYPLTKTGTLFNWGPDQQKAYQEIKQALLTAPALGLPDLTKPFELFVDEKQGYAKGVLTQKLGPWRRPVAYLSKKLDPVAAGWPPCLRMVAAIAVLRKDAGKLTMGQPLVILAPHAVEALVKQPPDRWLSNARMTHYQAMLLDTDRVQFGPVVALNPATLLPLPEEGAPHDCLEILAETHGTRPDLTDQPIPDADHTWYTDGSSFLQEGQRKAGAAVTTETEVIWARALPAGTSAQRAELIALTQALKMAEGKRLNVYTDSRYAFATAHIHGEIYRRRGLLTSEGREIKNKSEILALLKALFLPKRLSIIHCLGHQKGDSAEARGNRLADQAAREAAIKTPPDTSTLLAGKRTADGSEFEKRTADGSEFESPKKKAKVE

SEQ ID NO: 1841 - protein, 2096 aa, synthetic construct
MPAAKRVKLDGGDKKYSIGLDIGTNSVGWAVITDEYKVPSKKFKVLGNTDRHSIKKNLIGALLFDSGETAEATRLKRTARRRYTRRKNRICYLQEIFSNEMAKVDDSFFHRLEESFLVEEDKKHERHPIFGNIVDEVAYHEKYPTIYHLRKKLVDSTDKADLRLIYLALAHMIKFRGHFLIEGDLNPDNSDVDKLFIQLVQTYNQLFEENPINASGVDAKAILSARLSKSRRLENLIAQLPGEKKNGLFGNLIALSLGLTPNFKSNFDLAEDAKLQLSKDTYDDDLDNLLAQIGDQYADLFLAAKNLSDAILLSDILRVNTEITKAPLSASMIKRYDEHHQDLTLLKALVRQQLPEKYKEIFFDQSKNGYAGYIDGGASQEEFYKFIKPILEKMDGTEELLVKLNREDLLRKQRTFDNGSIPHQIHLGELHAILRRQEDFYPFLKDNREKIEKILTFRIPYYVGPLARGNSRFAWMTRKSEETITPWNFEEVVDKGASAQSFIERMTNFDKNLPNEKVLPKHSLLYEYFTVYNELTKVKYVTEGMRKPAFLSGEQKKAIVDLLFKTNRKVTVKQLKEDYFKKIECFDSVEISGVEDRFNASLGTYHDLLKIIKDKDFLDNEENEDILEDIVLTLTLFEDREMIEERLKTYAHLFDDKVMKQLKRRRYTGWGRLSRKLINGIRDKQSGKTILDFLKSDGFANRNFMQLIHDDSLTFKEDIQKAQVSGQGDSLHEHIANLAGSPAIKKGILQTVKVVDELVKVMGRHKPENIVIEMARENQTTQKGQKNSRERMKRIEEGIKELGSQILKEHPVENTQLQNEKLYLYYLQNGRDMYVDQELDINRLSDYDVDHIVPQSFLKDDSIDNKVLTRSDKARGKSDNVPSEEVVKKMKNYWRQLLNAKLITQRKFDNLTKAERGGLSELDKAGFIKRQLVETRQITKHVAQILDSRMNTKYDENDKLIREVKVITLKSKLVSDFRKDFQFYKVREINNYHHAHDAYLNAVVGTALIKKYPKLESEFVYGDYKVYDVRKMIAKSEQEIGKATAKYFFYSNIMNFFKTEITLANGEIRKRPLIETNGETGEIVWDKGRDFATVRKVLSMPQVNIVKKTEVQTGGFSKESILPKRNSDKLIARKKDWDPKKYGGFDSPTVAYSVLVVAKVEKGKSKKLKSVKELLGITIMERSSFEKNPIDFLEAKGYKEVKKDLIIKLPKYSLFELENGRKRMLASAGELQKGNELALPSKYVNFLYLASHYEKLKGSPEDNEQKQLFVEQHKHYLDEIIEQISEFSKRVILADANLDKVLSAYNKHRDKPIREQAENIIHLFTLTNLGAPAAFKYFDTTIDRKRYTSTKEVLDATLIHQSITGLYETRIDLSQLGGDGGEAAAKGGGGGSGGTLNLEDEYRLYETSAEPEVSPGSTWLSDFPQAWAETGGMGLAVRQAPLIIPLKATSTPVSIKQYPMSQEAKLGIKPHIQRLLDQGILVPCQSPWNTPLLPVKKPGTNDYRPVQDLREVNKRVEDIHPTVPNPYNLLSGLPPSHRWYTVLDLKDAFFCLRLHPTSQPLFAFEWRDPGMGISGQLTWTRLPQGFKNSPTLFDEALHRDLADFRIQHPDLILLQYVDDILLAATSELDCQQGTRALLLTLGNLGYRASAKKAQLCQKQVKYLGYLLKEGQRWLTEARKETVMGQPTPKTPRQLREFLGTAGFCRLWIPGFAEMAAPLYPLTKTGTLFNWGPDQQKAYQEIKQALLTAPALGLPDLTKPFELFVDEKQGYAKGVLTQKLGPWRRPVAYLSKKLDPVAAGWPPCLRMVAAIAVLRKDAGKLTMGQPLVILAPHAVEALVKQPPDRWLSNARMTHYQAMLLDTDRVQFGPVVALNPATLLPLPEEGAPHDCLEILAETHGTRPDLTDQPIPDADHTWYTDGSSFLQEGQRKAGAAVTTETEVIWARALPAGTSAQRAELIALTQALKMAEGKRLNVYTDSRYAFATAHIHGEIYRRRGLLTSEGREIKNKSEILALLKALFLPKRLSIIHCLGHQKGDSAEARGNRLADQAAREAAIKTPPDTSTLLAGKRTADGSEFEKRTADGSEFESPKKKAKVE

SEQ ID NO: 1842 - protein, 2096 aa, synthetic construct
MPAAKRVKLDGGDKKYSIGLDIGTNSVGWAVITDEYKVPSKKFKVLGNTDRHSIKKNLIGALLFDSGETAEATRLKRTARRRYTRRKNRICYLQEIFSNEMAKVDDSFFHRLEESFLVEEDKKHERHPIFGNIVDEVAYHEKYPTIYHLRKKLVDSTDKADLRLIYLALAHMIKFRGHFLIEGDLNPDNSDVDKLFIQLVQTYNQLFEENPINASGVDAKAILSARLSKSRRLENLIAQLPGEKKNGLFGNLIALSLGLTPNFKSNFDLAEDAKLQLSKDTYDDDLDNLLAQIGDQYADLFLAAKNLSDAILLSDILRVNTEITKAPLSASMIKRYDEHHQDLTLLKALVRQQLPEKYKEIFFDQSKNGYAGYIDGGASQEEFYKFIKPILEKMDGTEELLVKLNREDLLRKQRTFDNGSIPHQIHLGELHAILRRQEDFYPFLKDNREKIEKILTFRIPYYVGPLARGNSRFAWMTRKSEETITPWNFEEVVDKGASAQSFIERMTNFDKNLPNEKVLPKHSLLYEYFTVYNELTKVKYVTEGMRKPAFLSGEQKKAIVDLLFKTNRKVTVKQLKEDYFKKIECFDSVEISGVEDRFNASLGTYHDLLKIIKDKDFLDNEENEDILEDIVLTLTLFEDREMIEERLKTYAHLFDDKVMKQLKRRRYTGWGRLSRKLINGIRDKQSGKTILDFLKSDGFANRNFMQLIHDDSLTFKEDIQKAQVSGQGDSLHEHIANLAGSPAIKKGILQTVKVVDELVKVMGRHKPENIVIEMARENQTTQKGQKNSRERMKRIEEGIKELGSQILKEHPVENTQLQNEKLYLYYLQNGRDMYVDQELDINRLSDYDVDHIVPQSFLKDDSIDNKVLTRSDKARGKSDNVPSEEVVKKMKNYWRQLLNAKLITQRKFDNLTKAERGGLSELDKAGFIKRQLVETRQITKHVAQILDSRMNTKYDENDKLIREVKVITLKSKLVSDFRKDFQFYKVREINNYHHAHDAYLNAVVGTALIKKYPKLESEFVYGDYKVYDVRKMIAKSEQEIGKATAKYFFYSNIMNFFKTEITLANGEIRKRPLIETNGETGEIVWDKGRDFATVRKVLSMPQVNIVKKTEVQTGGFSKESILPKRNSDKLIARKKDWDPKKYGGFDSPTVAYSVLVVAKVEKGKSKKLKSVKELLGITIMERSSFEKNPIDFLEAKGYKEVKKDLIIKLPKYSLFELENGRKRMLASAGELQKGNELALPSKYVNFLYLASHYEKLKGSPEDNEQKQLFVEQHKHYLDEIIEQISEFSKRVILADANLDKVLSAYNKHRDKPIREQAENIIHLFTLTNLGAPAAFKYFDTTIDRKRYTSTKEVLDATLIHQSITGLYETRIDLSQLGGDGGPAPEAAAKGSSGGTLNLEDEYRLYETSAEPEVSPGSTWLSDFPQAWAETGGMGLAVRQAPLIIPLKATSTPVSIKQYPMSQEAKLGIKPHIQRLLDQGILVPCQSPWNTPLLPVKKPGTNDYRPVQDLREVNKRVEDIHPTVPNPYNLLSGLPPSHRWYTVLDLKDAFFCLRLHPTSQPLFAFEWRDPGMGISGQLTWTRLPQGFKNSPTLFNEALHRDLADFRIQHPDLILLQYVDDILLAATSELDCQQGTRALLLTLGNLGYRASAKKAQLCQKQVKYLGYLLKEGQRWLTEARKETVMGQPTPKTPRQLREFLGTAGFCRLWIPGFAEMAAPLYPLTKPGTLFNWGPDQQKAYQEIKQALLTAPALGLPDLTKPFELFVDEKQGYAKGVLTQKLGPWRRPVAYLSKKLDPVAAGWPPCLRMVAAIAVLRKDAGKLTMGQPLVILAPHAVEALVKQPPDRWLSNARMTHYQAMLLDTDRVQFGPVVALNPATLLPLPEEGAPHDCLEILAETHGTRPDLTDQPIPDADHTWYTDGSSFLQEGQRKAGAAVTTETEVIWARALPAGTSAQRAELIALTQALKMAEGKRLNVYTDSRYAFATAHIHGEIYRRRGWLTSEGREIKNKSEILALLKALFLPKRLSIIHCLGHQKGDSAEARGNRLADQAAREAAIKTPPDTSTLLAGKRTADGSEFEKRTADGSEFESPKKKAKVE

SEQ ID NO: 1843 - protein, 2093 aa, synthetic construct
MPAAKRVKLDGGDKKYSIGLDIGTNSVGWAVITDEYKVPSKKFKVLGNTDRHSIKKNLIGALLFDSGETAEATRLKRTARRRYTRRKNRICYLQEIFSNEMAKVDDSFFHRLEESFLVEEDKKHERHPIFGNIVDEVAYHEKYPTIYHLRKKLVDSTDKADLRLIYLALAHMIKFRGHFLIEGDLNPDNSDVDKLFIQLVQTYNQLFEENPINASGVDAKAILSARLSKSRRLENLIAQLPGEKKNGLFGNLIALSLGLTPNFKSNFDLAEDAKLQLSKDTYDDDLDNLLAQIGDQYADLFLAAKNLSDAILLSDILRVNTEITKAPLSASMIKRYDEHHQDLTLLKALVRQQLPEKYKEIFFDQSKNGYAGYIDGGASQEEFYKFIKPILEKMDGTEELLVKLNREDLLRKQRTFDNGSIPHQIHLGELHAILRRQEDFYPFLKDNREKIEKILTFRIPYYVGPLARGNSRFAWMTRKSEETITPWNFEEVVDKGASAQSFIERMTNFDKNLPNEKVLPKHSLLYEYFTVYNELTKVKYVTEGMRKPAFLSGEQKKAIVDLLFKTNRKVTVKQLKEDYFKKIECFDSVEISGVEDRFNASLGTYHDLLKIIKDKDFLDNEENEDILEDIVLTLTLFEDREMIEERLKTYAHLFDDKVMKQLKRRRYTGWGRLSRKLINGIRDKQSGKTILDFLKSDGFANRNFMQLIHDDSLTFKEDIQKAQVSGQGDSLHEHIANLAGSPAIKKGILQTVKVVDELVKVMGRHKPENIVIEMARENQTTQKGQKNSRERMKRIEEGIKELGSQILKEHPVENTQLQNEKLYLYYLQNGRDMYVDQELDINRLSDYDVDHIVPQSFLKDDSIDNKVLTRSDKARGKSDNVPSEEVVKKMKNYWRQLLNAKLITQRKFDNLTKAERGGLSELDKAGFIKRQLVETRQITKHVAQILDSRMNTKYDENDKLIREVKVITLKSKLVSDFRKDFQFYKVREINNYHHAHDAYLNAVVGTALIKKYPKLESEFVYGDYKVYDVRKMIAKSEQEIGKATAKYFFYSNIMNFFKTEITLANGEIRKRPLIETNGETGEIVWDKGRDFATVRKVLSMPQVNIVKKTEVQTGGFSKESILPKRNSDKLIARKKDWDPKKYGGFDSPTVAYSVLVVAKVEKGKSKKLKSVKELLGITIMERSSFEKNPIDFLEAKGYKEVKKDLIIKLPKYSLFELENGRKRMLASAGELQKGNELALPSKYVNFLYLASHYEKLKGSPEDNEQKQLFVEQHKHYLDEIIEQISEFSKRVILADANLDKVLSAYNKHRDKPIREQAENIIHLFTLTNLGAPAAFKYFDTTIDRKRYTSTKEVLDATLIHQSITGLYETRIDLSQLGGDGGPAPEAAAKGGTLNLEDEYRLYETSAEPEVSPGSTWLSDFPQAWAETGGMGLAVRQAPLIIPLKATSTPVSIKQYPMSQEAKLGIKPHIQRLLDQGILVPCQSPWNTPLLPVKKPGTNDYRPVQDLREVNKRVEDIHPTVPNPYNLLSGLPPSHRWYTVLDLKDAFFCLRLHPTSQPLFAFEWRDPGMGISGQLTWTRLPQGFKNSPTLFNEALHRDLADFRIQHPDLILLQYVDDILLAATSELDCQQGTRALLLTLGNLGYRASAKKAQLCQKQVKYLGYLLKEGQRWLTEARKETVMGQPTPKTPRQLREFLGTAGFCRLWIPGFAEMAAPLYPLTKPGTLFNWGPDQQKAYQEIKQALLTAPALGLPDLTKPFELFVDEKQGYAKGVLTQKLGPWRRPVAYLSKKLDPVAAGWPPCLRMVAAIAVLRKDAGKLTMGQPLVILAPHAVEALVKQPPDRWLSNARMTHYQAMLLDTDRVQFGPVVALNPATLLPLPEEGAPHDCLEILAETHGTRPDLTDQPIPDADHTWYTDGSSFLQEGQRKAGAAVTTETEVIWARALPAGTSAQRAELIALTQALKMAEGKRLNVYTDSRYAFATAHIHGEIYRRRGWLTSEGREIKNKSEILALLKALFLPKRLSIIHCLGHQKGDSAEARGNRLADQAAREAAIKTPPDTSTLLAGKRTADGSEFEKRTADGSEFESPKKKAKVE

SEQ ID NO: 1844 - protein, 2098 aa, synthetic construct
MPAAKRVKLDGGDKKYSIGLDIGTNSVGWAVITDEYKVPSKKFKVLGNTDRHSIKKNLIGALLFDSGETAEATRLKRTARRRYTRRKNRICYLQEIFSNEMAKVDDSFFHRLEESFLVEEDKKHERHPIFGNIVDEVAYHEKYPTIYHLRKKLVDSTDKADLRLIYLALAHMIKFRGHFLIEGDLNPDNSDVDKLFIQLVQTYNQLFEENPINASGVDAKAILSARLSKSRRLENLIAQLPGEKKNGLFGNLIALSLGLTPNFKSNFDLAEDAKLQLSKDTYDDDLDNLLAQIGDQYADLFLAAKNLSDAILLSDILRVNTEITKAPLSASMIKRYDEHHQDLTLLKALVRQQLPEKYKEIFFDQSKNGYAGYIDGGASQEEFYKFIKPILEKMDGTEELLVKLNREDLLRKQRTFDNGSIPHQIHLGELHAILRRQEDFYPFLKDNREKIEKILTFRIPYYVGPLARGNSRFAWMTRKSEETITPWNFEEVVDKGASAQSFIERMTNFDKNLPNEKVLPKHSLLYEYFTVYNELTKVKYVTEGMRKPAFLSGEQKKAIVDLLFKTNRKVTVKQLKEDYFKKIECFDSVEISGVEDRFNASLGTYHDLLKIIKDKDFLDNEENEDILEDIVLTLTLFEDREMIEERLKTYAHLFDDKVMKQLKRRRYTGWGRLSRKLINGIRDKQSGKTILDFLKSDGFANRNFMQLIHDDSLTFKEDIQKAQVSGQGDSLHEHIANLAGSPAIKKGILQTVKVVDELVKVMGRHKPENIVIEMARENQTTQKGQKNSRERMKRIEEGIKELGSQILKEHPVENTQLQNEKLYLYYLQNGRDMYVDQELDINRLSDYDVDHIVPQSFLKDDSIDNKVLTRSDKARGKSDNVPSEEVVKKMKNYWRQLLNAKLITQRKFDNLTKAERGGLSELDKAGFIKRQLVETRQITKHVAQILDSRMNTKYDENDKLIREVKVITLKSKLVSDFRKDFQFYKVREINNYHHAHDAYLNAVVGTALIKKYPKLESEFVYGDYKVYDVRKMIAKSEQEIGKATAKYFFYSNIMNFFKTEITLANGEIRKRPLIETNGETGEIVWDKGRDFATVRKVLSMPQVNIVKKTEVQTGGFSKESILPKRNSDKLIARKKDWDPKKYGGFDSPTVAYSVLVVAKVEKGKSKKLKSVKELLGITIMERSSFEKNPIDFLEAKGYKEVKKDLIIKLPKYSLFELENGRKRMLASAGELQKGNELALPSKYVNFLYLASHYEKLKGSPEDNEQKQLFVEQHKHYLDEIIEQISEFSKRVILADANLDKVLSAYNKHRDKPIREQAENIIHLFTLTNLGAPAAFKYFDTTIDRKRYTSTKEVLDATLIHQSITGLYETRIDLSQLGGDGGPAPAPAPAPAPAPGGTLNLEDEYRLYETSAEPEVSPGSTWLSDFPQAWAETGGMGLAVRQAPLIIPLKATSTPVSIKQYPMSQEAKLGIKPHIQRLLDQGILVPCQSPWNTPLLPVKKPGTNDYRPVQDLREVNKRVEDIHPTVPNPYNLLSGLPPSHRWYTVLDLKDAFFCLRLHPTSQPLFAFEWRDPGMGISGQLTWTRLPQGFKNSPTLFNEALHRDLADFRIQHPDLILLQYVDDILLAATSELDCQQGTRALLLTLGNLGYRASAKKAQLCQKQVKYLGYLLKEGQRWLTEARKETVMGQPTPKTPRQLREFLGTAGFCRLWIPGFAEMAAPLYPLTKPGTLFNWGPDQQKAYQEIKQALLTAPALGLPDLTKPFELFVDEKQGYAKGVLTQKLGPWRRPVAYLSKKLDPVAAGWPPCLRMVAAIAVLRKDAGKLTMGQPLVILAPHAVEALVKQPPDRWLSNARMTHYQAMLLDTDRVQFGPVVALNPATLLPLPEEGAPHDCLEILAETHGTRPDLTDQPIPDADHTWYTDGSSFLQEGQRKAGAAVTTETEVIWARALPAGTSAQRAELIALTQALKMAEGKRLNVYTDSRYAFATAHIHGEIYRRRGWLTSEGREIKNKSEILALLKALFLPKRLSIIHCLGHQKGDSAEARGNRLADQAAREAAIKTPPDTSTLLAGKRTADGSEFEKRTADGSEFESPKKKAKVE

SEQ ID NO: 1845 - protein, 2096 aa, synthetic construct
MPAAKRVKLDGGDKKYSIGLDIGTNSVGWAVITDEYKVPSKKFKVLGNTDRHSIKKNLIGALLFDSGETAEATRLKRTARRRYTRRKNRICYLQEIFSNEMAKVDDSFFHRLEESFLVEEDKKHERHPIFGNIVDEVAYHEKYPTIYHLRKKLVDSTDKADLRLIYLALAHMIKFRGHFLIEGDLNPDNSDVDKLFIQLVQTYNQLFEENPINASGVDAKAILSARLSKSRRLENLIAQLPGEKKNGLFGNLIALSLGLTPNFKSNFDLAEDAKLQLSKDTYDDDLDNLLAQIGDQYADLFLAAKNLSDAILLSDILRVNTEITKAPLSASMIKRYDEHHQDLTLLKALVRQQLPEKYKEIFFDQSKNGYAGYIDGGASQEEFYKFIKPILEKMDGTEELLVKLNREDLLRKQRTFDNGSIPHQIHLGELHAILRRQEDFYPFLKDNREKIEKILTFRIPYYVGPLARGNSRFAWMTRKSEETITPWNFEEVVDKGASAQSFIERMTNFDKNLPNEKVLPKHSLLYEYFTVYNELTKVKYVTEGMRKPAFLSGEQKKAIVDLLFKTNRKVTVKQLKEDYFKKIECFDSVEISGVEDRFNASLGTYHDLLKIIKDKDFLDNEENEDILEDIVLTLTLFEDREMIEERLKTYAHLFDDKVMKQLKRRRYTGWGRLSRKLINGIRDKQSGKTILDFLKSDGFANRNFMQLIHDDSLTFKEDIQKAQVSGQGDSLHEHIANLAGSPAIKKGILQTVKVVDELVKVMGRHKPENIVIEMARENQTTQKGQKNSRERMKRIEEGIKELGSQILKEHPVENTQLQNEKLYLYYLQNGRDMYVDQELDINRLSDYDVDHIVPQSFLKDDSIDNKVLTRSDKARGKSDNVPSEEVVKKMKNYWRQLLNAKLITQRKFDNLTKAERGGLSELDKAGFIKRQLVETRQITKHVAQILDSRMNTKYDENDKLIREVKVITLKSKLVSDFRKDFQFYKVREINNYHHAHDAYLNAVVGTALIKKYPKLESEFVYGDYKVYDVRKMIAKSEQEIGKATAKYFFYSNIMNFFKTEITLANGEIRKRPLIETNGETGEIVWDKGRDFATVRKVLSMPQVNIVKKTEVQTGGFSKESILPKRNSDKLIARKKDWDPKKYGGFDSPTVAYSVLVVAKVEKGKSKKLKSVKELLGITIMERSSFEKNPIDFLEAKGYKEVKKDLIIKLPKYSLFELENGRKRMLASAGELQKGNELALPSKYVNFLYLASHYEKLKGSPEDNEQKQLFVEQHKHYLDEIIEQISEFSKRVILADANLDKVLSAYNKHRDKPIREQAENIIHLFTLTNLGAPAAFKYFDTTIDRKRYTSTKEVLDATLIHQSITGLYETRIDLSQLGGDGGGSSGGGEAAAKGGTLNLEDEYRLYETSAEPEVSPGSTWLSDFPQAWAETGGMGLAVRQAPLIIPLKATSTPVSIKQYPMSQEAKLGIKPHIQRLLDQGILVPCQSPWNTPLLPVKKPGTNDYRPVQDLREVNKRVEDIHPTVPNPYNLLSGLPPSHRWYTVLDLKDAFFCLRLHPTSQPLFAFEWRDPGMGISGQLTWTRLPQGFKNSPTLFNEALHRDLADFRIQHPDLILLQYVDDILLAATSELDCQQGTRALLLTLGNLGYRASAKKAQLCQKQVKYLGYLLKEGQRWLTEARKETVMGQPTPKTPRQLREFLGTAGFCRLWIPGFAEMAAPLYPLTKPGTLFNWGPDQQKAYQEIKQALLTAPALGLPDLTKPFELFVDEKQGYAKGVLTQKLGPWRRPVAYLSKKLDPVAAGWPPCLRMVAAIAVLRKDAGKLTMGQPLVILAPHAVEALVKQPPDRWLSNARMTHYQAMLLDTDRVQFGPVVALNPATLLPLPEEGAPHDCLEILAETHGTRPDLTDQPIPDADHTWYTDGSSFLQEGQRKAGAAVTTETEVIWARALPAGTSAQRAELIALTQALKMAEGKRLNVYTDSRYAFATAHIHGEIYRRRGWLTSEGREIKNKSEILALLKALFLPKRLSIIHCLGHQKGDSAEARGNRLADQAAREAAIKTPPDTSTLLAGKRTADGSEFEKRTADGSEFESPKKKAKVE

SEQ ID NO: 1846 - protein, 2096 aa, synthetic construct
MPAAKRVKLDGGDKKYSIGLDIGTNSVGWAVITDEYKVPSKKFKVLGNTDRHSIKKNLIGALLFDSGETAEATRLKRTARRRYTRRKNRICYLQEIFSNEMAKVDDSFFHRLEESFLVEEDKKHERHPIFGNIVDEVAYHEKYPTIYHLRKKLVDSTDKADLRLIYLALAHMIKFRGHFLIEGDLNPDNSDVDKLFIQLVQTYNQLFEENPINASGVDAKAILSARLSKSRRLENLIAQLPGEKKNGLFGNLIALSLGLTPNFKSNFDLAEDAKLQLSKDTYDDDLDNLLAQIGDQYADLFLAAKNLSDAILLSDILRVNTEITKAPLSASMIKRYDEHHQDLTLLKALVRQQLPEKYKEIFFDQSKNGYAGYIDGGASQEEFYKFIKPILEKMDGTEELLVKLNREDLLRKQRTFDNGSIPHQIHLGELHAILRRQEDFYPFLKDNREKIEKILTFRIPYYVGPLARGNSRFAWMTRKSEETITPWNFEEVVDKGASAQSFIERMTNFDKNLPNEKVLPKHSLLYEYFTVYNELTKVKYVTEGMRKPAFLSGEQKKAIVDLLFKTNRKVTVKQLKEDYFKKIECFDSVEISGVEDRFNASLGTYHDLLKIIKDKDFLDNEENEDILEDIVLTLTLFEDREMIEERLKTYAHLFDDKVMKQLKRRRYTGWGRLSRKLINGIRDKQSGKTILDFLKSDGFANRNFMQLIHDDSLTFKEDIQKAQVSGQGDSLHEHIANLAGSPAIKKGILQTVKVVDELVKVMGRHKPENIVIEMARENQTTQKGQKNSRERMKRIEEGIKELGSQILKEHPVENTQLQNEKLYLYYLQNGRDMYVDQELDINRLSDYDVDHIVPQSFLKDDSIDNKVLTRSDKARGKSDNVPSEEVVKKMKNYWRQLLNAKLITQRKFDNLTKAERGGLSELDKAGFIKRQLVETRQITKHVAQILDSRMNTKYDENDKLIREVKVITLKSKLVSDFRKDFQFYKVREINNYHHAHDAYLNAVVGTALIKKYPKLESEFVYGDYKVYDVRKMIAKSEQEIGKATAKYFFYSNIMNFFKTEITLANGEIRKRPLIETNGETGEIVWDKGRDFATVRKVLSMPQVNIVKKTEVQTGGFSKESILPKRNSDKLIARKKDWDPKKYGGFDSPTVAYSVLVVAKVEKGKSKKLKSVKELLGITIMERSSFEKNPIDFLEAKGYKEVKKDLIIKLPKYSLFELENGRKRMLASAGELQKGNELALPSKYVNFLYLASHYEKLKGSPEDNEQKQLFVEQHKHYLDEIIEQISEFSKRVILADANLDKVLSAYNKHRDKPIREQAENIIHLFTLTNLGAPAAFKYFDTTIDRKRYTSTKEVLDATLIHQSITGLYETRIDLSQLGGDGGEAAAKGGGGSSGGTLNLEDEYRLYETSAEPEVSPGSTWLSDFPQAWAETGGMGLAVRQAPLIIPLKATSTPVSIKQYPMSQEAKLGIKPHIQRLLDQGILVPCQSPWNTPLLPVKKPGTNDYRPVQDLREVNKRVEDIHPTVPNPYNLLSGLPPSHRWYTVLDLKDAFFCLRLHPTSQPLFAFEWRDPGMGISGQLTWTRLPQGFKNSPTLFNEALHRDLADFRIQHPDLILLQYVDDILLAATSELDCQQGTRALLLTLGNLGYRASAKKAQLCQKQVKYLGYLLKEGQRWLTEARKETVMGQPTPKTPRQLREFLGTAGFCRLWIPGFAEMAAPLYPLTKPGTLFNWGPDQQKAYQEIKQALLTAPALGLPDLTKPFELFVDEKQGYAKGVLTQKLGPWRRPVAYLSKKLDPVAAGWPPCLRMVAAIAVLRKDAGKLTMGQPLVILAPHAVEALVKQPPDRWLSNARMTHYQAMLLDTDRVQFGPVVALNPATLLPLPEEGAPHDCLEILAETHGTRPDLTDQPIPDADHTWYTDGSSFLQEGQRKAGAAVTTETEVIWARALPAGTSAQRAELIALTQALKMAEGKRLNVYTDSRYAFATAHIHGEIYRRRGWLTSEGREIKNKSEILALLKALFLPKRLSIIHCLGHQKGDSAEARGNRLADQAAREAAIKTPPDTSTLLAGKRTADGSEFEKRTADGSEFESPKKKAKVE

SEQ ID NO: 1847 - protein, 2095 aa, synthetic construct
MPAAKRVKLDGGDKKYSIGLDIGTNSVGWAVITDEYKVPSKKFKVLGNTDRHSIKKNLIGALLFDSGETAEATRLKRTARRRYTRRKNRICYLQEIFSNEMAKVDDSFFHRLEESFLVEEDKKHERHPIFGNIVDEVAYHEKYPTIYHLRKKLVDSTDKADLRLIYLALAHMIKFRGHFLIEGDLNPDNSDVDKLFIQLVQTYNQLFEENPINASGVDAKAILSARLSKSRRLENLIAQLPGEKKNGLFGNLIALSLGLTPNFKSNFDLAEDAKLQLSKDTYDDDLDNLLAQIGDQYADLFLAAKNLSDAILLSDILRVNTEITKAPLSASMIKRYDEHHQDLTLLKALVRQQLPEKYKEIFFDQSKNGYAGYIDGGASQEEFYKFIKPILEKMDGTEELLVKLNREDLLRKQRTFDNGSIPHQIHLGELHAILRRQEDFYPFLKDNREKIEKILTFRIPYYVGPLARGNSRFAWMTRKSEETITPWNFEEVVDKGASAQSFIERMTNFDKNLPNEKVLPKHSLLYEYFTVYNELTKVKYVTEGMRKPAFLSGEQKKAIVDLLFKTNRKVTVKQLKEDYFKKIECFDSVEISGVEDRFNASLGTYHDLLKIIKDKDFLDNEENEDILEDIVLTLTLFEDREMIEERLKTYAHLFDDKVMKQLKRRRYTGWGRLSRKLINGIRDKQSGKTILDFLKSDGFANRNFMQLIHDDSLTFKEDIQKAQVSGQGDSLHEHIANLAGSPAIKKGILQTVKVVDELVKVMGRHKPENIVIEMARENQTTQKGQKNSRERMKRIEEGIKELGSQILKEHPVENTQLQNEKLYLYYLQNGRDMYVDQELDINRLSDYDVDHIVPQSFLKDDSIDNKVLTRSDKARGKSDNVPSEEVVKKMKNYWRQLLNAKLITQRKFDNLTKAERGGLSELDKAGFIKRQLVETRQITKHVAQILDSRMNTKYDENDKLIREVKVITLKSKLVSDFRKDFQFYKVREINNYHHAHDAYLNAVVGTALIKKYPKLESEFVYGDYKVYDVRKMIAKSEQEIGKATAKYFFYSNIMNFFKTEITLANGEIRKRPLIETNGETGEIVWDKGRDFATVRKVLSMPQVNIVKKTEVQTGGFSKESILPKRNSDKLIARKKDWDPKKYGGFDSPTVAYSVLVVAKVEKGKSKKLKSVKELLGITIMERSSFEKNPIDFLEAKGYKEVKKDLIIKLPKYSLFELENGRKRMLASAGELQKGNELALPSKYVNFLYLASHYEKLKGSPEDNEQKQLFVEQHKHYLDEIIEQISEFSKRVILADANLDKVLSAYNKHRDKPIREQAENIIHLFTLTNLGAPAAFKYFDTTIDRKRYTSTKEVLDATLIHQSITGLYETRIDLSQLGGDGGEAAAKEAAAKGGTLNLEDEYRLYETSAEPEVSPGSTWLSDFPQAWAETGGMGLAVRQAPLIIPLKATSTPVSIKQYPMSQEAKLGIKPHIQRLLDQGILVPCQSPWNTPLLPVKKPGTNDYRPVQDLREVNKRVEDIHPTVPNPYNLLSGLPPSHRWYTVLDLKDAFFCLRLHPTSQPLFAFEWRDPGMGISGQLTWTRLPQGFKNSPTLFNEALHRDLADFRIQHPDLILLQYVDDILLAATSELDCQQGTRALLLTLGNLGYRASAKKAQLCQKQVKYLGYLLKEGQRWLTEARKETVMGQPTPKTPRQLREFLGTAGFCRLWIPGFAEMAAPLYPLTKPGTLFNWGPDQQKAYQEIKQALLTAPALGLPDLTKPFELFVDEKQGYAKGVLTQKLGPWRRPVAYLSKKLDPVAAGWPPCLRMVAAIAVLRKDAGKLTMGQPLVILAPHAVEALVKQPPDRWLSNARMTHYQAMLLDTDRVQFGPVVALNPATLLPLPEEGAPHDCLEILAETHGTRPDLTDQPIPDADHTWYTDGSSFLQEGQRKAGAAVTTETEVIWARALPAGTSAQRAELIALTQALKMAEGKRLNVYTDSRYAFATAHIHGEIYRRRGWLTSEGREIKNKSEILALLKALFLPKRLSIIHCLGHQKGDSAEARGNRLADQAAREAAIKTPPDTSTLLAGKRTADGSEFEKRTADGSEFESPKKKAKVE

SEQ ID NO: 1848 - protein, 2091 aa, synthetic construct
MPAAKRVKLDGGDKKYSIGLDIGTNSVGWAVITDEYKVPSKKFKVLGNTDRHSIKKNLIGALLFDSGETAEATRLKRTARRRYTRRKNRICYLQEIFSNEMAKVDDSFFHRLEESFLVEEDKKHERHPIFGNIVDEVAYHEKYPTIYHLRKKLVDSTDKADLRLIYLALAHMIKFRGHFLIEGDLNPDNSDVDKLFIQLVQTYNQLFEENPINASGVDAKAILSARLSKSRRLENLIAQLPGEKKNGLFGNLIALSLGLTPNFKSNFDLAEDAKLQLSKDTYDDDLDNLLAQIGDQYADLFLAAKNLSDAILLSDILRVNTEITKAPLSASMIKRYDEHHQDLTLLKALVRQQLPEKYKEIFFDQSKNGYAGYIDGGASQEEFYKFIKPILEKMDGTEELLVKLNREDLLRKQRTFDNGSIPHQIHLGELHAILRRQEDFYPFLKDNREKIEKILTFRIPYYVGPLARGNSRFAWMTRKSEETITPWNFEEVVDKGASAQSFIERMTNFDKNLPNEKVLPKHSLLYEYFTVYNELTKVKYVTEGMRKPAFLSGEQKKAIVDLLFKTNRKVTVKQLKEDYFKKIECFDSVEISGVEDRFNASLGTYHDLLKIIKDKDFLDNEENEDILEDIVLTLTLFEDREMIEERLKTYAHLFDDKVMKQLKRRRYTGWGRLSRKLINGIRDKQSGKTILDFLKSDGFANRNFMQLIHDDSLTFKEDIQKAQVSGQGDSLHEHIANLAGSPAIKKGILQTVKVVDELVKVMGRHKPENIVIEMARENQTTQKGQKNSRERMKRIEEGIKELGSQILKEHPVENTQLQNEKLYLYYLQNGRDMYVDQELDINRLSDYDVDHIVPQSFLKDDSIDNKVLTRSDKARGKSDNVPSEEVVKKMKNYWRQLLNAKLITQRKFDNLTKAERGGLSELDKAGFIKRQLVETRQITKHVAQILDSRMNTKYDENDKLIREVKVITLKSKLVSDFRKDFQFYKVREINNYHHAHDAYLNAVVGTALIKKYPKLESEFVYGDYKVYDVRKMIAKSEQEIGKATAKYFFYSNIMNFFKTEITLANGEIRKRPLIETNGETGEIVWDKGRDFATVRKVLSMPQVNIVKKTEVQTGGFSKESILPKRNSDKLIARKKDWDPKKYGGFDSPTVAYSVLVVAKVEKGKSKKLKSVKELLGITIMERSSFEKNPIDFLEAKGYKEVKKDLIIKLPKYSLFELENGRKRMLASAGELQKGNELALPSKYVNFLYLASHYEKLKGSPEDNEQKQLFVEQHKHYLDEIIEQISEFSKRVILADANLDKVLSAYNKHRDKPIREQAENIIHLFTLTNLGAPAAFKYFDTTIDRKRYTSTKEVLDATLIHQSITGLYETRIDLSQLGGDGGPAPGGGGGTLNLEDEYRLYETSAEPEVSPGSTWLSDFPQAWAETGGMGLAVRQAPLIIPLKATSTPVSIKQYPMSQEAKLGIKPHIQRLLDQGILVPCQSPWNTPLLPVKKPGTNDYRPVQDLREVNKRVEDIHPTVPNPYNLLSGLPPSHRWYTVLDLKDAFFCLRLHPTSQPLFAFEWRDPGMGISGQLTWTRLPQGFKNSPTLFNEALHRDLADFRIQHPDLILLQYVDDILLAATSELDCQQGTRALLLTLGNLGYRASAKKAQLCQKQVKYLGYLLKEGQRWLTEARKETVMGQPTPKTPRQLREFLGTAGFCRLWIPGFAEMAAPLYPLTKPGTLFNWGPDQQKAYQEIKQALLTAPALGLPDLTKPFELFVDEKQGYAKGVLTQKLGPWRRPVAYLSKKLDPVAAGWPPCLRMVAAIAVLRKDAGKLTMGQPLVILAPHAVEALVKQPPDRWLSNARMTHYQAMLLDTDRVQFGPVVALNPATLLPLPEEGAPHDCLEILAETHGTRPDLTDQPIPDADHTWYTDGSSFLQEGQRKAGAAVTTETEVIWARALPAGTSAQRAELIALTQALKMAEGKRLNVYTDSRYAFATAHIHGEIYRRRGWLTSEGREIKNKSEILALLKALFLPKRLSIIHCLGHQKGDSAEARGNRLADQAAREAAIKTPPDTSTLLAGKRTADGSEFEKRTADGSEFESPKKKAKVE

SEQ ID NO: 1849 - protein, 2097 aa, synthetic construct
MPAAKRVKLDGGDKKYSIGLDIGTNSVGWAVITDEYKVPSKKFKVLGNTDRHSIKKNLIGALLFDSGETAEATRLKRTARRRYTRRKNRICYLQEIFSNEMAKVDDSFFHRLEESFLVEEDKKHERHPIFGNIVDEVAYHEKYPTIYHLRKKLVDSTDKADLRLIYLALAHMIKFRGHFLIEGDLNPDNSDVDKLFIQLVQTYNQLFEENPINASGVDAKAILSARLSKSRRLENLIAQLPGEKKNGLFGNLIALSLGLTPNFKSNFDLAEDAKLQLSKDTYDDDLDNLLAQIGDQYADLFLAAKNLSDAILLSDILRVNTEITKAPLSASMIKRYDEHHQDLTLLKALVRQQLPEKYKEIFFDQSKNGYAGYIDGGASQEEFYKFIKPILEKMDGTEELLVKLNREDLLRKQRTFDNGSIPHQIHLGELHAILRRQEDFYPFLKDNREKIEKILTFRIPYYVGPLARGNSRFAWMTRKSEETITPWNFEEVVDKGASAQSFIERMTNFDKNLPNEKVLPKHSLLYEYFTVYNELTKVKYVTEGMRKPAFLSGEQKKAIVDLLFKTNRKVTVKQLKEDYFKKIECFDSVEISGVEDRFNASLGTYHDLLKIIKDKDFLDNEENEDILEDIVLTLTLFEDREMIEERLKTYAHLFDDKVMKQLKRRRYTGWGRLSRKLINGIRDKQSGKTILDFLKSDGFANRNFMQLIHDDSLTFKEDIQKAQVSGQGDSLHEHIANLAGSPAIKKGILQTVKVVDELVKVMGRHKPENIVIEMARENQTTQKGQKNSRERMKRIEEGIKELGSQILKEHPVENTQLQNEKLYLYYLQNGRDMYVDQELDINRLSDYDVDHIVPQSFLKDDSIDNKVLTRSDKARGKSDNVPSEEVVKKMKNYWRQLLNAKLITQRKFDNLTKAERGGLSELDKAGFIKRQLVETRQITKHVAQILDSRMNTKYDENDKLIREVKVITLKSKLVSDFRKDFQFYKVREINNYHHAHDAYLNAVVGTALIKKYPKLESEFVYGDYKVYDVRKMIAKSEQEIGKATAKYFFYSNIMNFFKTEITLANGEIRKRPLIETNGETGEIVWDKGRDFATVRKVLSMPQVNIVKKTEVQTGGFSKESILPKRNSDKLIARKKDWDPKKYGGFDSPTVAYSVLVVAKVEKGKSKKLKSVKELLGITIMERSSFEKNPIDFLEAKGYKEVKKDLIIKLPKYSLFELENGRKRMLASAGELQKGNELALPSKYVNFLYLASHYEKLKGSPEDNEQKQLFVEQHKHYLDEIIEQISEFSKRVILADANLDKVLSAYNKHRDKPIREQAENIIHLFTLTNLGAPAAFKYFDTTIDRKRYTSTKEVLDATLIHQSITGLYETRIDLSQLGGDGGGGSGGSGGSGGSGGTLNLEDEYRLYETSAEPEVSPGSTWLSDFPQAWAETGGMGLAVRQAPLIIPLKATSTPVSIKQYPMSQEAKLGIKPHIQRLLDQGILVPCQSPWNTPLLPVKKPGTNDYRPVQDLREVNKRVEDIHPTVPNPYNLLSGLPPSHRWYTVLDLKDAFFCLRLHPTSQPLFAFEWRDPGMGISGQLTWTRLPQGFKNSPTLFNEALHRDLADFRIQHPDLILLQYVDDILLAATSELDCQQGTRALLLTLGNLGYRASAKKAQLCQKQVKYLGYLLKEGQRWLTEARKETVMGQPTPKTPRQLREFLGTAGFCRLWIPGFAEMAAPLYPLTKPGTLFNWGPDQQKAYQEIKQALLTAPALGLPDLTKPFELFVDEKQGYAKGVLTQKLGPWRRPVAYLSKKLDPVAAGWPPCLRMVAAIAVLRKDAGKLTMGQPLVILAPHAVEALVKQPPDRWLSNARMTHYQAMLLDTDRVQFGPVVALNPATLLPLPEEGAPHDCLEILAETHGTRPDLTDQPIPDADHTWYTDGSSFLQEGQRKAGAAVTTETEVIWARALPAGTSAQRAELIALTQALKMAEGKRLNVYTDSRYAFATAHIHGEIYRRRGWLTSEGREIKNKSEILALLKALFLPKRLSIIHCLGHQKGDSAEARGNRLADQAAREAAIKTPPDTSTLLAGKRTADGSEFEKRTADGSEFESPKKKAKVE

SEQ ID NO: 1850 - protein, 2096 aa, synthetic construct
MPAAKRVKLDGGDKKYSIGLDIGTNSVGWAVITDEYKVPSKKFKVLGNTDRHSIKKNLIGALLFDSGETAEATRLKRTARRRYTRRKNRICYLQEIFSNEMAKVDDSFFHRLEESFLVEEDKKHERHPIFGNIVDEVAYHEKYPTIYHLRKKLVDSTDKADLRLIYLALAHMIKFRGHFLIEGDLNPDNSDVDKLFIQLVQTYNQLFEENPINASGVDAKAILSARLSKSRRLENLIAQLPGEKKNGLFGNLIALSLGLTPNFKSNFDLAEDAKLQLSKDTYDDDLDNLLAQIGDQYADLFLAAKNLSDAILLSDILRVNTEITKAPLSASMIKRYDEHHQDLTLLKALVRQQLPEKYKEIFFDQSKNGYAGYIDGGASQEEFYKFIKPILEKMDGTEELLVKLNREDLLRKQRTFDNGSIPHQIHLGELHAILRRQEDFYPFLKDNREKIEKILTFRIPYYVGPLARGNSRFAWMTRKSEETITPWNFEEVVDKGASAQSFIERMTNFDKNLPNEKVLPKHSLLYEYFTVYNELTKVKYVTEGMRKPAFLSGEQKKAIVDLLFKTNRKVTVKQLKEDYFKKIECFDSVEISGVEDRFNASLGTYHDLLKIIKDKDFLDNEENEDILEDIVLTLTLFEDREMIEERLKTYAHLFDDKVMKQLKRRRYTGWGRLSRKLINGIRDKQSGKTILDFLKSDGFANRNFMQLIHDDSLTFKEDIQKAQVSGQGDSLHEHIANLAGSPAIKKGILQTVKVVDELVKVMGRHKPENIVIEMARENQTTQKGQKNSRERMKRIEEGIKELGSQILKEHPVENTQLQNEKLYLYYLQNGRDMYVDQELDINRLSDYDVDHIVPQSFLKDDSIDNKVLTRSDKARGKSDNVPSEEVVKKMKNYWRQLLNAKLITQRKFDNLTKAERGGLSELDKAGFIKRQLVETRQITKHVAQILDSRMNTKYDENDKLIREVKVITLKSKLVSDFRKDFQFYKVREINNYHHAHDAYLNAVVGTALIKKYPKLESEFVYGDYKVYDVRKMIAKSEQEIGKATAKYFFYSNIMNFFKTEITLANGEIRKRPLIETNGETGEIVWDKGRDFATVRKVLSMPQVNIVKKTEVQTGGFSKESILPKRNSDKLIARKKDWDPKKYGGFDSPTVAYSVLVVAKVEKGKSKKLKSVKELLGITIMERSSFEKNPIDFLEAKGYKEVKKDLIIKLPKYSLFELENGRKRMLASAGELQKGNELALPSKYVNFLYLASHYEKLKGSPEDNEQKQLFVEQHKHYLDEIIEQISEFSKRVILADANLDKVLSAYNKHRDKPIREQAENIIHLFTLTNLGAPAAFKYFDTTIDRKRYTSTKEVLDATLIHQSITGLYETRIDLSQLGGDGGGSSEAAAKGGGGGTLNLEDEYRLYETSAEPEVSPGSTWLSDFPQAWAETGGMGLAVRQAPLIIPLKATSTPVSIKQYPMSQEAKLGIKPHIQRLLDQGILVPCQSPWNTPLLPVKKPGTNDYRPVQDLREVNKRVEDIHPTVPNPYNLLSGLPPSHRWYTVLDLKDAFFCLRLHPTSQPLFAFEWRDPGMGISGQLTWTRLPQGFKNSPTLFNEALHRDLADFRIQHPDLILLQYVDDILLAATSELDCQQGTRALLLTLGNLGYRASAKKAQLCQKQVKYLGYLLKEGQRWLTEARKETVMGQPTPKTPRQLREFLGTAGFCRLWIPGFAEMAAPLYPLTKPGTLFNWGPDQQKAYQEIKQALLTAPALGLPDLTKPFELFVDEKQGYAKGVLTQKLGPWRRPVAYLSKKLDPVAAGWPPCLRMVAAIAVLRKDAGKLTMGQPLVILAPHAVEALVKQPPDRWLSNARMTHYQAMLLDTDRVQFGPVVALNPATLLPLPEEGAPHDCLEILAETHGTRPDLTDQPIPDADHTWYTDGSSFLQEGQRKAGAAVTTETEVIWARALPAGTSAQRAELIALTQALKMAEGKRLNVYTDSRYAFATAHIHGEIYRRRGWLTSEGREIKNKSEILALLKALFLPKRLSIIHCLGHQKGDSAEARGNRLADQAAREAAIKTPPDTSTLLAGKRTADGSEFEKRTADGSEFESPKKKAKVE

SEQ ID NO: 1851 - protein, 2096 aa, synthetic construct
MPAAKRVKLDGGDKKYSIGLDIGTNSVGWAVITDEYKVPSKKFKVLGNTDRHSIKKNLIGALLFDSGETAEATRLKRTARRRYTRRKNRICYLQEIFSNEMAKVDDSFFHRLEESFLVEEDKKHERHPIFGNIVDEVAYHEKYPTIYHLRKKLVDSTDKADLRLIYLALAHMIKFRGHFLIEGDLNPDNSDVDKLFIQLVQTYNQLFEENPINASGVDAKAILSARLSKSRRLENLIAQLPGEKKNGLFGNLIALSLGLTPNFKSNFDLAEDAKLQLSKDTYDDDLDNLLAQIGDQYADLFLAAKNLSDAILLSDILRVNTEITKAPLSASMIKRYDEHHQDLTLLKALVRQQLPEKYKEIFFDQSKNGYAGYIDGGASQEEFYKFIKPILEKMDGTEELLVKLNREDLLRKQRTFDNGSIPHQIHLGELHAILRRQEDFYPFLKDNREKIEKILTFRIPYYVGPLARGNSRFAWMTRKSEETITPWNFEEVVDKGASAQSFIERMTNFDKNLPNEKVLPKHSLLYEYFTVYNELTKVKYVTEGMRKPAFLSGEQKKAIVDLLFKTNRKVTVKQLKEDYFKKIECFDSVEISGVEDRFNASLGTYHDLLKIIKDKDFLDNEENEDILEDIVLTLTLFEDREMIEERLKTYAHLFDDKVMKQLKRRRYTGWGRLSRKLINGIRDKQSGKTILDFLKSDGFANRNFMQLIHDDSLTFKEDIQKAQVSGQGDSLHEHIANLAGSPAIKKGILQTVKVVDELVKVMGRHKPENIVIEMARENQTTQKGQKNSRERMKRIEEGIKELGSQILKEHPVENTQLQNEKLYLYYLQNGRDMYVDQELDINRLSDYDVDHIVPQSFLKDDSIDNKVLTRSDKARGKSDNVPSEEVVKKMKNYWRQLLNAKLITQRKFDNLTKAERGGLSELDKAGFIKRQLVETRQITKHVAQILDSRMNTKYDENDKLIREVKVITLKSKLVSDFRKDFQFYKVREINNYHHAHDAYLNAVVGTALIKKYPKLESEFVYGDYKVYDVRKMIAKSEQEIGKATAKYFFYSNIMNFFKTEITLANGEIRKRPLIETNGETGEIVWDKGRDFATVRKVLSMPQVNIVKKTEVQTGGFSKESILPKRNSDKLIARKKDWDPKKYGGFDSPTVAYSVLVVAKVEKGKSKKLKSVKELLGITIMERSSFEKNPIDFLEAKGYKEVKKDLIIKLPKYSLFELENGRKRMLASAGELQKGNELALPSKYVNFLYLASHYEKLKGSPEDNEQKQLFVEQHKHYLDEIIEQISEFSKRVILADANLDKVLSAYNKHRDKPIREQAENIIHLFTLTNLGAPAAFKYFDTTIDRKRYTSTKEVLDATLIHQSITGLYETRIDLSQLGGDGGEAAAKPAPGGSGGTLNLEDEYRLYETSAEPEVSPGSTWLSDFPQAWAETGGMGLAVRQAPLIIPLKATSTPVSIKQYPMSQEAKLGIKPHIQRLLDQGILVPCQSPWNTPLLPVKKPGTNDYRPVQDLREVNKRVEDIHPTVPNPYNLLSGLPPSHRWYTVLDLKDAFFCLRLHPTSQPLFAFEWRDPGMGISGQLTWTRLPQGFKNSPTLFNEALHRDLADFRIQHPDLILLQYVDDILLAATSELDCQQGTRALLLTLGNLGYRASAKKAQLCQKQVKYLGYLLKEGQRWLTEARKETVMGQPTPKTPRQLREFLGTAGFCRLWIPGFAEMAAPLYPLTKPGTLFNWGPDQQKAYQEIKQALLTAPALGLPDLTKPFELFVDEKQGYAKGVLTQKLGPWRRPVAYLSKKLDPVAAGWPPCLRMVAAIAVLRKDAGKLTMGQPLVILAPHAVEALVKQPPDRWLSNARMTHYQAMLLDTDRVQFGPVVALNPATLLPLPEEGAPHDCLEILAETHGTRPDLTDQPIPDADHTWYTDGSSFLQEGQRKAGAAVTTETEVIWARALPAGTSAQRAELIALTQALKMAEGKRLNVYTDSRYAFATAHIHGEIYRRRGWLTSEGREIKNKSEILALLKALFLPKRLSIIHCLGHQKGDSAEARGNRLADQAAREAAIKTPPDTSTLLAGKRTADGSEFEKRTADGSEFESPKKKAKVE

SEQ ID NO: 1852 - protein, 2094 aa, synthetic construct
MPAAKRVKLDGGDKKYSIGLDIGTNSVGWAVITDEYKVPSKKFKVLGNTDRHSIKKNLIGALLFDSGETAEATRLKRTARRRYTRRKNRICYLQEIFSNEMAKVDDSFFHRLEESFLVEEDKKHERHPIFGNIVDEVAYHEKYPTIYHLRKKLVDSTDKADLRLIYLALAHMIKFRGHFLIEGDLNPDNSDVDKLFIQLVQTYNQLFEENPINASGVDAKAILSARLSKSRRLENLIAQLPGEKKNGLFGNLIALSLGLTPNFKSNFDLAEDAKLQLSKDTYDDDLDNLLAQIGDQYADLFLAAKNLSDAILLSDILRVNTEITKAPLSASMIKRYDEHHQDLTLLKALVRQQLPEKYKEIFFDQSKNGYAGYIDGGASQEEFYKFIKPILEKMDGTEELLVKLNREDLLRKQRTFDNGSIPHQIHLGELHAILRRQEDFYPFLKDNREKIEKILTFRIPYYVGPLARGNSRFAWMTRKSEETITPWNFEEVVDKGASAQSFIERMTNFDKNLPNEKVLPKHSLLYEYFTVYNELTKVKYVTEGMRKPAFLSGEQKKAIVDLLFKTNRKVTVKQLKEDYFKKIECFDSVEISGVEDRFNASLGTYHDLLKIIKDKDFLDNEENEDILEDIVLTLTLFEDREMIEERLKTYAHLFDDKVMKQLKRRRYTGWGRLSRKLINGIRDKQSGKTILDFLKSDGFANRNFMQLIHDDSLTFKEDIQKAQVSGQGDSLHEHIANLAGSPAIKKGILQTVKVVDELVKVMGRHKPENIVIEMARENQTTQKGQKNSRERMKRIEEGIKELGSQILKEHPVENTQLQNEKLYLYYLQNGRDMYVDQELDINRLSDYDVDHIVPQSFLKDDSIDNKVLTRSDKARGKSDNVPSEEVVKKMKNYWRQLLNAKLITQRKFDNLTKAERGGLSELDKAGFIKRQLVETRQITKHVAQILDSRMNTKYDENDKLIREVKVITLKSKLVSDFRKDFQFYKVREINNYHHAHDAYLNAVVGTALIKKYPKLESEFVYGDYKVYDVRKMIAKSEQEIGKATAKYFFYSNIMNFFKTEITLANGEIRKRPLIETNGETGEIVWDKGRDFATVRKVLSMPQVNIVKKTEVQTGGFSKESILPKRNSDKLIARKKDWDPKKYGGFDSPTVAYSVLVVAKVEKGKSKKLKSVKELLGITIMERSSFEKNPIDFLEAKGYKEVKKDLIIKLPKYSLFELENGRKRMLASAGELQKGNELALPSKYVNFLYLASHYEKLKGSPEDNEQKQLFVEQHKHYLDEIIEQISEFSKRVILADANLDKVLSAYNKHRDKPIREQAENIIHLFTLTNLGAPAAFKYFDTTIDRKRYTSTKEVLDATLIHQSITGLYETRIDLSQLGGDGGPAPAPAPAPGGTLNLEDEYRLYETSAEPEVSPGSTWLSDFPQAWAETGGMGLAVRQAPLIIPLKATSTPVSIKQYPMSQEAKLGIKPHIQRLLDQGILVPCQSPWNTPLLPVKKPGTNDYRPVQDLREVNKRVEDIHPTVPNPYNLLSGLPPSHRWYTVLDLKDAFFCLRLHPTSQPLFAFEWRDPGMGISGQLTWTRLPQGFKNSPTLFNEALHRDLADFRIQHPDLILLQYVDDILLAATSELDCQQGTRALLLTLGNLGYRASAKKAQLCQKQVKYLGYLLKEGQRWLTEARKETVMGQPTPKTPRQLREFLGTAGFCRLWIPGFAEMAAPLYPLTKPGTLFNWGPDQQKAYQEIKQALLTAPALGLPDLTKPFELFVDEKQGYAKGVLTQKLGPWRRPVAYLSKKLDPVAAGWPPCLRMVAAIAVLRKDAGKLTMGQPLVILAPHAVEALVKQPPDRWLSNARMTHYQAMLLDTDRVQFGPVVALNPATLLPLPEEGAPHDCLEILAETHGTRPDLTDQPIPDADHTWYTDGSSFLQEGQRKAGAAVTTETEVIWARALPAGTSAQRAELIALTQALKMAEGKRLNVYTDSRYAFATAHIHGEIYRRRGWLTSEGREIKNKSEILALLKALFLPKRLSIIHCLGHQKGDSAEARGNRLADQAAREAAIKTPPDTSTLLAGKRTADGSEFEKRTADGSEFESPKKKAKVE

SEQ ID NO: 1853 - protein, 2091 aa, synthetic construct
MPAAKRVKLDGGDKKYSIGLDIGTNSVGWAVITDEYKVPSKKFKVLGNTDRHSIKKNLIGALLFDSGETAEATRLKRTARRRYTRRKNRICYLQEIFSNEMAKVDDSFFHRLEESFLVEEDKKHERHPIFGNIVDEVAYHEKYPTIYHLRKKLVDSTDKADLRLIYLALAHMIKFRGHFLIEGDLNPDNSDVDKLFIQLVQTYNQLFEENPINASGVDAKAILSARLSKSRRLENLIAQLPGEKKNGLFGNLIALSLGLTPNFKSNFDLAEDAKLQLSKDTYDDDLDNLLAQIGDQYADLFLAAKNLSDAILLSDILRVNTEITKAPLSASMIKRYDEHHQDLTLLKALVRQQLPEKYKEIFFDQSKNGYAGYIDGGASQEEFYKFIKPILEKMDGTEELLVKLNREDLLRKQRTFDNGSIPHQIHLGELHAILRRQEDFYPFLKDNREKIEKILTFRIPYYVGPLARGNSRFAWMTRKSEETITPWNFEEVVDKGASAQSFIERMTNFDKNLPNEKVLPKHSLLYEYFTVYNELTKVKYVTEGMRKPAFLSGEQKKAIVDLLFKTNRKVTVKQLKEDYFKKIECFDSVEISGVEDRFNASLGTYHDLLKIIKDKDFLDNEENEDILEDIVLTLTLFEDREMIEERLKTYAHLFDDKVMKQLKRRRYTGWGRLSRKLINGIRDKQSGKTILDFLKSDGFANRNFMQLIHDDSLTFKEDIQKAQVSGQGDSLHEHIANLAGSPAIKKGILQTVKVVDELVKVMGRHKPENIVIEMARENQTTQKGQKNSRERMKRIEEGIKELGSQILKEHPVENTQLQNEKLYLYYLQNGRDMYVDQELDINRLSDYDVDHIVPQSFLKDDSIDNKVLTRSDKARGKSDNVPSEEVVKKMKNYWRQLLNAKLITQRKFDNLTKAERGGLSELDKAGFIKRQLVETRQITKHVAQILDSRMNTKYDENDKLIREVKVITLKSKLVSDFRKDFQFYKVREINNYHHAHDAYLNAVVGTALIKKYPKLESEFVYGDYKVYDVRKMIAKSEQEIGKATAKYFFYSNIMNFFKTEITLANGEIRKRPLIETNGETGEIVWDKGRDFATVRKVLSMPQVNIVKKTEVQTGGFSKESILPKRNSDKLIARKKDWDPKKYGGFDSPTVAYSVLVVAKVEKGKSKKLKSVKELLGITIMERSSFEKNPIDFLEAKGYKEVKKDLIIKLPKYSLFELENGRKRMLASAGELQKGNELALPSKYVNFLYLASHYEKLKGSPEDNEQKQLFVEQHKHYLDEIIEQISEFSKRVILADANLDKVLSAYNKHRDKPIREQAENIIHLFTLTNLGAPAAFKYFDTTIDRKRYTSTKEVLDATLIHQSITGLYETRIDLSQLGGDGGGGGGSSGGTLNLEDEYRLYETSAEPEVSPGSTWLSDFPQAWAETGGMGLAVRQAPLIIPLKATSTPVSIKQYPMSQEAKLGIKPHIQRLLDQGILVPCQSPWNTPLLPVKKPGTNDYRPVQDLREVNKRVEDIHPTVPNPYNLLSGLPPSHRWYTVLDLKDAFFCLRLHPTSQPLFAFEWRDPGMGISGQLTWTRLPQGFKNSPTLFNEALHRDLADFRIQHPDLILLQYVDDILLAATSELDCQQGTRALLLTLGNLGYRASAKKAQLCQKQVKYLGYLLKEGQRWLTEARKETVMGQPTPKTPRQLREFLGTAGFCRLWIPGFAEMAAPLYPLTKPGTLFNWGPDQQKAYQEIKQALLTAPALGLPDLTKPFELFVDEKQGYAKGVLTQKLGPWRRPVAYLSKKLDPVAAGWPPCLRMVAAIAVLRKDAGKLTMGQPLVILAPHAVEALVKQPPDRWLSNARMTHYQAMLLDTDRVQFGPVVALNPATLLPLPEEGAPHDCLEILAETHGTRPDLTDQPIPDADHTWYTDGSSFLQEGQRKAGAAVTTETEVIWARALPAGTSAQRAELIALTQALKMAEGKRLNVYTDSRYAFATAHIHGEIYRRRGWLTSEGREIKNKSEILALLKALFLPKRLSIIHCLGHQKGDSAEARGNRLADQAAREAAIKTPPDTSTLLAGKRTADGSEFEKRTADGSEFESPKKKAKVE

SEQ ID NO: 1854 - protein, 2091 aa, synthetic construct
MPAAKRVKLDGGDKKYSIGLDIGTNSVGWAVITDEYKVPSKKFKVLGNTDRHSIKKNLIGALLFDSGETAEATRLKRTARRRYTRRKNRICYLQEIFSNEMAKVDDSFFHRLEESFLVEEDKKHERHPIFGNIVDEVAYHEKYPTIYHLRKKLVDSTDKADLRLIYLALAHMIKFRGHFLIEGDLNPDNSDVDKLFIQLVQTYNQLFEENPINASGVDAKAILSARLSKSRRLENLIAQLPGEKKNGLFGNLIALSLGLTPNFKSNFDLAEDAKLQLSKDTYDDDLDNLLAQIGDQYADLFLAAKNLSDAILLSDILRVNTEITKAPLSASMIKRYDEHHQDLTLLKALVRQQLPEKYKEIFFDQSKNGYAGYIDGGASQEEFYKFIKPILEKMDGTEELLVKLNREDLLRKQRTFDNGSIPHQIHLGELHAILRRQEDFYPFLKDNREKIEKILTFRIPYYVGPLARGNSRFAWMTRKSEETITPWNFEEVVDKGASAQSFIERMTNFDKNLPNEKVLPKHSLLYEYFTVYNELTKVKYVTEGMRKPAFLSGEQKKAIVDLLFKTNRKVTVKQLKEDYFKKIECFDSVEISGVEDRFNASLGTYHDLLKIIKDKDFLDNEENEDILEDIVLTLTLFEDREMIEERLKTYAHLFDDKVMKQLKRRRYTGWGRLSRKLINGIRDKQSGKTILDFLKSDGFANRNFMQLIHDDSLTFKEDIQKAQVSGQGDSLHEHIANLAGSPAIKKGILQTVKVVDELVKVMGRHKPENIVIEMARENQTTQKGQKNSRERMKRIEEGIKELGSQILKEHPVENTQLQNEKLYLYYLQNGRDMYVDQELDINRLSDYDVDHIVPQSFLKDDSIDNKVLTRSDKARGKSDNVPSEEVVKKMKNYWRQLLNAKLITQRKFDNLTKAERGGLSELDKAGFIKRQLVETRQITKHVAQILDSRMNTKYDENDKLIREVKVITLKSKLVSDFRKDFQFYKVREINNYHHAHDAYLNAVVGTALIKKYPKLESEFVYGDYKVYDVRKMIAKSEQEIGKATAKYFFYSNIMNFFKTEITLANGEIRKRPLIETNGETGEIVWDKGRDFATVRKVLSMPQVNIVKKTEVQTGGFSKESILPKRNSDKLIARKKDWDPKKYGGFDSPTVAYSVLVVAKVEKGKSKKLKSVKELLGITIMERSSFEKNPIDFLEAKGYKEVKKDLIIKLPKYSLFELENGRKRMLASAGELQKGNELALPSKYVNFLYLASHYEKLKGSPEDNEQKQLFVEQHKHYLDEIIEQISEFSKRVILADANLDKVLSAYNKHRDKPIREQAENIIHLFTLTNLGAPAAFKYFDTTIDRKRYTSTKEVLDATLIHQSITGLYETRIDLSQLGGDGGGGGPAPGGTLNLEDEYRLYETSAEPEVSPGSTWLSDFPQAWAETGGMGLAVRQAPLIIPLKATSTPVSIKQYPMSQEAKLGIKPHIQRLLDQGILVPCQSPWNTPLLPVKKPGTNDYRPVQDLREVNKRVEDIHPTVPNPYNLLSGLPPSHRWYTVLDLKDAFFCLRLHPTSQPLFAFEWRDPGMGISGQLTWTRLPQGFKNSPTLFNEALHRDLADFRIQHPDLILLQYVDDILLAATSELDCQQGTRALLLTLGNLGYRASAKKAQLCQKQVKYLGYLLKEGQRWLTEARKETVMGQPTPKTPRQLREFLGTAGFCRLWIPGFAEMAAPLYPLTKPGTLFNWGPDQQKAYQEIKQALLTAPALGLPDLTKPFELFVDEKQGYAKGVLTQKLGPWRRPVAYLSKKLDPVAAGWPPCLRMVAAIAVLRKDAGKLTMGQPLVILAPHAVEALVKQPPDRWLSNARMTHYQAMLLDTDRVQFGPVVALNPATLLPLPEEGAPHDCLEILAETHGTRPDLTDQPIPDADHTWYTDGSSFLQEGQRKAGAAVTTETEVIWARALPAGTSAQRAELIALTQALKMAEGKRLNVYTDSRYAFATAHIHGEIYRRRGWLTSEGREIKNKSEILALLKALFLPKRLSIIHCLGHQKGDSAEARGNRLADQAAREAAIKTPPDTSTLLAGKRTADGSEFEKRTADGSEFESPKKKAKVE

SEQ ID NO: 1855 - protein, 2090 aa, synthetic construct
MPAAKRVKLDGGDKKYSIGLDIGTNSVGWAVITDEYKVPSKKFKVLGNTDRHSIKKNLIGALLFDSGETAEATRLKRTARRRYTRRKNRICYLQEIFSNEMAKVDDSFFHRLEESFLVEEDKKHERHPIFGNIVDEVAYHEKYPTIYHLRKKLVDSTDKADLRLIYLALAHMIKFRGHFLIEGDLNPDNSDVDKLFIQLVQTYNQLFEENPINASGVDAKAILSARLSKSRRLENLIAQLPGEKKNGLFGNLIALSLGLTPNFKSNFDLAEDAKLQLSKDTYDDDLDNLLAQIGDQYADLFLAAKNLSDAILLSDILRVNTEITKAPLSASMIKRYDEHHQDLTLLKALVRQQLPEKYKEIFFDQSKNGYAGYIDGGASQEEFYKFIKPILEKMDGTEELLVKLNREDLLRKQRTFDNGSIPHQIHLGELHAILRRQEDFYPFLKDNREKIEKILTFRIPYYVGPLARGNSRFAWMTRKSEETITPWNFEEVVDKGASAQSFIERMTNFDKNLPNEKVLPKHSLLYEYFTVYNELTKVKYVTEGMRKPAFLSGEQKKAIVDLLFKTNRKVTVKQLKEDYFKKIECFDSVEISGVEDRFNASLGTYHDLLKIIKDKDFLDNEENEDILEDIVLTLTLFEDREMIEERLKTYAHLFDDKVMKQLKRRRYTGWGRLSRKLINGIRDKQSGKTILDFLKSDGFANRNFMQLIHDDSLTFKEDIQKAQVSGQGDSLHEHIANLAGSPAIKKGILQTVKVVDELVKVMGRHKPENIVIEMARENQTTQKGQKNSRERMKRIEEGIKELGSQILKEHPVENTQLQNEKLYLYYLQNGRDMYVDQELDINRLSDYDVDHIVPQSFLKDDSIDNKVLTRSDKARGKSDNVPSEEVVKKMKNYWRQLLNAKLITQRKFDNLTKAERGGLSELDKAGFIKRQLVETRQITKHVAQILDSRMNTKYDENDKLIREVKVITLKSKLVSDFRKDFQFYKVREINNYHHAHDAYLNAVVGTALIKKYPKLESEFVYGDYKVYDVRKMIAKSEQEIGKATAKYFFYSNIMNFFKTEITLANGEIRKRPLIETNGETGEIVWDKGRDFATVRKVLSMPQVNIVKKTEVQTGGFSKESILPKRNSDKLIARKKDWDPKKYGGFDSPTVAYSVLVVAKVEKGKSKKLKSVKELLGITIMERSSFEKNPIDFLEAKGYKEVKKDLIIKLPKYSLFELENGRKRMLASAGELQKGNELALPSKYVNFLYLASHYEKLKGSPEDNEQKQLFVEQHKHYLDEIIEQISEFSKRVILADANLDKVLSAYNKHRDKPIREQAENIIHLFTLTNLGAPAAFKYFDTTIDRKRYTSTKEVLDATLIHQSITGLYETRIDLSQLGGDGGPAPAPGGTLNLEDEYRLYETSAEPEVSPGSTWLSDFPQAWAETGGMGLAVRQAPLIIPLKATSTPVSIKQYPMSQEAKLGIKPHIQRLLDQGILVPCQSPWNTPLLPVKKPGTNDYRPVQDLREVNKRVEDIHPTVPNPYNLLSGLPPSHRWYTVLDLKDAFFCLRLHPTSQPLFAFEWRDPGMGISGQLTWTRLPQGFKNSPTLFNEALHRDLADFRIQHPDLILLQYVDDILLAATSELDCQQGTRALLLTLGNLGYRASAKKAQLCQKQVKYLGYLLKEGQRWLTEARKETVMGQPTPKTPRQLREFLGTAGFCRLWIPGFAEMAAPLYPLTKPGTLFNWGPDQQKAYQEIKQALLTAPALGLPDLTKPFELFVDEKQGYAKGVLTQKLGPWRRPVAYLSKKLDPVAAGWPPCLRMVAAIAVLRKDAGKLTMGQPLVILAPHAVEALVKQPPDRWLSNARMTHYQAMLLDTDRVQFGPVVALNPATLLPLPEEGAPHDCLEILAETHGTRPDLTDQPIPDADHTWYTDGSSFLQEGQRKAGAAVTTETEVIWARALPAGTSAQRAELIALTQALKMAEGKRLNVYTDSRYAFATAHIHGEIYRRRGWLTSEGREIKNKSEILALLKALFLPKRLSIIHCLGHQKGDSAEARGNRLADQAAREAAIKTPPDTSTLLAGKRTADGSEFEKRTADGSEFESPKKKAKVE

SEQ ID NO: 1856 - protein, 2096 aa, synthetic construct
MPAAKRVKLDGGDKKYSIGLDIGTNSVGWAVITDEYKVPSKKFKVLGNTDRHSIKKNLIGALLFDSGETAEATRLKRTARRRYTRRKNRICYLQEIFSNEMAKVDDSFFHRLEESFLVEEDKKHERHPIFGNIVDEVAYHEKYPTIYHLRKKLVDSTDKADLRLIYLALAHMIKFRGHFLIEGDLNPDNSDVDKLFIQLVQTYNQLFEENPINASGVDAKAILSARLSKSRRLENLIAQLPGEKKNGLFGNLIALSLGLTPNFKSNFDLAEDAKLQLSKDTYDDDLDNLLAQIGDQYADLFLAAKNLSDAILLSDILRVNTEITKAPLSASMIKRYDEHHQDLTLLKALVRQQLPEKYKEIFFDQSKNGYAGYIDGGASQEEFYKFIKPILEKMDGTEELLVKLNREDLLRKQRTFDNGSIPHQIHLGELHAILRRQEDFYPFLKDNREKIEKILTFRIPYYVGPLARGNSRFAWMTRKSEETITPWNFEEVVDKGASAQSFIERMTNFDKNLPNEKVLPKHSLLYEYFTVYNELTKVKYVTEGMRKPAFLSGEQKKAIVDLLFKTNRKVTVKQLKEDYFKKIECFDSVEISGVEDRFNASLGTYHDLLKIIKDKDFLDNEENEDILEDIVLTLTLFEDREMIEERLKTYAHLFDDKVMKQLKRRRYTGWGRLSRKLINGIRDKQSGKTILDFLKSDGFANRNFMQLIHDDSLTFKEDIQKAQVSGQGDSLHEHIANLAGSPAIKKGILQTVKVVDELVKVMGRHKPENIVIEMARENQTTQKGQKNSRERMKRIEEGIKELGSQILKEHPVENTQLQNEKLYLYYLQNGRDMYVDQELDINRLSDYDVDHIVPQSFLKDDSIDNKVLTRSDKARGKSDNVPSEEVVKKMKNYWRQLLNAKLITQRKFDNLTKAERGGLSELDKAGFIKRQLVETRQITKHVAQILDSRMNTKYDENDKLIREVKVITLKSKLVSDFRKDFQFYKVREINNYHHAHDAYLNAVVGTALIKKYPKLESEFVYGDYKVYDVRKMIAKSEQEIGKATAKYFFYSNIMNFFKTEITLANGEIRKRPLIETNGETGEIVWDKGRDFATVRKVLSMPQVNIVKKTEVQTGGFSKESILPKRNSDKLIARKKDWDPKKYGGFDSPTVAYSVLVVAKVEKGKSKKLKSVKELLGITIMERSSFEKNPIDFLEAKGYKEVKKDLIIKLPKYSLFELENGRKRMLASAGELQKGNELALPSKYVNFLYLASHYEKLKGSPEDNEQKQLFVEQHKHYLDEIIEQISEFSKRVILADANLDKVLSAYNKHRDKPIREQAENIIHLFTLTNLGAPAAFKYFDTTIDRKRYTSTKEVLDATLIHQSITGLYETRIDLSQLGGDGGPAPGGGEAAAKGGTLNLEDEYRLYETSAEPEVSPGSTWLSDFPQAWAETGGMGLAVRQAPLIIPLKATSTPVSIKQYPMSQEAKLGIKPHIQRLLDQGILVPCQSPWNTPLLPVKKPGTNDYRPVQDLREVNKRVEDIHPTVPNPYNLLSGLPPSHRWYTVLDLKDAFFCLRLHPTSQPLFAFEWRDPGMGISGQLTWTRLPQGFKNSPTLFNEALHRDLADFRIQHPDLILLQYVDDILLAATSELDCQQGTRALLLTLGNLGYRASAKKAQLCQKQVKYLGYLLKEGQRWLTEARKETVMGQPTPKTPRQLREFLGKAGFCRLFIPGFAEMAAPLYPLTKPGTLFNWGPDQQKAYQEIKQALLTAPALGLPDLTKPFELFVDEKQGYAKGVLTQKLGPWRRPVAYLSKKLDPVAAGWPPCLRMVAAIAVLRKDAGKLTMGQPLVILAPHAVEALVKQPPDRWLSNARMTHYQAMLLDTDRVQFGPVVALNPATLLPLPEEGAPHDCLEILAETHGTRPDLTDQPIPDADHTWYTDGSSFLQEGQRKAGAAVTTETEVIWARALPAGTSAQRAELIALTQALKMAEGKRLNVYTDSRYAFATAHIHGEIYRRRGWLTSEGREIKNKSEILALLKALFLPKRLSIIHCLGHQKGDSAEARGNRLADQAAREAAIKTPPDTSTLLAGKRTADGSEFEKRTADGSEFESPKKKAKVE

SEQ ID NO: 1857 - protein, 2094 aa, synthetic construct
MPAAKRVKLDGGDKKYSIGLDIGTNSVGWAVITDEYKVPSKKFKVLGNTDRHSIKKNLIGALLFDSGETAEATRLKRTARRRYTRRKNRICYLQEIFSNEMAKVDDSFFHRLEESFLVEEDKKHERHPIFGNIVDEVAYHEKYPTIYHLRKKLVDSTDKADLRLIYLALAHMIKFRGHFLIEGDLNPDNSDVDKLFIQLVQTYNQLFEENPINASGVDAKAILSARLSKSRRLENLIAQLPGEKKNGLFGNLIALSLGLTPNFKSNFDLAEDAKLQLSKDTYDDDLDNLLAQIGDQYADLFLAAKNLSDAILLSDILRVNTEITKAPLSASMIKRYDEHHQDLTLLKALVRQQLPEKYKEIFFDQSKNGYAGYIDGGASQEEFYKFIKPILEKMDGTEELLVKLNREDLLRKQRTFDNGSIPHQIHLGELHAILRRQEDFYPFLKDNREKIEKILTFRIPYYVGPLARGNSRFAWMTRKSEETITPWNFEEVVDKGASAQSFIERMTNFDKNLPNEKVLPKHSLLYEYFTVYNELTKVKYVTEGMRKPAFLSGEQKKAIVDLLFKTNRKVTVKQLKEDYFKKIECFDSVEISGVEDRFNASLGTYHDLLKIIKDKDFLDNEENEDILEDIVLTLTLFEDREMIEERLKTYAHLFDDKVMKQLKRRRYTGWGRLSRKLINGIRDKQSGKTILDFLKSDGFANRNFMQLIHDDSLTFKEDIQKAQVSGQGDSLHEHIANLAGSPAIKKGILQTVKVVDELVKVMGRHKPENIVIEMARENQTTQKGQKNSRERMKRIEEGIKELGSQILKEHPVENTQLQNEKLYLYYLQNGRDMYVDQELDINRLSDYDVDHIVPQSFLKDDSIDNKVLTRSDKARGKSDNVPSEEVVKKMKNYWRQLLNAKLITQRKFDNLTKAERGGLSELDKAGFIKRQLVETRQITKHVAQILDSRMNTKYDENDKLIREVKVITLKSKLVSDFRKDFQFYKVREINNYHHAHDAYLNAVVGTALIKKYPKLESEFVYGDYKVYDVRKMIAKSEQEIGKATAKYFFYSNIMNFFKTEITLANGEIRKRPLIETNGETGEIVWDKGRDFATVRKVLSMPQVNIVKKTEVQTGGFSKESILPKRNSDKLIARKKDWDPKKYGGFDSPTVAYSVLVVAKVEKGKSKKLKSVKELLGITIMERSSFEKNPIDFLEAKGYKEVKKDLIIKLPKYSLFELENGRKRMLASAGELQKGNELALPSKYVNFLYLASHYEKLKGSPEDNEQKQLFVEQHKHYLDEIIEQISEFSKRVILADANLDKVLSAYNKHRDKPIREQAENIIHLFTLTNLGAPAAFKYFDTTIDRKRYTSTKEVLDATLIHQSITGLYETRIDLSQLGGDGGGGGPAPGSSGGTLNLEDEYRLYETSAEPEVSPGSTWLSDFPQAWAETGGMGLAVRQAPLIIPLKATSTPVSIKQYPMSQEAKLGIKPHIQRLLDQGILVPCQSPWNTPLLPVKKPGTNDYRPVQDLREVNKRVEDIHPTVPNPYNLLSGLPPSHRWYTVLDLKDAFFCLRLHPTSQPLFAFEWRDPGMGISGQLTWTRLPQGFKNSPTLFNEALHRDLADFRIQHPDLILLQYVDDILLAATSELDCQQGTRALLLTLGNLGYRASAKKAQLCQKQVKYLGYLLKEGQRWLTEARKETVMGQPTPKTPRQLREFLGKAGFCRLFIPGFAEMAAPLYPLTKPGTLFNWGPDQQKAYQEIKQALLTAPALGLPDLTKPFELFVDEKQGYAKGVLTQKLGPWRRPVAYLSKKLDPVAAGWPPCLRMVAAIAVLRKDAGKLTMGQPLVILAPHAVEALVKQPPDRWLSNARMTHYQAMLLDTDRVQFGPVVALNPATLLPLPEEGAPHDCLEILAETHGTRPDLTDQPIPDADHTWYTDGSSFLQEGQRKAGAAVTTETEVIWARALPAGTSAQRAELIALTQALKMAEGKRLNVYTDSRYAFATAHIHGEIYRRRGWLTSEGREIKNKSEILALLKALFLPKRLSIIHCLGHQKGDSAEARGNRLADQAAREAAIKTPPDTSTLLAGKRTADGSEFEKRTADGSEFESPKKKAKVE

SEQ ID NO: 1858 - protein, 2093 aa, synthetic construct
MPAAKRVKLDGGDKKYSIGLDIGTNSVGWAVITDEYKVPSKKFKVLGNTDRHSIKKNLIGALLFDSGETAEATRLKRTARRRYTRRKNRICYLQEIFSNEMAKVDDSFFHRLEESFLVEEDKKHERHPIFGNIVDEVAYHEKYPTIYHLRKKLVDSTDKADLRLIYLALAHMIKFRGHFLIEGDLNPDNSDVDKLFIQLVQTYNQLFEENPINASGVDAKAILSARLSKSRRLENLIAQLPGEKKNGLFGNLIALSLGLTPNFKSNFDLAEDAKLQLSKDTYDDDLDNLLAQIGDQYADLFLAAKNLSDAILLSDILRVNTEITKAPLSASMIKRYDEHHQDLTLLKALVRQQLPEKYKEIFFDQSKNGYAGYIDGGASQEEFYKFIKPILEKMDGTEELLVKLNREDLLRKQRTFDNGSIPHQIHLGELHAILRRQEDFYPFLKDNREKIEKILTFRIPYYVGPLARGNSRFAWMTRKSEETITPWNFEEVVDKGASAQSFIERMTNFDKNLPNEKVLPKHSLLYEYFTVYNELTKVKYVTEGMRKPAFLSGEQKKAIVDLLFKTNRKVTVKQLKEDYFKKIECFDSVEISGVEDRFNASLGTYHDLLKIIKDKDFLDNEENEDILEDIVLTLTLFEDREMIEERLKTYAHLFDDKVMKQLKRRRYTGWGRLSRKLINGIRDKQSGKTILDFLKSDGFANRNFMQLIHDDSLTFKEDIQKAQVSGQGDSLHEHIANLAGSPAIKKGILQTVKVVDELVKVMGRHKPENIVIEMARENQTTQKGQKNSRERMKRIEEGIKELGSQILKEHPVENTQLQNEKLYLYYLQNGRDMYVDQELDINRLSDYDVDHIVPQSFLKDDSIDNKVLTRSDKARGKSDNVPSEEVVKKMKNYWRQLLNAKLITQRKFDNLTKAERGGLSELDKAGFIKRQLVETRQITKHVAQILDSRMNTKYDENDKLIREVKVITLKSKLVSDFRKDFQFYKVREINNYHHAHDAYLNAVVGTALIKKYPKLESEFVYGDYKVYDVRKMIAKSEQEIGKATAKYFFYSNIMNFFKTEITLANGEIRKRPLIETNGETGEIVWDKGRDFATVRKVLSMPQVNIVKKTEVQTGGFSKESILPKRNSDKLIARKKDWDPKKYGGFDSPTVAYSVLVVAKVEKGKSKKLKSVKELLGITIMERSSFEKNPIDFLEAKGYKEVKKDLIIKLPKYSLFELENGRKRMLASAGELQKGNELALPSKYVNFLYLASHYEKLKGSPEDNEQKQLFVEQHKHYLDEIIEQISEFSKRVILADANLDKVLSAYNKHRDKPIREQAENIIHLFTLTNLGAPAAFKYFDTTIDRKRYTSTKEVLDATLIHQSITGLYETRIDLSQLGGDGGPAPEAAAKGGTLNLEDEYRLYETSAEPEVSPGSTWLSDFPQAWAETGGMGLAVRQAPLIIPLKATSTPVSIKQYPMSQEAKLGIKPHIQRLLDQGILVPCQSPWNTPLLPVKKPGTNDYRPVQDLREVNKRVEDIHPTVPNPYNLLSGLPPSHRWYTVLDLKDAFFCLRLHPTSQPLFAFEWRDPGMGISGQLTWTRLPQGFKNSPTLFNEALHRDLADFRIQHPDLILLQYVDDILLAATSELDCQQGTRALLLTLGNLGYRASAKKAQLCQKQVKYLGYLLKEGQRWLTEARKETVMGQPTPKTPRQLREFLGKAGFCRLFIPGFAEMAAPLYPLTKPGTLFNWGPDQQKAYQEIKQALLTAPALGLPDLTKPFELFVDEKQGYAKGVLTQKLGPWRRPVAYLSKKLDPVAAGWPPCLRMVAAIAVLRKDAGKLTMGQPLVILAPHAVEALVKQPPDRWLSNARMTHYQAMLLDTDRVQFGPVVALNPATLLPLPEEGAPHDCLEILAETHGTRPDLTDQPIPDADHTWYTDGSSFLQEGQRKAGAAVTTETEVIWARALPAGTSAQRAELIALTQALKMAEGKRLNVYTDSRYAFATAHIHGEIYRRRGWLTSEGREIKNKSEILALLKALFLPKRLSIIHCLGHQKGDSAEARGNRLADQAAREAAIKTPPDTSTLLAGKRTADGSEFEKRTADGSEFESPKKKAKVE

SEQ ID NO: 1859 - protein, 2096 aa, synthetic construct
MPAAKRVKLDGGDKKYSIGLDIGTNSVGWAVITDEYKVPSKKFKVLGNTDRHSIKKNLIGALLFDSGETAEATRLKRTARRRYTRRKNRICYLQEIFSNEMAKVDDSFFHRLEESFLVEEDKKHERHPIFGNIVDEVAYHEKYPTIYHLRKKLVDSTDKADLRLIYLALAHMIKFRGHFLIEGDLNPDNSDVDKLFIQLVQTYNQLFEENPINASGVDAKAILSARLSKSRRLENLIAQLPGEKKNGLFGNLIALSLGLTPNFKSNFDLAEDAKLQLSKDTYDDDLDNLLAQIGDQYADLFLAAKNLSDAILLSDILRVNTEITKAPLSASMIKRYDEHHQDLTLLKALVRQQLPEKYKEIFFDQSKNGYAGYIDGGASQEEFYKFIKPILEKMDGTEELLVKLNREDLLRKQRTFDNGSIPHQIHLGELHAILRRQEDFYPFLKDNREKIEKILTFRIPYYVGPLARGNSRFAWMTRKSEETITPWNFEEVVDKGASAQSFIERMTNFDKNLPNEKVLPKHSLLYEYFTVYNELTKVKYVTEGMRKPAFLSGEQKKAIVDLLFKTNRKVTVKQLKEDYFKKIECFDSVEISGVEDRFNASLGTYHDLLKIIKDKDFLDNEENEDILEDIVLTLTLFEDREMIEERLKTYAHLFDDKVMKQLKRRRYTGWGRLSRKLINGIRDKQSGKTILDFLKSDGFANRNFMQLIHDDSLTFKEDIQKAQVSGQGDSLHEHIANLAGSPAIKKGILQTVKVVDELVKVMGRHKPENIVIEMARENQTTQKGQKNSRERMKRIEEGIKELGSQILKEHPVENTQLQNEKLYLYYLQNGRDMYVDQELDINRLSDYDVDHIVPQSFLKDDSIDNKVLTRSDKARGKSDNVPSEEVVKKMKNYWRQLLNAKLITQRKFDNLTKAERGGLSELDKAGFIKRQLVETRQITKHVAQILDSRMNTKYDENDKLIREVKVITLKSKLVSDFRKDFQFYKVREINNYHHAHDAYLNAVVGTALIKKYPKLESEFVYGDYKVYDVRKMIAKSEQEIGKATAKYFFYSNIMNFFKTEITLANGEIRKRPLIETNGETGEIVWDKGRDFATVRKVLSMPQVNIVKKTEVQTGGFSKESILPKRNSDKLIARKKDWDPKKYGGFDSPTVAYSVLVVAKVEKGKSKKLKSVKELLGITIMERSSFEKNPIDFLEAKGYKEVKKDLIIKLPKYSLFELENGRKRMLASAGELQKGNELALPSKYVNFLYLASHYEKLKGSPEDNEQKQLFVEQHKHYLDEIIEQISEFSKRVILADANLDKVLSAYNKHRDKPIREQAENIIHLFTLTNLGAPAAFKYFDTTIDRKRYTSTKEVLDATLIHQSITGLYETRIDLSQLGGDGGGGSEAAAKGSSGGTLNLEDEYRLYETSAEPEVSPGSTWLSDFPQAWAETGGMGLAVRQAPLIIPLKATSTPVSIKQYPMSQEAKLGIKPHIQRLLDQGILVPCQSPWNTPLLPVKKPGTNDYRPVQDLREVNKRVEDIHPTVPNPYNLLSGLPPSHRWYTVLDLKDAFFCLRLHPTSQPLFAFEWRDPGMGISGQLTWTRLPQGFKNSPTLFNEALHRDLADFRIQHPDLILLQYVDDILLAATSELDCQQGTRALLLTLGNLGYRASAKKAQLCQKQVKYLGYLLKEGQRWLTEARKETVMGQPTPKTPRQLREFLGKAGFCRLFIPGFAEMAAPLYPLTKPGTLFNWGPDQQKAYQEIKQALLTAPALGLPDLTKPFELFVDEKQGYAKGVLTQKLGPWRRPVAYLSKKLDPVAAGWPPCLRMVAAIAVLRKDAGKLTMGQPLVILAPHAVEALVKQPPDRWLSNARMTHYQAMLLDTDRVQFGPVVALNPATLLPLPEEGAPHDCLEILAETHGTRPDLTDQPIPDADHTWYTDGSSFLQEGQRKAGAAVTTETEVIWARALPAGTSAQRAELIALTQALKMAEGKRLNVYTDSRYAFATAHIHGEIYRRRGWLTSEGREIKNKSEILALLKALFLPKRLSIIHCLGHQKGDSAEARGNRLADQAAREAAIKTPPDTSTLLAGKRTADGSEFEKRTADGSEFESPKKKAKVE

SEQ ID NO: 1860 - protein, 2100 aa, synthetic construct
MPAAKRVKLDGGDKKYSIGLDIGTNSVGWAVITDEYKVPSKKFKVLGNTDRHSIKKNLIGALLFDSGETAEATRLKRTARRRYTRRKNRICYLQEIFSNEMAKVDDSFFHRLEESFLVEEDKKHERHPIFGNIVDEVAYHEKYPTIYHLRKKLVDSTDKADLRLIYLALAHMIKFRGHFLIEGDLNPDNSDVDKLFIQLVQTYNQLFEENPINASGVDAKAILSARLSKSRRLENLIAQLPGEKKNGLFGNLIALSLGLTPNFKSNFDLAEDAKLQLSKDTYDDDLDNLLAQIGDQYADLFLAAKNLSDAILLSDILRVNTEITKAPLSASMIKRYDEHHQDLTLLKALVRQQLPEKYKEIFFDQSKNGYAGYIDGGASQEEFYKFIKPILEKMDGTEELLVKLNREDLLRKQRTFDNGSIPHQIHLGELHAILRRQEDFYPFLKDNREKIEKILTFRIPYYVGPLARGNSRFAWMTRKSEETITPWNFEEVVDKGASAQSFIERMTNFDKNLPNEKVLPKHSLLYEYFTVYNELTKVKYVTEGMRKPAFLSGEQKKAIVDLLFKTNRKVTVKQLKEDYFKKIECFDSVEISGVEDRFNASLGTYHDLLKIIKDKDFLDNEENEDILEDIVLTLTLFEDREMIEERLKTYAHLFDDKVMKQLKRRRYTGWGRLSRKLINGIRDKQSGKTILDFLKSDGFANRNFMQLIHDDSLTFKEDIQKAQVSGQGDSLHEHIANLAGSPAIKKGILQTVKVVDELVKVMGRHKPENIVIEMARENQTTQKGQKNSRERMKRIEEGIKELGSQILKEHPVENTQLQNEKLYLYYLQNGRDMYVDQELDINRLSDYDVDHIVPQSFLKDDSIDNKVLTRSDKARGKSDNVPSEEVVKKMKNYWRQLLNAKLITQRKFDNLTKAERGGLSELDKAGFIKRQLVETRQITKHVAQILDSRMNTKYDENDKLIREVKVITLKSKLVSDFRKDFQFYKVREINNYHHAHDAYLNAVVGTALIKKYPKLESEFVYGDYKVYDVRKMIAKSEQEIGKATAKYFFYSNIMNFFKTEITLANGEIRKRPLIETNGETGEIVWDKGRDFATVRKVLSMPQVNIVKKTEVQTGGFSKESILPKRNSDKLIARKKDWDPKKYGGFDSPTVAYSVLVVAKVEKGKSKKLKSVKELLGITIMERSSFEKNPIDFLEAKGYKEVKKDLIIKLPKYSLFELENGRKRMLASAGELQKGNELALPSKYVNFLYLASHYEKLKGSPEDNEQKQLFVEQHKHYLDEIIEQISEFSKRVILADANLDKVLSAYNKHRDKPIREQAENIIHLFTLTNLGAPAAFKYFDTTIDRKRYTSTKEVLDATLIHQSITGLYETRIDLSQLGGDGGEAAAKGGGGSEAAAKGGTLNLEDEYRLYETSAEPEVSPGSTWLSDFPQAWAETGGMGLAVRQAPLIIPLKATSTPVSIKQYPMSQEAKLGIKPHIQRLLDQGILVPCQSPWNTPLLPVKKPGTNDYRPVQDLREVNKRVEDIHPTVPNPYNLLSGLPPSHRWYTVLDLKDAFFCLRLHPTSQPLFAFEWRDPGMGISGQLTWTRLPQGFKNSPTLFNEALHRDLADFRIQHPDLILLQYVDDILLAATSELDCQQGTRALLLTLGNLGYRASAKKAQLCQKQVKYLGYLLKEGQRWLTEARKETVMGQPTPKTPRQLREFLGKAGFCRLFIPGFAEMAAPLYPLTKPGTLFNWGPDQQKAYQEIKQALLTAPALGLPDLTKPFELFVDEKQGYAKGVLTQKLGPWRRPVAYLSKKLDPVAAGWPPCLRMVAAIAVLRKDAGKLTMGQPLVILAPHAVEALVKQPPDRWLSNARMTHYQAMLLDTDRVQFGPVVALNPATLLPLPEEGAPHDCLEILAETHGTRPDLTDQPIPDADHTWYTDGSSFLQEGQRKAGAAVTTETEVIWARALPAGTSAQRAELIALTQALKMAEGKRLNVYTDSRYAFATAHIHGEIYRRRGWLTSEGREIKNKSEILALLKALFLPKRLSIIHCLGHQKGDSAEARGNRLADQAAREAAIKTPPDTSTLLAGKRTADGSEFEKRTADGSEFESPKKKAKVE

SEQ ID NO: 1861 - protein, 2096 aa, synthetic construct
MPAAKRVKLDGGDKKYSIGLDIGTNSVGWAVITDEYKVPSKKFKVLGNTDRHSIKKNLIGALLFDSGETAEATRLKRTARRRYTRRKNRICYLQEIFSNEMAKVDDSFFHRLEESFLVEEDKKHERHPIFGNIVDEVAYHEKYPTIYHLRKKLVDSTDKADLRLIYLALAHMIKFRGHFLIEGDLNPDNSDVDKLFIQLVQTYNQLFEENPINASGVDAKAILSARLSKSRRLENLIAQLPGEKKNGLFGNLIALSLGLTPNFKSNFDLAEDAKLQLSKDTYDDDLDNLLAQIGDQYADLFLAAKNLSDAILLSDILRVNTEITKAPLSASMIKRYDEHHQDLTLLKALVRQQLPEKYKEIFFDQSKNGYAGYIDGGASQEEFYKFIKPILEKMDGTEELLVKLNREDLLRKQRTFDNGSIPHQIHLGELHAILRRQEDFYPFLKDNREKIEKILTFRIPYYVGPLARGNSRFAWMTRKSEETITPWNFEEVVDKGASAQSFIERMTNFDKNLPNEKVLPKHSLLYEYFTVYNELTKVKYVTEGMRKPAFLSGEQKKAIVDLLFKTNRKVTVKQLKEDYFKKIECFDSVEISGVEDRFNASLGTYHDLLKIIKDKDFLDNEENEDILEDIVLTLTLFEDREMIEERLKTYAHLFDDKVMKQLKRRRYTGWGRLSRKLINGIRDKQSGKTILDFLKSDGFANRNFMQLIHDDSLTFKEDIQKAQVSGQGDSLHEHIANLAGSPAIKKGILQTVKVVDELVKVMGRHKPENIVIEMARENQTTQKGQKNSRERMKRIEEGIKELGSQILKEHPVENTQLQNEKLYLYYLQNGRDMYVDQELDINRLSDYDVDHIVPQSFLKDDSIDNKVLTRSDKARGKSDNVPSEEVVKKMKNYWRQLLNAKLITQRKFDNLTKAERGGLSELDKAGFIKRQLVETRQITKHVAQILDSRMNTKYDENDKLIREVKVITLKSKLVSDFRKDFQFYKVREINNYHHAHDAYLNAVVGTALIKKYPKLESEFVYGDYKVYDVRKMIAKSEQEIGKATAKYFFYSNIMNFFKTEITLANGEIRKRPLIETNGETGEIVWDKGRDFATVRKVLSMPQVNIVKKTEVQTGGFSKESILPKRNSDKLIARKKDWDPKKYGGFDSPTVAYSVLVVAKVEKGKSKKLKSVKELLGITIMERSSFEKNPIDFLEAKGYKEVKKDLIIKLPKYSLFELENGRKRMLASAGELQKGNELALPSKYVNFLYLASHYEKLKGSPEDNEQKQLFVEQHKHYLDEIIEQISEFSKRVILADANLDKVLSAYNKHRDKPIREQAENIIHLFTLTNLGAPAAFKYFDTTIDRKRYTSTKEVLDATLIHQSITGLYETRIDLSQLGGDGGGSSEAAAKGGGGGTLNLEDEYRLYETSAEPEVSPGSTWLSDFPQAWAETGGMGLAVRQAPLIIPLKATSTPVSIKQYPMSQEAKLGIKPHIQRLLDQGILVPCQSPWNTPLLPVKKPGTNDYRPVQDLREVNKRVEDIHPTVPNPYNLLSGLPPSHRWYTVLDLKDAFFCLRLHPTSQPLFAFEWRDPGMGISGQLTWTRLPQGFKNSPTLFNEALHRDLADFRIQHPDLILLQYVDDILLAATSELDCQQGTRALLLTLGNLGYRASAKKAQLCQKQVKYLGYLLKEGQRWLTEARKETVMGQPTPKTPRQLREFLGKAGFCRLFIPGFAEMAAPLYPLTKPGTLFNWGPDQQKAYQEIKQALLTAPALGLPDLTKPFELFVDEKQGYAKGVLTQKLGPWRRPVAYLSKKLDPVAAGWPPCLRMVAAIAVLRKDAGKLTMGQPLVILAPHAVEALVKQPPDRWLSNARMTHYQAMLLDTDRVQFGPVVALNPATLLPLPEEGAPHDCLEILAETHGTRPDLTDQPIPDADHTWYTDGSSFLQEGQRKAGAAVTTETEVIWARALPAGTSAQRAELIALTQALKMAEGKRLNVYTDSRYAFATAHIHGEIYRRRGWLTSEGREIKNKSEILALLKALFLPKRLSIIHCLGHQKGDSAEARGNRLADQAAREAAIKTPPDTSTLLAGKRTADGSEFEKRTADGSEFESPKKKAKVE

SEQ ID NO: 1862 - protein, 2110 aa, synthetic construct
MPAAKRVKLDGGDKKYSIGLDIGTNSVGWAVITDEYKVPSKKFKVLGNTDRHSIKKNLIGALLFDSGETAEATRLKRTARRRYTRRKNRICYLQEIFSNEMAKVDDSFFHRLEESFLVEEDKKHERHPIFGNIVDEVAYHEKYPTIYHLRKKLVDSTDKADLRLIYLALAHMIKFRGHFLIEGDLNPDNSDVDKLFIQLVQTYNQLFEENPINASGVDAKAILSARLSKSRRLENLIAQLPGEKKNGLFGNLIALSLGLTPNFKSNFDLAEDAKLQLSKDTYDDDLDNLLAQIGDQYADLFLAAKNLSDAILLSDILRVNTEITKAPLSASMIKRYDEHHQDLTLLKALVRQQLPEKYKEIFFDQSKNGYAGYIDGGASQEEFYKFIKPILEKMDGTEELLVKLNREDLLRKQRTFDNGSIPHQIHLGELHAILRRQEDFYPFLKDNREKIEKILTFRIPYYVGPLARGNSRFAWMTRKSEETITPWNFEEVVDKGASAQSFIERMTNFDKNLPNEKVLPKHSLLYEYFTVYNELTKVKYVTEGMRKPAFLSGEQKKAIVDLLFKTNRKVTVKQLKEDYFKKIECFDSVEISGVEDRFNASLGTYHDLLKIIKDKDFLDNEENEDILEDIVLTLTLFEDREMIEERLKTYAHLFDDKVMKQLKRRRYTGWGRLSRKLINGIRDKQSGKTILDFLKSDGFANRNFMQLIHDDSLTFKEDIQKAQVSGQGDSLHEHIANLAGSPAIKKGILQTVKVVDELVKVMGRHKPENIVIEMARENQTTQKGQKNSRERMKRIEEGIKELGSQILKEHPVENTQLQNEKLYLYYLQNGRDMYVDQELDINRLSDYDVDHIVPQSFLKDDSIDNKVLTRSDKARGKSDNVPSEEVVKKMKNYWRQLLNAKLITQRKFDNLTKAERGGLSELDKAGFIKRQLVETRQITKHVAQILDSRMNTKYDENDKLIREVKVITLKSKLVSDFRKDFQFYKVREINNYHHAHDAYLNAVVGTALIKKYPKLESEFVYGDYKVYDVRKMIAKSEQEIGKATAKYFFYSNIMNFFKTEITLANGEIRKRPLIETNGETGEIVWDKGRDFATVRKVLSMPQVNIVKKTEVQTGGFSKESILPKRNSDKLIARKKDWDPKKYGGFDSPTVAYSVLVVAKVEKGKSKKLKSVKELLGITIMERSSFEKNPIDFLEAKGYKEVKKDLIIKLPKYSLFELENGRKRMLASAGELQKGNELALPSKYVNFLYLASHYEKLKGSPEDNEQKQLFVEQHKHYLDEIIEQISEFSKRVILADANLDKVLSAYNKHRDKPIREQAENIIHLFTLTNLGAPAAFKYFDTTIDRKRYTSTKEVLDATLIHQSITGLYETRIDLSQLGGDGGEAAAKEAAAKEAAAKEAAAKEAAAKGGTLNLEDEYRLYETSAEPEVSPGSTWLSDFPQAWAETGGMGLAVRQAPLIIPLKATSTPVSIKQYPMSQEAKLGIKPHIQRLLDQGILVPCQSPWNTPLLPVKKPGTNDYRPVQDLREVNKRVEDIHPTVPNPYNLLSGLPPSHRWYTVLDLKDAFFCLRLHPTSQPLFAFEWRDPGMGISGQLTWTRLPQGFKNSPTLFNEALHRDLADFRIQHPDLILLQYVDDILLAATSELDCQQGTRALLLTLGNLGYRASAKKAQLCQKQVKYLGYLLKEGQRWLTEARKETVMGQPTPKTPRQLREFLGKAGFCRLFIPGFAEMAAPLYPLTKPGTLFNWGPDQQKAYQEIKQALLTAPALGLPDLTKPFELFVDEKQGYAKGVLTQKLGPWRRPVAYLSKKLDPVAAGWPPCLRMVAAIAVLRKDAGKLTMGQPLVILAPHAVEALVKQPPDRWLSNARMTHYQAMLLDTDRVQFGPVVALNPATLLPLPEEGAPHDCLEILAETHGTRPDLTDQPIPDADHTWYTDGSSFLQEGQRKAGAAVTTETEVIWARALPAGTSAQRAELIALTQALKMAEGKRLNVYTDSRYAFATAHIHGEIYRRRGWLTSEGREIKNKSEILALLKALFLPKRLSIIHCLGHQKGDSAEARGNRLADQAAREAAIKTPPDTSTLLAGKRTADGSEFEKRTADGSEFESPKKKAKVE

SEQ ID NO: 1863 - protein, 2098 aa, synthetic construct
MPAAKRVKLDGGDKKYSIGLDIGTNSVGWAVITDEYKVPSKKFKVLGNTDRHSIKKNLIGALLFDSGETAEATRLKRTARRRYTRRKNRICYLQEIFSNEMAKVDDSFFHRLEESFLVEEDKKHERHPIFGNIVDEVAYHEKYPTIYHLRKKLVDSTDKADLRLIYLALAHMIKFRGHFLIEGDLNPDNSDVDKLFIQLVQTYNQLFEENPINASGVDAKAILSARLSKSRRLENLIAQLPGEKKNGLFGNLIALSLGLTPNFKSNFDLAEDAKLQLSKDTYDDDLDNLLAQIGDQYADLFLAAKNLSDAILLSDILRVNTEITKAPLSASMIKRYDEHHQDLTLLKALVRQQLPEKYKEIFFDQSKNGYAGYIDGGASQEEFYKFIKPILEKMDGTEELLVKLNREDLLRKQRTFDNGSIPHQIHLGELHAILRRQEDFYPFLKDNREKIEKILTFRIPYYVGPLARGNSRFAWMTRKSEETITPWNFEEVVDKGASAQSFIERMTNFDKNLPNEKVLPKHSLLYEYFTVYNELTKVKYVTEGMRKPAFLSGEQKKAIVDLLFKTNRKVTVKQLKEDYFKKIECFDSVEISGVEDRFNASLGTYHDLLKIIKDKDFLDNEENEDILEDIVLTLTLFEDREMIEERLKTYAHLFDDKVMKQLKRRRYTGWGRLSRKLINGIRDKQSGKTILDFLKSDGFANRNFMQLIHDDSLTFKEDIQKAQVSGQGDSLHEHIANLAGSPAIKKGILQTVKVVDELVKVMGRHKPENIVIEMARENQTTQKGQKNSRERMKRIEEGIKELGSQILKEHPVENTQLQNEKLYLYYLQNGRDMYVDQELDINRLSDYDVDHIVPQSFLKDDSIDNKVLTRSDKARGKSDNVPSEEVVKKMKNYWRQLLNAKLITQRKFDNLTKAERGGLSELDKAGFIKRQLVETRQITKHVAQILDSRMNTKYDENDKLIREVKVITLKSKLVSDFRKDFQFYKVREINNYHHAHDAYLNAVVGTALIKKYPKLESEFVYGDYKVYDVRKMIAKSEQEIGKATAKYFFYSNIMNFFKTEITLANGEIRKRPLIETNGETGEIVWDKGRDFATVRKVLSMPQVNIVKKTEVQTGGFSKESILPKRNSDKLIARKKDWDPKKYGGFDSPTVAYSVLVVAKVEKGKSKKLKSVKELLGITIMERSSFEKNPIDFLEAKGYKEVKKDLIIKLPKYSLFELENGRKRMLASAGELQKGNELALPSKYVNFLYLASHYEKLKGSPEDNEQKQLFVEQHKHYLDEIIEQISEFSKRVILADANLDKVLSAYNKHRDKPIREQAENIIHLFTLTNLGAPAAFKYFDTTIDRKRYTSTKEVLDATLIHQSITGLYETRIDLSQLGGDGGPAPAPAPAPAPAPGGTLNLEDEYRLYETSAEPEVSPGSTWLSDFPQAWAETGGMGLAVRQAPLIIPLKATSTPVSIKQYPMSQEAKLGIKPHIQRLLDQGILVPCQSPWNTPLLPVKKPGTNDYRPVQDLREVNKRVEDIHPTVPNPYNLLSGLPPSHRWYTVLDLKDAFFCLRLHPTSQPLFAFEWRDPGMGISGQLTWTRLPQGFKNSPTLFNEALHRDLADFRIQHPDLILLQYVDDILLAATSELDCQQGTRALLLTLGNLGYRASAKKAQLCQKQVKYLGYLLKEGQRWLTEARKETVMGQPTPKTPRQLREFLGKAGFCRLFIPGFAEMAAPLYPLTKPGTLFNWGPDQQKAYQEIKQALLTAPALGLPDLTKPFELFVDEKQGYAKGVLTQKLGPWRRPVAYLSKKLDPVAAGWPPCLRMVAAIAVLRKDAGKLTMGQPLVILAPHAVEALVKQPPDRWLSNARMTHYQAMLLDTDRVQFGPVVALNPATLLPLPEEGAPHDCLEILAETHGTRPDLTDQPIPDADHTWYTDGSSFLQEGQRKAGAAVTTETEVIWARALPAGTSAQRAELIALTQALKMAEGKRLNVYTDSRYAFATAHIHGEIYRRRGWLTSEGREIKNKSEILALLKALFLPKRLSIIHCLGHQKGDSAEARGNRLADQAAREAAIKTPPDTSTLLAGKRTADGSEFEKRTADGSEFESPKKKAKVE

SEQ ID NO: 1864 - protein, 2096 aa, synthetic construct
MPAAKRVKLDGGDKKYSIGLDIGTNSVGWAVITDEYKVPSKKFKVLGNTDRHSIKKNLIGALLFDSGETAEATRLKRTARRRYTRRKNRICYLQEIFSNEMAKVDDSFFHRLEESFLVEEDKKHERHPIFGNIVDEVAYHEKYPTIYHLRKKLVDSTDKADLRLIYLALAHMIKFRGHFLIEGDLNPDNSDVDKLFIQLVQTYNQLFEENPINASGVDAKAILSARLSKSRRLENLIAQLPGEKKNGLFGNLIALSLGLTPNFKSNFDLAEDAKLQLSKDTYDDDLDNLLAQIGDQYADLFLAAKNLSDAILLSDILRVNTEITKAPLSASMIKRYDEHHQDLTLLKALVRQQLPEKYKEIFFDQSKNGYAGYIDGGASQEEFYKFIKPILEKMDGTEELLVKLNREDLLRKQRTFDNGSIPHQIHLGELHAILRRQEDFYPFLKDNREKIEKILTFRIPYYVGPLARGNSRFAWMTRKSEETITPWNFEEVVDKGASAQSFIERMTNFDKNLPNEKVLPKHSLLYEYFTVYNELTKVKYVTEGMRKPAFLSGEQKKAIVDLLFKTNRKVTVKQLKEDYFKKIECFDSVEISGVEDRFNASLGTYHDLLKIIKDKDFLDNEENEDILEDIVLTLTLFEDREMIEERLKTYAHLFDDKVMKQLKRRRYTGWGRLSRKLINGIRDKQSGKTILDFLKSDGFANRNFMQLIHDDSLTFKEDIQKAQVSGQGDSLHEHIANLAGSPAIKKGILQTVKVVDELVKVMGRHKPENIVIEMARENQTTQKGQKNSRERMKRIEEGIKELGSQILKEHPVENTQLQNEKLYLYYLQNGRDMYVDQELDINRLSDYDVDHIVPQSFLKDDSIDNKVLTRSDKARGKSDNVPSEEVVKKMKNYWRQLLNAKLITQRKFDNLTKAERGGLSELDKAGFIKRQLVETRQITKHVAQILDSRMNTKYDENDKLIREVKVITLKSKLVSDFRKDFQFYKVREINNYHHAHDAYLNAVVGTALIKKYPKLESEFVYGDYKVYDVRKMIAKSEQEIGKATAKYFFYSNIMNFFKTEITLANGEIRKRPLIETNGETGEIVWDKGRDFATVRKVLSMPQVNIVKKTEVQTGGFSKESILPKRNSDKLIARKKDWDPKKYGGFDSPTVAYSVLVVAKVEKGKSKKLKSVKELLGITIMERSSFEKNPIDFLEAKGYKEVKKDLIIKLPKYSLFELENGRKRMLASAGELQKGNELALPSKYVNFLYLASHYEKLKGSPEDNEQKQLFVEQHKHYLDEIIEQISEFSKRVILADANLDKVLSAYNKHRDKPIREQAENIIHLFTLTNLGAPAAFKYFDTTIDRKRYTSTKEVLDATLIHQSITGLYETRIDLSQLGGDGGPAPEAAAKGGGGGTLNLEDEYRLYETSAEPEVSPGSTWLSDFPQAWAETGGMGLAVRQAPLIIPLKATSTPVSIKQYPMSQEAKLGIKPHIQRLLDQGILVPCQSPWNTPLLPVKKPGTNDYRPVQDLREVNKRVEDIHPTVPNPYNLLSGLPPSHRWYTVLDLKDAFFCLRLHPTSQPLFAFEWRDPGMGISGQLTWTRLPQGFKNSPTLFNEALHRDLADFRIQHPDLILLQYVDDILLAATSELDCQQGTRALLLTLGNLGYRASAKKAQLCQKQVKYLGYLLKEGQRWLTEARKETVMGQPTPKTPRQLREFLGKAGFCRLFIPGFAEMAAPLYPLTKPGTLFNWGPDQQKAYQEIKQALLTAPALGLPDLTKPFELFVDEKQGYAKGVLTQKLGPWRRPVAYLSKKLDPVAAGWPPCLRMVAAIAVLRKDAGKLTMGQPLVILAPHAVEALVKQPPDRWLSNARMTHYQAMLLDTDRVQFGPVVALNPATLLPLPEEGAPHDCLEILAETHGTRPDLTDQPIPDADHTWYTDGSSFLQEGQRKAGAAVTTETEVIWARALPAGTSAQRAELIALTQALKMAEGKRLNVYTDSRYAFATAHIHGEIYRRRGWLTSEGREIKNKSEILALLKALFLPKRLSIIHCLGHQKGDSAEARGNRLADQAAREAAIKTPPDTSTLLAGKRTADGSEFEKRTADGSEFESPKKKAKVE

SEQ ID NO: 1865 - protein, 2105 aa, synthetic construct
MPAAKRVKLDGGDKKYSIGLDIGTNSVGWAVITDEYKVPSKKFKVLGNTDRHSIKKNLIGALLFDSGETAEATRLKRTARRRYTRRKNRICYLQEIFSNEMAKVDDSFFHRLEESFLVEEDKKHERHPIFGNIVDEVAYHEKYPTIYHLRKKLVDSTDKADLRLIYLALAHMIKFRGHFLIEGDLNPDNSDVDKLFIQLVQTYNQLFEENPINASGVDAKAILSARLSKSRRLENLIAQLPGEKKNGLFGNLIALSLGLTPNFKSNFDLAEDAKLQLSKDTYDDDLDNLLAQIGDQYADLFLAAKNLSDAILLSDILRVNTEITKAPLSASMIKRYDEHHQDLTLLKALVRQQLPEKYKEIFFDQSKNGYAGYIDGGASQEEFYKFIKPILEKMDGTEELLVKLNREDLLRKQRTFDNGSIPHQIHLGELHAILRRQEDFYPFLKDNREKIEKILTFRIPYYVGPLARGNSRFAWMTRKSEETITPWNFEEVVDKGASAQSFIERMTNFDKNLPNEKVLPKHSLLYEYFTVYNELTKVKYVTEGMRKPAFLSGEQKKAIVDLLFKTNRKVTVKQLKEDYFKKIECFDSVEISGVEDRFNASLGTYHDLLKIIKDKDFLDNEENEDILEDIVLTLTLFEDREMIEERLKTYAHLFDDKVMKQLKRRRYTGWGRLSRKLINGIRDKQSGKTILDFLKSDGFANRNFMQLIHDDSLTFKEDIQKAQVSGQGDSLHEHIANLAGSPAIKKGILQTVKVVDELVKVMGRHKPENIVIEMARENQTTQKGQKNSRERMKRIEEGIKELGSQILKEHPVENTQLQNEKLYLYYLQNGRDMYVDQELDINRLSDYDVDHIVPQSFLKDDSIDNKVLTRSDKARGKSDNVPSEEVVKKMKNYWRQLLNAKLITQRKFDNLTKAERGGLSELDKAGFIKRQLVETRQITKHVAQILDSRMNTKYDENDKLIREVKVITLKSKLVSDFRKDFQFYKVREINNYHHAHDAYLNAVVGTALIKKYPKLESEFVYGDYKVYDVRKMIAKSEQEIGKATAKYFFYSNIMNFFKTEITLANGEIRKRPLIETNGETGEIVWDKGRDFATVRKVLSMPQVNIVKKTEVQTGGFSKESILPKRNSDKLIARKKDWDPKKYGGFDSPTVAYSVLVVAKVEKGKSKKLKSVKELLGITIMERSSFEKNPIDFLEAKGYKEVKKDLIIKLPKYSLFELENGRKRMLASAGELQKGNELALPSKYVNFLYLASHYEKLKGSPEDNEQKQLFVEQHKHYLDEIIEQISEFSKRVILADANLDKVLSAYNKHRDKPIREQAENIIHLFTLTNLGAPAAFKYFDTTIDRKRYTSTKEVLDATLIHQSITGLYETRIDLSQLGGDGGEAAAKEAAAKEAAAKEAAAKGGTLNLEDEYRLYETSAEPEVSPGSTWLSDFPQAWAETGGMGLAVRQAPLIIPLKATSTPVSIKQYPMSQEAKLGIKPHIQRLLDQGILVPCQSPWNTPLLPVKKPGTNDYRPVQDLREVNKRVEDIHPTVPNPYNLLSGLPPSHRWYTVLDLKDAFFCLRLHPTSQPLFAFEWRDPGMGISGQLTWTRLPQGFKNSPTLFNEALHRDLADFRIQHPDLILLQYVDDILLAATSELDCQQGTRALLLTLGNLGYRASAKKAQLCQKQVKYLGYLLKEGQRWLTEARKETVMGQPTPKTPRQLREFLGKAGFCRLFIPGFAEMAAPLYPLTKPGTLFNWGPDQQKAYQEIKQALLTAPALGLPDLTKPFELFVDEKQGYAKGVLTQKLGPWRRPVAYLSKKLDPVAAGWPPCLRMVAAIAVLRKDAGKLTMGQPLVILAPHAVEALVKQPPDRWLSNARMTHYQAMLLDTDRVQFGPVVALNPATLLPLPEEGAPHDCLEILAETHGTRPDLTDQPIPDADHTWYTDGSSFLQEGQRKAGAAVTTETEVIWARALPAGTSAQRAELIALTQALKMAEGKRLNVYTDSRYAFATAHIHGEIYRRRGWLTSEGREIKNKSEILALLKALFLPKRLSIIHCLGHQKGDSAEARGNRLADQAAREAAIKTPPDTSTLLAGKRTADGSEFEKRTADGSEFESPKKKAKVE

SEQ ID NO: 1866 - protein, 2096 aa, synthetic construct
MPAAKRVKLDGGDKKYSIGLDIGTNSVGWAVITDEYKVPSKKFKVLGNTDRHSIKKNLIGALLFDSGETAEATRLKRTARRRYTRRKNRICYLQEIFSNEMAKVDDSFFHRLEESFLVEEDKKHERHPIFGNIVDEVAYHEKYPTIYHLRKKLVDSTDKADLRLIYLALAHMIKFRGHFLIEGDLNPDNSDVDKLFIQLVQTYNQLFEENPINASGVDAKAILSARLSKSRRLENLIAQLPGEKKNGLFGNLIALSLGLTPNFKSNFDLAEDAKLQLSKDTYDDDLDNLLAQIGDQYADLFLAAKNLSDAILLSDILRVNTEITKAPLSASMIKRYDEHHQDLTLLKALVRQQLPEKYKEIFFDQSKNGYAGYIDGGASQEEFYKFIKPILEKMDGTEELLVKLNREDLLRKQRTFDNGSIPHQIHLGELHAILRRQEDFYPFLKDNREKIEKILTFRIPYYVGPLARGNSRFAWMTRKSEETITPWNFEEVVDKGASAQSFIERMTNFDKNLPNEKVLPKHSLLYEYFTVYNELTKVKYVTEGMRKPAFLSGEQKKAIVDLLFKTNRKVTVKQLKEDYFKKIECFDSVEISGVEDRFNASLGTYHDLLKIIKDKDFLDNEENEDILEDIVLTLTLFEDREMIEERLKTYAHLFDDKVMKQLKRRRYTGWGRLSRKLINGIRDKQSGKTILDFLKSDGFANRNFMQLIHDDSLTFKEDIQKAQVSGQGDSLHEHIANLAGSPAIKKGILQTVKVVDELVKVMGRHKPENIVIEMARENQTTQKGQKNSRERMKRIEEGIKELGSQILKEHPVENTQLQNEKLYLYYLQNGRDMYVDQELDINRLSDYDVDHIVPQSFLKDDSIDNKVLTRSDKARGKSDNVPSEEVVKKMKNYWRQLLNAKLITQRKFDNLTKAERGGLSELDKAGFIKRQLVETRQITKHVAQILDSRMNTKYDENDKLIREVKVITLKSKLVSDFRKDFQFYKVREINNYHHAHDAYLNAVVGTALIKKYPKLESEFVYGDYKVYDVRKMIAKSEQEIGKATAKYFFYSNIMNFFKTEITLANGEIRKRPLIETNGETGEIVWDKGRDFATVRKVLSMPQVNIVKKTEVQTGGFSKESILPKRNSDKLIARKKDWDPKKYGGFDSPTVAYSVLVVAKVEKGKSKKLKSVKELLGITIMERSSFEKNPIDFLEAKGYKEVKKDLIIKLPKYSLFELENGRKRMLASAGELQKGNELALPSKYVNFLYLASHYEKLKGSPEDNEQKQLFVEQHKHYLDEIIEQISEFSKRVILADANLDKVLSAYNKHRDKPIREQAENIIHLFTLTNLGAPAAFKYFDTTIDRKRYTSTKEVLDATLIHQSITGLYETRIDLSQLGGDGGPAPGGSEAAAKGGTLNLEDEYRLYETSAEPEVSPGSTWLSDFPQAWAETGGMGLAVRQAPLIIPLKATSTPVSIKQYPMSQEAKLGIKPHIQRLLDQGILVPCQSPWNTPLLPVKKPGTNDYRPVQDLREVNKRVEDIHPTVPNPYNLLSGLPPSHRWYTVLDLKDAFFCLRLHPTSQPLFAFEWRDPGMGISGQLTWTRLPQGFKNSPTLFNEALHRDLADFRIQHPDLILLQYVDDILLAATSELDCQQGTRALLLTLGNLGYRASAKKAQLCQKQVKYLGYLLKEGQRWLTEARKETVMGQPTPKTPRQLREFLGKAGFCRLFIPGFAEMAAPLYPLTKPGTLFNWGPDQQKAYQEIKQALLTAPALGLPDLTKPFELFVDEKQGYAKGVLTQKLGPWRRPVAYLSKKLDPVAAGWPPCLRMVAAIAVLRKDAGKLTMGQPLVILAPHAVEALVKQPPDRWLSNARMTHYQAMLLDTDRVQFGPVVALNPATLLPLPEEGAPHDCLEILAETHGTRPDLTDQPIPDADHTWYTDGSSFLQEGQRKAGAAVTTETEVIWARALPAGTSAQRAELIALTQALKMAEGKRLNVYTDSRYAFATAHIHGEIYRRRGWLTSEGREIKNKSEILALLKALFLPKRLSIIHCLGHQKGDSAEARGNRLADQAAREAAIKTPPDTSTLLAGKRTADGSEFEKRTADGSEFESPKKKAKVE

SEQ ID NO: 1867 - protein, 2096 aa, synthetic construct
MPAAKRVKLDGGDKKYSIGLDIGTNSVGWAVITDEYKVPSKKFKVLGNTDRHSIKKNLIGALLFDSGETAEATRLKRTARRRYTRRKNRICYLQEIFSNEMAKVDDSFFHRLEESFLVEEDKKHERHPIFGNIVDEVAYHEKYPTIYHLRKKLVDSTDKADLRLIYLALAHMIKFRGHFLIEGDLNPDNSDVDKLFIQLVQTYNQLFEENPINASGVDAKAILSARLSKSRRLENLIAQLPGEKKNGLFGNLIALSLGLTPNFKSNFDLAEDAKLQLSKDTYDDDLDNLLAQIGDQYADLFLAAKNLSDAILLSDILRVNTEITKAPLSASMIKRYDEHHQDLTLLKALVRQQLPEKYKEIFFDQSKNGYAGYIDGGASQEEFYKFIKPILEKMDGTEELLVKLNREDLLRKQRTFDNGSIPHQIHLGELHAILRRQEDFYPFLKDNREKIEKILTFRIPYYVGPLARGNSRFAWMTRKSEETITPWNFEEVVDKGASAQSFIERMTNFDKNLPNEKVLPKHSLLYEYFTVYNELTKVKYVTEGMRKPAFLSGEQKKAIVDLLFKTNRKVTVKQLKEDYFKKIECFDSVEISGVEDRFNASLGTYHDLLKIIKDKDFLDNEENEDILEDIVLTLTLFEDREMIEERLKTYAHLFDDKVMKQLKRRRYTGWGRLSRKLINGIRDKQSGKTILDFLKSDGFANRNFMQLIHDDSLTFKEDIQKAQVSGQGDSLHEHIANLAGSPAIKKGILQTVKVVDELVKVMGRHKPENIVIEMARENQTTQKGQKNSRERMKRIEEGIKELGSQILKEHPVENTQLQNEKLYLYYLQNGRDMYVDQELDINRLSDYDVDHIVPQSFLKDDSIDNKVLTRSDKARGKSDNVPSEEVVKKMKNYWRQLLNAKLITQRKFDNLTKAERGGLSELDKAGFIKRQLVETRQITKHVAQILDSRMNTKYDENDKLIREVKVITLKSKLVSDFRKDFQFYKVREINNYHHAHDAYLNAVVGTALIKKYPKLESEFVYGDYKVYDVRKMIAKSEQEIGKATAKYFFYSNIMNFFKTEITLANGEIRKRPLIETNGETGEIVWDKGRDFATVRKVLSMPQVNIVKKTEVQTGGFSKESILPKRNSDKLIARKKDWDPKKYGGFDSPTVAYSVLVVAKVEKGKSKKLKSVKELLGITIMERSSFEKNPIDFLEAKGYKEVKKDLIIKLPKYSLFELENGRKRMLASAGELQKGNELALPSKYVNFLYLASHYEKLKGSPEDNEQKQLFVEQHKHYLDEIIEQISEFSKRVILADANLDKVLSAYNKHRDKPIREQAENIIHLFTLTNLGAPAAFKYFDTTIDRKRYTSTKEVLDATLIHQSITGLYETRIDLSQLGGDGGEAAAKGGGPAPGGTLNLEDEYRLYETSAEPEVSPGSTWLSDFPQAWAETGGMGLAVRQAPLIIPLKATSTPVSIKQYPMSQEAKLGIKPHIQRLLDQGILVPCQSPWNTPLLPVKKPGTNDYRPVQDLREVNKRVEDIHPTVPNPYNLLSGLPPSHRWYTVLDLKDAFFCLRLHPTSQPLFAFEWRDPGMGISGQLTWTRLPQGFKNSPTLFNEALHRDLADFRIQHPDLILLQYVDDILLAATSELDCQQGTRALLLTLGNLGYRASAKKAQLCQKQVKYLGYLLKEGQRWLTEARKETVMGQPTPKTPRQLREFLGKAGFCRLFIPGFAEMAAPLYPLTKPGTLFNWGPDQQKAYQEIKQALLTAPALGLPDLTKPFELFVDEKQGYAKGVLTQKLGPWRRPVAYLSKKLDPVAAGWPPCLRMVAAIAVLRKDAGKLTMGQPLVILAPHAVEALVKQPPDRWLSNARMTHYQAMLLDTDRVQFGPVVALNPATLLPLPEEGAPHDCLEILAETHGTRPDLTDQPIPDADHTWYTDGSSFLQEGQRKAGAAVTTETEVIWARALPAGTSAQRAELIALTQALKMAEGKRLNVYTDSRYAFATAHIHGEIYRRRGWLTSEGREIKNKSEILALLKALFLPKRLSIIHCLGHQKGDSAEARGNRLADQAAREAAIKTPPDTSTLLAGKRTADGSEFEKRTADGSEFESPKKKAKVE

SEQ ID NO: 1868 - protein, 2090 aa, synthetic construct
MPAAKRVKLDGGDKKYSIGLDIGTNSVGWAVITDEYKVPSKKFKVLGNTDRHSIKKNLIGALLFDSGETAEATRLKRTARRRYTRRKNRICYLQEIFSNEMAKVDDSFFHRLEESFLVEEDKKHERHPIFGNIVDEVAYHEKYPTIYHLRKKLVDSTDKADLRLIYLALAHMIKFRGHFLIEGDLNPDNSDVDKLFIQLVQTYNQLFEENPINASGVDAKAILSARLSKSRRLENLIAQLPGEKKNGLFGNLIALSLGLTPNFKSNFDLAEDAKLQLSKDTYDDDLDNLLAQIGDQYADLFLAAKNLSDAILLSDILRVNTEITKAPLSASMIKRYDEHHQDLTLLKALVRQQLPEKYKEIFFDQSKNGYAGYIDGGASQEEFYKFIKPILEKMDGTEELLVKLNREDLLRKQRTFDNGSIPHQIHLGELHAILRRQEDFYPFLKDNREKIEKILTFRIPYYVGPLARGNSRFAWMTRKSEETITPWNFEEVVDKGASAQSFIERMTNFDKNLPNEKVLPKHSLLYEYFTVYNELTKVKYVTEGMRKPAFLSGEQKKAIVDLLFKTNRKVTVKQLKEDYFKKIECFDSVEISGVEDRFNASLGTYHDLLKIIKDKDFLDNEENEDILEDIVLTLTLFEDREMIEERLKTYAHLFDDKVMKQLKRRRYTGWGRLSRKLINGIRDKQSGKTILDFLKSDGFANRNFMQLIHDDSLTFKEDIQKAQVSGQGDSLHEHIANLAGSPAIKKGILQTVKVVDELVKVMGRHKPENIVIEMARENQTTQKGQKNSRERMKRIEEGIKELGSQILKEHPVENTQLQNEKLYLYYLQNGRDMYVDQELDINRLSDYDVDHIVPQSFLKDDSIDNKVLTRSDKARGKSDNVPSEEVVKKMKNYWRQLLNAKLITQRKFDNLTKAERGGLSELDKAGFIKRQLVETRQITKHVAQILDSRMNTKYDENDKLIREVKVITLKSKLVSDFRKDFQFYKVREINNYHHAHDAYLNAVVGTALIKKYPKLESEFVYGDYKVYDVRKMIAKSEQEIGKATAKYFFYSNIMNFFKTEITLANGEIRKRPLIETNGETGEIVWDKGRDFATVRKVLSMPQVNIVKKTEVQTGGFSKESILPKRNSDKLIARKKDWDPKKYGGFDSPTVAYSVLVVAKVEKGKSKKLKSVKELLGITIMERSSFEKNPIDFLEAKGYKEVKKDLIIKLPKYSLFELENGRKRMLASAGELQKGNELALPSKYVNFLYLASHYEKLKGSPEDNEQKQLFVEQHKHYLDEIIEQISEFSKRVILADANLDKVLSAYNKHRDKPIREQAENIIHLFTLTNLGAPAAFKYFDTTIDRKRYTSTKEVLDATLIHQSITGLYETRIDLSQLGGDGGEAAAKGGTLNLEDEYRLYETSAEPEVSPGSTWLSDFPQAWAETGGMGLAVRQAPLIIPLKATSTPVSIKQYPMSQEAKLGIKPHIQRLLDQGILVPCQSPWNTPLLPVKKPGTNDYRPVQDLREVNKRVEDIHPTVPNPYNLLSGLPPSHRWYTVLDLKDAFFCLRLHPTSQPLFAFEWRDPGMGISGQLTWTRLPQGFKNSPTLFNEALHRDLADFRIQHPDLILLQYVDDILLAATSELDCQQGTRALLLTLGNLGYRASAKKAQLCQKQVKYLGYLLKEGQRWLTEARKETVMGQPTPKTPRQLREFLGKAGFCRLFIPGFAEMAAPLYPLTKPGTLFNWGPDQQKAYQEIKQALLTAPALGLPDLTKPFELFVDEKQGYAKGVLTQKLGPWRRPVAYLSKKLDPVAAGWPPCLRMVAAIAVLRKDAGKLTMGQPLVILAPHAVEALVKQPPDRWLSNARMTHYQAMLLDTDRVQFGPVVALNPATLLPLPEEGAPHDCLEILAETHGTRPDLTDQPIPDADHTWYTDGSSFLQEGQRKAGAAVTTETEVIWARALPAGTSAQRAELIALTQALKMAEGKRLNVYTDSRYAFATAHIHGEIYRRRGWLTSEGREIKNKSEILALLKALFLPKRLSIIHCLGHQKGDSAEARGNRLADQAAREAAIKTPPDTSTLLAGKRTADGSEFEKRTADGSEFESPKKKAKVE

SEQ ID NO: 1869 - protein, 2096 aa, synthetic construct
MPAAKRVKLDGGDKKYSIGLDIGTNSVGWAVITDEYKVPSKKFKVLGNTDRHSIKKNLIGALLFDSGETAEATRLKRTARRRYTRRKNRICYLQEIFSNEMAKVDDSFFHRLEESFLVEEDKKHERHPIFGNIVDEVAYHEKYPTIYHLRKKLVDSTDKADLRLIYLALAHMIKFRGHFLIEGDLNPDNSDVDKLFIQLVQTYNQLFEENPINASGVDAKAILSARLSKSRRLENLIAQLPGEKKNGLFGNLIALSLGLTPNFKSNFDLAEDAKLQLSKDTYDDDLDNLLAQIGDQYADLFLAAKNLSDAILLSDILRVNTEITKAPLSASMIKRYDEHHQDLTLLKALVRQQLPEKYKEIFFDQSKNGYAGYIDGGASQEEFYKFIKPILEKMDGTEELLVKLNREDLLRKQRTFDNGSIPHQIHLGELHAILRRQEDFYPFLKDNREKIEKILTFRIPYYVGPLARGNSRFAWMTRKSEETITPWNFEEVVDKGASAQSFIERMTNFDKNLPNEKVLPKHSLLYEYFTVYNELTKVKYVTEGMRKPAFLSGEQKKAIVDLLFKTNRKVTVKQLKEDYFKKIECFDSVEISGVEDRFNASLGTYHDLLKIIKDKDFLDNEENEDILEDIVLTLTLFEDREMIEERLKTYAHLFDDKVMKQLKRRRYTGWGRLSRKLINGIRDKQSGKTILDFLKSDGFANRNFMQLIHDDSLTFKEDIQKAQVSGQGDSLHEHIANLAGSPAIKKGILQTVKVVDELVKVMGRHKPENIVIEMARENQTTQKGQKNSRERMKRIEEGIKELGSQILKEHPVENTQLQNEKLYLYYLQNGRDMYVDQELDINRLSDYDVDHIVPQSFLKDDSIDNKVLTRSDKARGKSDNVPSEEVVKKMKNYWRQLLNAKLITQRKFDNLTKAERGGLSELDKAGFIKRQLVETRQITKHVAQILDSRMNTKYDENDKLIREVKVITLKSKLVSDFRKDFQFYKVREINNYHHAHDAYLNAVVGTALIKKYPKLESEFVYGDYKVYDVRKMIAKSEQEIGKATAKYFFYSNIMNFFKTEITLANGEIRKRPLIETNGETGEIVWDKGRDFATVRKVLSMPQVNIVKKTEVQTGGFSKESILPKRNSDKLIARKKDWDPKKYGGFDSPTVAYSVLVVAKVEKGKSKKLKSVKELLGITIMERSSFEKNPIDFLEAKGYKEVKKDLIIKLPKYSLFELENGRKRMLASAGELQKGNELALPSKYVNFLYLASHYEKLKGSPEDNEQKQLFVEQHKHYLDEIIEQISEFSKRVILADANLDKVLSAYNKHRDKPIREQAENIIHLFTLTNLGAPAAFKYFDTTIDRKRYTSTKEVLDATLIHQSITGLYETRIDLSQLGGDGGEAAAKGGGGSSGGTLNLEDEYRLYETSAEPEVSPGSTWLSDFPQAWAETGGMGLAVRQAPLIIPLKATSTPVSIKQYPMSQEAKLGIKPHIQRLLDQGILVPCQSPWNTPLLPVKKPGTNDYRPVQDLREVNKRVEDIHPTVPNPYNLLSGLPPSHRWYTVLDLKDAFFCLRLHPTSQPLFAFEWRDPGMGISGQLTWTRLPQGFKNSPTLFNEALHRDLADFRIQHPDLILLQYVDDILLAATSELDCQQGTRALLLTLGNLGYRASAKKAQLCQKQVKYLGYLLKEGQRWLTEARKETVMGQPTPKTPRQLREFLGKAGFCRLFIPGFAEMAAPLYPLTKPGTLFNWGPDQQKAYQEIKQALLTAPALGLPDLTKPFELFVDEKQGYAKGVLTQKLGPWRRPVAYLSKKLDPVAAGWPPCLRMVAAIAVLRKDAGKLTMGQPLVILAPHAVEALVKQPPDRWLSNARMTHYQAMLLDTDRVQFGPVVALNPATLLPLPEEGAPHDCLEILAETHGTRPDLTDQPIPDADHTWYTDGSSFLQEGQRKAGAAVTTETEVIWARALPAGTSAQRAELIALTQALKMAEGKRLNVYTDSRYAFATAHIHGEIYRRRGWLTSEGREIKNKSEILALLKALFLPKRLSIIHCLGHQKGDSAEARGNRLADQAAREAAIKTPPDTSTLLAGKRTADGSEFEKRTADGSEFESPKKKAKVE

SEQ ID NO: 1870 - protein, 2097 aa, synthetic construct
MPAAKRVKLDGGDKKYSIGLDIGTNSVGWAVITDEYKVPSKKFKVLGNTDRHSIKKNLIGALLFDSGETAEATRLKRTARRRYTRRKNRICYLQEIFSNEMAKVDDSFFHRLEESFLVEEDKKHERHPIFGNIVDEVAYHEKYPTIYHLRKKLVDSTDKADLRLIYLALAHMIKFRGHFLIEGDLNPDNSDVDKLFIQLVQTYNQLFEENPINASGVDAKAILSARLSKSRRLENLIAQLPGEKKNGLFGNLIALSLGLTPNFKSNFDLAEDAKLQLSKDTYDDDLDNLLAQIGDQYADLFLAAKNLSDAILLSDILRVNTEITKAPLSASMIKRYDEHHQDLTLLKALVRQQLPEKYKEIFFDQSKNGYAGYIDGGASQEEFYKFIKPILEKMDGTEELLVKLNREDLLRKQRTFDNGSIPHQIHLGELHAILRRQEDFYPFLKDNREKIEKILTFRIPYYVGPLARGNSRFAWMTRKSEETITPWNFEEVVDKGASAQSFIERMTNFDKNLPNEKVLPKHSLLYEYFTVYNELTKVKYVTEGMRKPAFLSGEQKKAIVDLLFKTNRKVTVKQLKEDYFKKIECFDSVEISGVEDRFNASLGTYHDLLKIIKDKDFLDNEENEDILEDIVLTLTLFEDREMIEERLKTYAHLFDDKVMKQLKRRRYTGWGRLSRKLINGIRDKQSGKTILDFLKSDGFANRNFMQLIHDDSLTFKEDIQKAQVSGQGDSLHEHIANLAGSPAIKKGILQTVKVVDELVKVMGRHKPENIVIEMARENQTTQKGQKNSRERMKRIEEGIKELGSQILKEHPVENTQLQNEKLYLYYLQNGRDMYVDQELDINRLSDYDVDHIVPQSFLKDDSIDNKVLTRSDKARGKSDNVPSEEVVKKMKNYWRQLLNAKLITQRKFDNLTKAERGGLSELDKAGFIKRQLVETRQITKHVAQILDSRMNTKYDENDKLIREVKVITLKSKLVSDFRKDFQFYKVREINNYHHAHDAYLNAVVGTALIKKYPKLESEFVYGDYKVYDVRKMIAKSEQEIGKATAKYFFYSNIMNFFKTEITLANGEIRKRPLIETNGETGEIVWDKGRDFATVRKVLSMPQVNIVKKTEVQTGGFSKESILPKRNSDKLIARKKDWDPKKYGGFDSPTVAYSVLVVAKVEKGKSKKLKSVKELLGITIMERSSFEKNPIDFLEAKGYKEVKKDLIIKLPKYSLFELENGRKRMLASAGELQKGNELALPSKYVNFLYLASHYEKLKGSPEDNEQKQLFVEQHKHYLDEIIEQISEFSKRVILADANLDKVLSAYNKHRDKPIREQAENIIHLFTLTNLGAPAAFKYFDTTIDRKRYTSTKEVLDATLIHQSITGLYETRIDLSQLGGDGGGSAGSAAGSGEFGGTLNLEDEYRLYETSAEPEVSPGSTWLSDFPQAWAETGGMGLAVRQAPLIIPLKATSTPVSIKQYPMSQEAKLGIKPHIQRLLDQGILVPCQSPWNTPLLPVKKPGTNDYRPVQDLREVNKRVEDIHPTVPNPYNLLSGLPPSHRWYTVLDLKDAFFCLRLHPTSQPLFAFEWRDPGMGISGQLTWTRLPQGFKNSPTLFNEALHRDLADFRIQHPDLILLQYVDDILLAATSELDCQQGTRALLLTLGNLGYRASAKKAQLCQKQVKYLGYLLKEGQRWLTEARKETVMGQPTPKTPRQLREFLGKAGFCRLFIPGFAEMAAPLYPLTKPGTLFNWGPDQQKAYQEIKQALLTAPALGLPDLTKPFELFVDEKQGYAKGVLTQKLGPWRRPVAYLSKKLDPVAAGWPPCLRMVAAIAVLRKDAGKLTMGQPLVILAPHAVEALVKQPPDRWLSNARMTHYQAMLLDTDRVQFGPVVALNPATLLPLPEEGAPHDCLEILAETHGTRPDLTDQPIPDADHTWYTDGSSFLQEGQRKAGAAVTTETEVIWARALPAGTSAQRAELIALTQALKMAEGKRLNVYTDSRYAFATAHIHGEIYRRRGWLTSEGREIKNKSEILALLKALFLPKRLSIIHCLGHQKGDSAEARGNRLADQAAREAAIKTPPDTSTLLAGKRTADGSEFEKRTADGSEFESPKKKAKVE

SEQ ID NO: 1871 - protein, 2096 aa, synthetic construct
MPAAKRVKLDGGDKKYSIGLDIGTNSVGWAVITDEYKVPSKKFKVLGNTDRHSIKKNLIGALLFDSGETAEATRLKRTARRRYTRRKNRICYLQEIFSNEMAKVDDSFFHRLEESFLVEEDKKHERHPIFGNIVDEVAYHEKYPTIYHLRKKLVDSTDKADLRLIYLALAHMIKFRGHFLIEGDLNPDNSDVDKLFIQLVQTYNQLFEENPINASGVDAKAILSARLSKSRRLENLIAQLPGEKKNGLFGNLIALSLGLTPNFKSNFDLAEDAKLQLSKDTYDDDLDNLLAQIGDQYADLFLAAKNLSDAILLSDILRVNTEITKAPLSASMIKRYDEHHQDLTLLKALVRQQLPEKYKEIFFDQSKNGYAGYIDGGASQEEFYKFIKPILEKMDGTEELLVKLNREDLLRKQRTFDNGSIPHQIHLGELHAILRRQEDFYPFLKDNREKIEKILTFRIPYYVGPLARGNSRFAWMTRKSEETITPWNFEEVVDKGASAQSFIERMTNFDKNLPNEKVLPKHSLLYEYFTVYNELTKVKYVTEGMRKPAFLSGEQKKAIVDLLFKTNRKVTVKQLKEDYFKKIECFDSVEISGVEDRFNASLGTYHDLLKIIKDKDFLDNEENEDILEDIVLTLTLFEDREMIEERLKTYAHLFDDKVMKQLKRRRYTGWGRLSRKLINGIRDKQSGKTILDFLKSDGFANRNFMQLIHDDSLTFKEDIQKAQVSGQGDSLHEHIANLAGSPAIKKGILQTVKVVDELVKVMGRHKPENIVIEMARENQTTQKGQKNSRERMKRIEEGIKELGSQILKEHPVENTQLQNEKLYLYYLQNGRDMYVDQELDINRLSDYDVDHIVPQSFLKDDSIDNKVLTRSDKARGKSDNVPSEEVVKKMKNYWRQLLNAKLITQRKFDNLTKAERGGLSELDKAGFIKRQLVETRQITKHVAQILDSRMNTKYDENDKLIREVKVITLKSKLVSDFRKDFQFYKVREINNYHHAHDAYLNAVVGTALIKKYPKLESEFVYGDYKVYDVRKMIAKSEQEIGKATAKYFFYSNIMNFFKTEITLANGEIRKRPLIETNGETGEIVWDKGRDFATVRKVLSMPQVNIVKKTEVQTGGFSKESILPKRNSDKLIARKKDWDPKKYGGFDSPTVAYSVLVVAKVEKGKSKKLKSVKELLGITIMERSSFEKNPIDFLEAKGYKEVKKDLIIKLPKYSLFELENGRKRMLASAGELQKGNELALPSKYVNFLYLASHYEKLKGSPEDNEQKQLFVEQHKHYLDEIIEQISEFSKRVILADANLDKVLSAYNKHRDKPIREQAENIIHLFTLTNLGAPAAFKYFDTTIDRKRYTSTKEVLDATLIHQSITGLYETRIDLSQLGGDGGEAAAKPAPGGSGGTLNLEDEYRLYETSAEPEVSPGSTWLSDFPQAWAETGGMGLAVRQAPLIIPLKATSTPVSIKQYPMSQEAKLGIKPHIQRLLDQGILVPCQSPWNTPLLPVKKPGTNDYRPVQDLREVNKRVEDIHPTVPNPYNLLSGLPPSHRWYTVLDLKDAFFCLRLHPTSQPLFAFEWRDPGMGISGQLTWTRLPQGFKNSPTLFNEALHRDLADFRIQHPDLILLQYVDDILLAATSELDCQQGTRALLLTLGNLGYRASAKKAQLCQKQVKYLGYLLKEGQRWLTEARKETVMGQPTPKTPRQLREFLGKAGFCRLFIPGFAEMAAPLYPLTKPGTLFNWGPDQQKAYQEIKQALLTAPALGLPDLTKPFELFVDEKQGYAKGVLTQKLGPWRRPVAYLSKKLDPVAAGWPPCLRMVAAIAVLRKDAGKLTMGQPLVILAPHAVEALVKQPPDRWLSNARMTHYQAMLLDTDRVQFGPVVALNPATLLPLPEEGAPHDCLEILAETHGTRPDLTDQPIPDADHTWYTDGSSFLQEGQRKAGAAVTTETEVIWARALPAGTSAQRAELIALTQALKMAEGKRLNVYTDSRYAFATAHIHGEIYRRRGWLTSEGREIKNKSEILALLKALFLPKRLSIIHCLGHQKGDSAEARGNRLADQAAREAAIKTPPDTSTLLAGKRTADGSEFEKRTADGSEFESPKKKAKVE

SEQ ID NO: 1872 - protein, 2096 aa, synthetic construct
MPAAKRVKLDGGDKKYSIGLDIGTNSVGWAVITDEYKVPSKKFKVLGNTDRHSIKKNLIGALLFDSGETAEATRLKRTARRRYTRRKNRICYLQEIFSNEMAKVDDSFFHRLEESFLVEEDKKHERHPIFGNIVDEVAYHEKYPTIYHLRKKLVDSTDKADLRLIYLALAHMIKFRGHFLIEGDLNPDNSDVDKLFIQLVQTYNQLFEENPINASGVDAKAILSARLSKSRRLENLIAQLPGEKKNGLFGNLIALSLGLTPNFKSNFDLAEDAKLQLSKDTYDDDLDNLLAQIGDQYADLFLAAKNLSDAILLSDILRVNTEITKAPLSASMIKRYDEHHQDLTLLKALVRQQLPEKYKEIFFDQSKNGYAGYIDGGASQEEFYKFIKPILEKMDGTEELLVKLNREDLLRKQRTFDNGSIPHQIHLGELHAILRRQEDFYPFLKDNREKIEKILTFRIPYYVGPLARGNSRFAWMTRKSEETITPWNFEEVVDKGASAQSFIERMTNFDKNLPNEKVLPKHSLLYEYFTVYNELTKVKYVTEGMRKPAFLSGEQKKAIVDLLFKTNRKVTVKQLKEDYFKKIECFDSVEISGVEDRFNASLGTYHDLLKIIKDKDFLDNEENEDILEDIVLTLTLFEDREMIEERLKTYAHLFDDKVMKQLKRRRYTGWGRLSRKLINGIRDKQSGKTILDFLKSDGFANRNFMQLIHDDSLTFKEDIQKAQVSGQGDSLHEHIANLAGSPAIKKGILQTVKVVDELVKVMGRHKPENIVIEMARENQTTQKGQKNSRERMKRIEEGIKELGSQILKEHPVENTQLQNEKLYLYYLQNGRDMYVDQELDINRLSDYDVDHIVPQSFLKDDSIDNKVLTRSDKARGKSDNVPSEEVVKKMKNYWRQLLNAKLITQRKFDNLTKAERGGLSELDKAGFIKRQLVETRQITKHVAQILDSRMNTKYDENDKLIREVKVITLKSKLVSDFRKDFQFYKVREINNYHHAHDAYLNAVVGTALIKKYPKLESEFVYGDYKVYDVRKMIAKSEQEIGKATAKYFFYSNIMNFFKTEITLANGEIRKRPLIETNGETGEIVWDKGRDFATVRKVLSMPQVNIVKKTEVQTGGFSKESILPKRNSDKLIARKKDWDPKKYGGFDSPTVAYSVLVVAKVEKGKSKKLKSVKELLGITIMERSSFEKNPIDFLEAKGYKEVKKDLIIKLPKYSLFELENGRKRMLASAGELQKGNELALPSKYVNFLYLASHYEKLKGSPEDNEQKQLFVEQHKHYLDEIIEQISEFSKRVILADANLDKVLSAYNKHRDKPIREQAENIIHLFTLTNLGAPAAFKYFDTTIDRKRYTSTKEVLDATLIHQSITGLYETRIDLSQLGGDGGEAAAKGSSPAPGGTLNLEDEYRLYETSAEPEVSPGSTWLSDFPQAWAETGGMGLAVRQAPLIIPLKATSTPVSIKQYPMSQEAKLGIKPHIQRLLDQGILVPCQSPWNTPLLPVKKPGTNDYRPVQDLREVNKRVEDIHPTVPNPYNLLSGLPPSHRWYTVLDLKDAFFCLRLHPTSQPLFAFEWRDPGMGISGQLTWTRLPQGFKNSPTLFNEALHRDLADFRIQHPDLILLQYVDDILLAATSELDCQQGTRALLLTLGNLGYRASAKKAQLCQKQVKYLGYLLKEGQRWLTEARKETVMGQPTPKTPRQLREFLGKAGFCRLFIPGFAEMAAPLYPLTKPGTLFNWGPDQQKAYQEIKQALLTAPALGLPDLTKPFELFVDEKQGYAKGVLTQKLGPWRRPVAYLSKKLDPVAAGWPPCLRMVAAIAVLRKDAGKLTMGQPLVILAPHAVEALVKQPPDRWLSNARMTHYQAMLLDTDRVQFGPVVALNPATLLPLPEEGAPHDCLEILAETHGTRPDLTDQPIPDADHTWYTDGSSFLQEGQRKAGAAVTTETEVIWARALPAGTSAQRAELIALTQALKMAEGKRLNVYTDSRYAFATAHIHGEIYRRRGWLTSEGREIKNKSEILALLKALFLPKRLSIIHCLGHQKGDSAEARGNRLADQAAREAAIKTPPDTSTLLAGKRTADGSEFEKRTADGSEFESPKKKAKVE

SEQ ID NO: 1873 - protein, 2091 aa, synthetic construct
MPAAKRVKLDGGDKKYSIGLDIGTNSVGWAVITDEYKVPSKKFKVLGNTDRHSIKKNLIGALLFDSGETAEATRLKRTARRRYTRRKNRICYLQEIFSNEMAKVDDSFFHRLEESFLVEEDKKHERHPIFGNIVDEVAYHEKYPTIYHLRKKLVDSTDKADLRLIYLALAHMIKFRGHFLIEGDLNPDNSDVDKLFIQLVQTYNQLFEENPINASGVDAKAILSARLSKSRRLENLIAQLPGEKKNGLFGNLIALSLGLTPNFKSNFDLAEDAKLQLSKDTYDDDLDNLLAQIGDQYADLFLAAKNLSDAILLSDILRVNTEITKAPLSASMIKRYDEHHQDLTLLKALVRQQLPEKYKEIFFDQSKNGYAGYIDGGASQEEFYKFIKPILEKMDGTEELLVKLNREDLLRKQRTFDNGSIPHQIHLGELHAILRRQEDFYPFLKDNREKIEKILTFRIPYYVGPLARGNSRFAWMTRKSEETITPWNFEEVVDKGASAQSFIERMTNFDKNLPNEKVLPKHSLLYEYFTVYNELTKVKYVTEGMRKPAFLSGEQKKAIVDLLFKTNRKVTVKQLKEDYFKKIECFDSVEISGVEDRFNASLGTYHDLLKIIKDKDFLDNEENEDILEDIVLTLTLFEDREMIEERLKTYAHLFDDKVMKQLKRRRYTGWGRLSRKLINGIRDKQSGKTILDFLKSDGFANRNFMQLIHDDSLTFKEDIQKAQVSGQGDSLHEHIANLAGSPAIKKGILQTVKVVDELVKVMGRHKPENIVIEMARENQTTQKGQKNSRERMKRIEEGIKELGSQILKEHPVENTQLQNEKLYLYYLQNGRDMYVDQELDINRLSDYDVDHIVPQSFLKDDSIDNKVLTRSDKARGKSDNVPSEEVVKKMKNYWRQLLNAKLITQRKFDNLTKAERGGLSELDKAGFIKRQLVETRQITKHVAQILDSRMNTKYDENDKLIREVKVITLKSKLVSDFRKDFQFYKVREINNYHHAHDAYLNAVVGTALIKKYPKLESEFVYGDYKVYDVRKMIAKSEQEIGKATAKYFFYSNIMNFFKTEITLANGEIRKRPLIETNGETGEIVWDKGRDFATVRKVLSMPQVNIVKKTEVQTGGFSKESILPKRNSDKLIARKKDWDPKKYGGFDSPTVAYSVLVVAKVEKGKSKKLKSVKELLGITIMERSSFEKNPIDFLEAKGYKEVKKDLIIKLPKYSLFELENGRKRMLASAGELQKGNELALPSKYVNFLYLASHYEKLKGSPEDNEQKQLFVEQHKHYLDEIIEQISEFSKRVILADANLDKVLSAYNKHRDKPIREQAENIIHLFTLTNLGAPAAFKYFDTTIDRKRYTSTKEVLDATLIHQSITGLYETRIDLSQLGGDGGGGGGGGGGTLNLEDEYRLYETSAEPEVSPGSTWLSDFPQAWAETGGMGLAVRQAPLIIPLKATSTPVSIKQYPMSQEAKLGIKPHIQRLLDQGILVPCQSPWNTPLLPVKKPGTNDYRPVQDLREVNKRVEDIHPTVPNPYNLLSGLPPSHRWYTVLDLKDAFFCLRLHPTSQPLFAFEWRDPGMGISGQLTWTRLPQGFKNSPTLFNEALHRDLADFRIQHPDLILLQYVDDILLAATSELDCQQGTRALLLTLGNLGYRASAKKAQLCQKQVKYLGYLLKEGQRWLTEARKETVMGQPTPKTPRQLREFLGKAGFCRLFIPGFAEMAAPLYPLTKPGTLFNWGPDQQKAYQEIKQALLTAPALGLPDLTKPFELFVDEKQGYAKGVLTQKLGPWRRPVAYLSKKLDPVAAGWPPCLRMVAAIAVLRKDAGKLTMGQPLVILAPHAVEALVKQPPDRWLSNARMTHYQAMLLDTDRVQFGPVVALNPATLLPLPEEGAPHDCLEILAETHGTRPDLTDQPIPDADHTWYTDGSSFLQEGQRKAGAAVTTETEVIWARALPAGTSAQRAELIALTQALKMAEGKRLNVYTDSRYAFATAHIHGEIYRRRGWLTSEGREIKNKSEILALLKALFLPKRLSIIHCLGHQKGDSAEARGNRLADQAAREAAIKTPPDTSTLLAGKRTADGSEFEKRTADGSEFESPKKKAKVE

SEQ ID NO: 1874 - protein, 2094 aa, synthetic construct
MPAAKRVKLDGGDKKYSIGLDIGTNSVGWAVITDEYKVPSKKFKVLGNTDRHSIKKNLIGALLFDSGETAEATRLKRTARRRYTRRKNRICYLQEIFSNEMAKVDDSFFHRLEESFLVEEDKKHERHPIFGNIVDEVAYHEKYPTIYHLRKKLVDSTDKADLRLIYLALAHMIKFRGHFLIEGDLNPDNSDVDKLFIQLVQTYNQLFEENPINASGVDAKAILSARLSKSRRLENLIAQLPGEKKNGLFGNLIALSLGLTPNFKSNFDLAEDAKLQLSKDTYDDDLDNLLAQIGDQYADLFLAAKNLSDAILLSDILRVNTEITKAPLSASMIKRYDEHHQDLTLLKALVRQQLPEKYKEIFFDQSKNGYAGYIDGGASQEEFYKFIKPILEKMDGTEELLVKLNREDLLRKQRTFDNGSIPHQIHLGELHAILRRQEDFYPFLKDNREKIEKILTFRIPYYVGPLARGNSRFAWMTRKSEETITPWNFEEVVDKGASAQSFIERMTNFDKNLPNEKVLPKHSLLYEYFTVYNELTKVKYVTEGMRKPAFLSGEQKKAIVDLLFKTNRKVTVKQLKEDYFKKIECFDSVEISGVEDRFNASLGTYHDLLKIIKDKDFLDNEENEDILEDIVLTLTLFEDREMIEERLKTYAHLFDDKVMKQLKRRRYTGWGRLSRKLINGIRDKQSGKTILDFLKSDGFANRNFMQLIHDDSLTFKEDIQKAQVSGQGDSLHEHIANLAGSPAIKKGILQTVKVVDELVKVMGRHKPENIVIEMARENQTTQKGQKNSRERMKRIEEGIKELGSQILKEHPVENTQLQNEKLYLYYLQNGRDMYVDQELDINRLSDYDVDHIVPQSFLKDDSIDNKVLTRSDKARGKSDNVPSEEVVKKMKNYWRQLLNAKLITQRKFDNLTKAERGGLSELDKAGFIKRQLVETRQITKHVAQILDSRMNTKYDENDKLIREVKVITLKSKLVSDFRKDFQFYKVREINNYHHAHDAYLNAVVGTALIKKYPKLESEFVYGDYKVYDVRKMIAKSEQEIGKATAKYFFYSNIMNFFKTEITLANGEIRKRPLIETNGETGEIVWDKGRDFATVRKVLSMPQVNIVKKTEVQTGGFSKESILPKRNSDKLIARKKDWDPKKYGGFDSPTVAYSVLVVAKVEKGKSKKLKSVKELLGITIMERSSFEKNPIDFLEAKGYKEVKKDLIIKLPKYSLFELENGRKRMLASAGELQKGNELALPSKYVNFLYLASHYEKLKGSPEDNEQKQLFVEQHKHYLDEIIEQISEFSKRVILADANLDKVLSAYNKHRDKPIREQAENIIHLFTLTNLGAPAAFKYFDTTIDRKRYTSTKEVLDATLIHQSITGLYETRIDLSQLGGDGGGSSPAPGGGGGTLNLEDEYRLYETSAEPEVSPGSTWLSDFPQAWAETGGMGLAVRQAPLIIPLKATSTPVSIKQYPMSQEAKLGIKPHIQRLLDQGILVPCQSPWNTPLLPVKKPGTNDYRPVQDLREVNKRVEDIHPTVPNPYNLLSGLPPSHRWYTVLDLKDAFFCLRLHPTSQPLFAFEWRDPGMGISGQLTWTRLPQGFKNSPTLFNEALHRDLADFRIQHPDLILLQYVDDILLAATSELDCQQGTRALLLTLGNLGYRASAKKAQLCQKQVKYLGYLLKEGQRWLTEARKETVMGQPTPKTPRQLREFLGKAGFCRLFIPGFAEMAAPLYPLTKPGTLFNWGPDQQKAYQEIKQALLTAPALGLPDLTKPFELFVDEKQGYAKGVLTQKLGPWRRPVAYLSKKLDPVAAGWPPCLRMVAAIAVLRKDAGKLTMGQPLVILAPHAVEALVKQPPDRWLSNARMTHYQAMLLDTDRVQFGPVVALNPATLLPLPEEGAPHDCLEILAETHGTRPDLTDQPIPDADHTWYTDGSSFLQEGQRKAGAAVTTETEVIWARALPAGTSAQRAELIALTQALKMAEGKRLNVYTDSRYAFATAHIHGEIYRRRGWLTSEGREIKNKSEILALLKALFLPKRLSIIHCLGHQKGDSAEARGNRLADQAAREAAIKTPPDTSTLLAGKRTADGSEFEKRTADGSEFESPKKKAKVE

SEQ ID NO: 1875 - protein, 2096 aa, synthetic construct
MPAAKRVKLDGGDKKYSIGLDIGTNSVGWAVITDEYKVPSKKFKVLGNTDRHSIKKNLIGALLFDSGETAEATRLKRTARRRYTRRKNRICYLQEIFSNEMAKVDDSFFHRLEESFLVEEDKKHERHPIFGNIVDEVAYHEKYPTIYHLRKKLVDSTDKADLRLIYLALAHMIKFRGHFLIEGDLNPDNSDVDKLFIQLVQTYNQLFEENPINASGVDAKAILSARLSKSRRLENLIAQLPGEKKNGLFGNLIALSLGLTPNFKSNFDLAEDAKLQLSKDTYDDDLDNLLAQIGDQYADLFLAAKNLSDAILLSDILRVNTEITKAPLSASMIKRYDEHHQDLTLLKALVRQQLPEKYKEIFFDQSKNGYAGYIDGGASQEEFYKFIKPILEKMDGTEELLVKLNREDLLRKQRTFDNGSIPHQIHLGELHAILRRQEDFYPFLKDNREKIEKILTFRIPYYVGPLARGNSRFAWMTRKSEETITPWNFEEVVDKGASAQSFIERMTNFDKNLPNEKVLPKHSLLYEYFTVYNELTKVKYVTEGMRKPAFLSGEQKKAIVDLLFKTNRKVTVKQLKEDYFKKIECFDSVEISGVEDRFNASLGTYHDLLKIIKDKDFLDNEENEDILEDIVLTLTLFEDREMIEERLKTYAHLFDDKVMKQLKRRRYTGWGRLSRKLINGIRDKQSGKTILDFLKSDGFANRNFMQLIHDDSLTFKEDIQKAQVSGQGDSLHEHIANLAGSPAIKKGILQTVKVVDELVKVMGRHKPENIVIEMARENQTTQKGQKNSRERMKRIEEGIKELGSQILKEHPVENTQLQNEKLYLYYLQNGRDMYVDQELDINRLSDYDVDHIVPQSFLKDDSIDNKVLTRSDKARGKSDNVPSEEVVKKMKNYWRQLLNAKLITQRKFDNLTKAERGGLSELDKAGFIKRQLVETRQITKHVAQILDSRMNTKYDENDKLIREVKVITLKSKLVSDFRKDFQFYKVREINNYHHAHDAYLNAVVGTALIKKYPKLESEFVYGDYKVYDVRKMIAKSEQEIGKATAKYFFYSNIMNFFKTEITLANGEIRKRPLIETNGETGEIVWDKGRDFATVRKVLSMPQVNIVKKTEVQTGGFSKESILPKRNSDKLIARKKDWDPKKYGGFDSPTVAYSVLVVAKVEKGKSKKLKSVKELLGITIMERSSFEKNPIDFLEAKGYKEVKKDLIIKLPKYSLFELENGRKRMLASAGELQKGNELALPSKYVNFLYLASHYEKLKGSPEDNEQKQLFVEQHKHYLDEIIEQISEFSKRVILADANLDKVLSAYNKHRDKPIREQAENIIHLFTLTNLGAPAAFKYFDTTIDRKRYTSTKEVLDATLIHQSITGLYETRIDLSQLGGDGGGSSGGGEAAAKGGTLNLEDEYRLYETSAEPEVSPGSTWLSDFPQAWAETGGMGLAVRQAPLIIPLKATSTPVSIKQYPMSQEAKLGIKPHIQRLLDQGILVPCQSPWNTPLLPVKKPGTNDYRPVQDLREVNKRVEDIHPTVPNPYNLLSGLPPSHRWYTVLDLKDAFFCLRLHPTSQPLFAFEWRDPGMGISGQLTWTRLPQGFKNSPTLFNEALHRDLADFRIQHPDLILLQYVDDILLAATSELDCQQGTRALLLTLGNLGYRASAKKAQLCQKQVKYLGYLLKEGQRWLTEARKETVMGQPTPKTPRQLREFLGKAGFCRLFIPGFAEMAAPLYPLTKPGTLFNWGPDQQKAYQEIKQALLTAPALGLPDLTKPFELFVDEKQGYAKGVLTQKLGPWRRPVAYLSKKLDPVAAGWPPCLRMVAAIAVLRKDAGKLTMGQPLVILAPHAVEALVKQPPDRWLSNARMTHYQAMLLDTDRVQFGPVVALNPATLLPLPEEGAPHDCLEILAETHGTRPDLTDQPIPDADHTWYTDGSSFLQEGQRKAGAAVTTETEVIWARALPAGTSAQRAELIALTQALKMAEGKRLNVYTDSRYAFATAHIHGEIYRRRGWLTSEGREIKNKSEILALLKALFLPKRLSIIHCLGHQKGDSAEARGNRLADQAAREAAIKTPPDTSTLLAGKRTADGSEFEKRTADGSEFESPKKKAKVE

SEQ ID NO: 1876 - protein, 2105 aa, synthetic construct
MPAAKRVKLDGGDKKYSIGLDIGTNSVGWAVITDEYKVPSKKFKVLGNTDRHSIKKNLIGALLFDSGETAEATRLKRTARRRYTRRKNRICYLQEIFSNEMAKVDDSFFHRLEESFLVEEDKKHERHPIFGNIVDEVAYHEKYPTIYHLRKKLVDSTDKADLRLIYLALAHMIKFRGHFLIEGDLNPDNSDVDKLFIQLVQTYNQLFEENPINASGVDAKAILSARLSKSRRLENLIAQLPGEKKNGLFGNLIALSLGLTPNFKSNFDLAEDAKLQLSKDTYDDDLDNLLAQIGDQYADLFLAAKNLSDAILLSDILRVNTEITKAPLSASMIKRYDEHHQDLTLLKALVRQQLPEKYKEIFFDQSKNGYAGYIDGGASQEEFYKFIKPILEKMDGTEELLVKLNREDLLRKQRTFDNGSIPHQIHLGELHAILRRQEDFYPFLKDNREKIEKILTFRIPYYVGPLARGNSRFAWMTRKSEETITPWNFEEVVDKGASAQSFIERMTNFDKNLPNEKVLPKHSLLYEYFTVYNELTKVKYVTEGMRKPAFLSGEQKKAIVDLLFKTNRKVTVKQLKEDYFKKIECFDSVEISGVEDRFNASLGTYHDLLKIIKDKDFLDNEENEDILEDIVLTLTLFEDREMIEERLKTYAHLFDDKVMKQLKRRRYTGWGRLSRKLINGIRDKQSGKTILDFLKSDGFANRNFMQLIHDDSLTFKEDIQKAQVSGQGDSLHEHIANLAGSPAIKKGILQTVKVVDELVKVMGRHKPENIVIEMARENQTTQKGQKNSRERMKRIEEGIKELGSQILKEHPVENTQLQNEKLYLYYLQNGRDMYVDQELDINRLSDYDVDHIVPQSFLKDDSIDNKVLTRSDKARGKSDNVPSEEVVKKMKNYWRQLLNAKLITQRKFDNLTKAERGGLSELDKAGFIKRQLVETRQITKHVAQILDSRMNTKYDENDKLIREVKVITLKSKLVSDFRKDFQFYKVREINNYHHAHDAYLNAVVGTALIKKYPKLESEFVYGDYKVYDVRKMIAKSEQEIGKATAKYFFYSNIMNFFKTEITLANGEIRKRPLIETNGETGEIVWDKGRDFATVRKVLSMPQVNIVKKTEVQTGGFSKESILPKRNSDKLIARKKDWDPKKYGGFDSPTVAYSVLVVAKVEKGKSKKLKSVKELLGITIMERSSFEKNPIDFLEAKGYKEVKKDLIIKLPKYSLFELENGRKRMLASAGELQKGNELALPSKYVNFLYLASHYEKLKGSPEDNEQKQLFVEQHKHYLDEIIEQISEFSKRVILADANLDKVLSAYNKHRDKPIREQAENIIHLFTLTNLGAPAAFKYFDTTIDRKRYTSTKEVLDATLIHQSITGLYETRIDLSQLGGDGGGGGGSGGGGSGGGGSGGGGSGGTLNLEDEYRLYETSAEPEVSPGSTWLSDFPQAWAETGGMGLAVRQAPLIIPLKATSTPVSIKQYPMSQEAKLGIKPHIQRLLDQGILVPCQSPWNTPLLPVKKPGTNDYRPVQDLREVNKRVEDIHPTVPNPYNLLSGLPPSHRWYTVLDLKDAFFCLRLHPTSQPLFAFEWRDPGMGISGQLTWTRLPQGFKNSPTLFNEALHRDLADFRIQHPDLILLQYVDDILLAATSELDCQQGTRALLLTLGNLGYRASAKKAQLCQKQVKYLGYLLKEGQRWLTEARKETVMGQPTPKTPRQLREFLGKAGFCRLFIPGFAEMAAPLYPLTKPGTLFNWGPDQQKAYQEIKQALLTAPALGLPDLTKPFELFVDEKQGYAKGVLTQKLGPWRRPVAYLSKKLDPVAAGWPPCLRMVAAIAVLRKDAGKLTMGQPLVILAPHAVEALVKQPPDRWLSNARMTHYQAMLLDTDRVQFGPVVALNPATLLPLPEEGAPHDCLEILAETHGTRPDLTDQPIPDADHTWYTDGSSFLQEGQRKAGAAVTTETEVIWARALPAGTSAQRAELIALTQALKMAEGKRLNVYTDSRYAFATAHIHGEIYRRRGWLTSEGREIKNKSEILALLKALFLPKRLSIIHCLGHQKGDSAEARGNRLADQAAREAAIKTPPDTSTLLAGKRTADGSEFEKRTADGSEFESPKKKAKVE

SEQ ID NO: 1877 - protein, 2097 aa, synthetic construct
MPAAKRVKLDGGDKKYSIGLDIGTNSVGWAVITDEYKVPSKKFKVLGNTDRHSIKKNLIGALLFDSGETAEATRLKRTARRRYTRRKNRICYLQEIFSNEMAKVDDSFFHRLEESFLVEEDKKHERHPIFGNIVDEVAYHEKYPTIYHLRKKLVDSTDKADLRLIYLALAHMIKFRGHFLIEGDLNPDNSDVDKLFIQLVQTYNQLFEENPINASGVDAKAILSARLSKSRRLENLIAQLPGEKKNGLFGNLIALSLGLTPNFKSNFDLAEDAKLQLSKDTYDDDLDNLLAQIGDQYADLFLAAKNLSDAILLSDILRVNTEITKAPLSASMIKRYDEHHQDLTLLKALVRQQLPEKYKEIFFDQSKNGYAGYIDGGASQEEFYKFIKPILEKMDGTEELLVKLNREDLLRKQRTFDNGSIPHQIHLGELHAILRRQEDFYPFLKDNREKIEKILTFRIPYYVGPLARGNSRFAWMTRKSEETITPWNFEEVVDKGASAQSFIERMTNFDKNLPNEKVLPKHSLLYEYFTVYNELTKVKYVTEGMRKPAFLSGEQKKAIVDLLFKTNRKVTVKQLKEDYFKKIECFDSVEISGVEDRFNASLGTYHDLLKIIKDKDFLDNEENEDILEDIVLTLTLFEDREMIEERLKTYAHLFDDKVMKQLKRRRYTGWGRLSRKLINGIRDKQSGKTILDFLKSDGFANRNFMQLIHDDSLTFKEDIQKAQVSGQGDSLHEHIANLAGSPAIKKGILQTVKVVDELVKVMGRHKPENIVIEMARENQTTQKGQKNSRERMKRIEEGIKELGSQILKEHPVENTQLQNEKLYLYYLQNGRDMYVDQELDINRLSDYDVDHIVPQSFLKDDSIDNKVLTRSDKARGKSDNVPSEEVVKKMKNYWRQLLNAKLITQRKFDNLTKAERGGLSELDKAGFIKRQLVETRQITKHVAQILDSRMNTKYDENDKLIREVKVITLKSKLVSDFRKDFQFYKVREINNYHHAHDAYLNAVVGTALIKKYPKLESEFVYGDYKVYDVRKMIAKSEQEIGKATAKYFFYSNIMNFFKTEITLANGEIRKRPLIETNGETGEIVWDKGRDFATVRKVLSMPQVNIVKKTEVQTGGFSKESILPKRNSDKLIARKKDWDPKKYGGFDSPTVAYSVLVVAKVEKGKSKKLKSVKELLGITIMERSSFEKNPIDFLEAKGYKEVKKDLIIKLPKYSLFELENGRKRMLASAGELQKGNELALPSKYVNFLYLASHYEKLKGSPEDNEQKQLFVEQHKHYLDEIIEQISEFSKRVILADANLDKVLSAYNKHRDKPIREQAENIIHLFTLTNLGAPAAFKYFDTTIDRKRYTSTKEVLDATLIHQSITGLYETRIDLSQLGGDGGGSSGSSGSSGSSGGTLNLEDEYRLYETSAEPEVSPGSTWLSDFPQAWAETGGMGLAVRQAPLIIPLKATSTPVSIKQYPMSQEAKLGIKPHIQRLLDQGILVPCQSPWNTPLLPVKKPGTNDYRPVQDLREVNKRVEDIHPTVPNPYNLLSGLPPSHRWYTVLDLKDAFFCLRLHPTSQPLFAFEWRDPGMGISGQLTWTRLPQGFKNSPTLFNEALHRDLADFRIQHPDLILLQYVDDILLAATSELDCQQGTRALLLTLGNLGYRASAKKAQLCQKQVKYLGYLLKEGQRWLTEARKETVMGQPTPKTPRQLREFLGKAGFCRLFIPGFAEMAAPLYPLTKPGTLFNWGPDQQKAYQEIKQALLTAPALGLPDLTKPFELFVDEKQGYAKGVLTQKLGPWRRPVAYLSKKLDPVAAGWPPCLRMVAAIAVLRKDAGKLTMGQPLVILAPHAVEALVKQPPDRWLSNARMTHYQAMLLDTDRVQFGPVVALNPATLLPLPEEGAPHDCLEILAETHGTRPDLTDQPIPDADHTWYTDGSSFLQEGQRKAGAAVTTETEVIWARALPAGTSAQRAELIALTQALKMAEGKRLNVYTDSRYAFATAHIHGEIYRRRGWLTSEGREIKNKSEILALLKALFLPKRLSIIHCLGHQKGDSAEARGNRLADQAAREAAIKTPPDTSTLLAGKRTADGSEFEKRTADGSEFESPKKKAKVE

SEQ ID NO: 1878 - protein, 2096 aa, synthetic construct
MPAAKRVKLDGGDKKYSIGLDIGTNSVGWAVITDEYKVPSKKFKVLGNTDRHSIKKNLIGALLFDSGETAEATRLKRTARRRYTRRKNRICYLQEIFSNEMAKVDDSFFHRLEESFLVEEDKKHERHPIFGNIVDEVAYHEKYPTIYHLRKKLVDSTDKADLRLIYLALAHMIKFRGHFLIEGDLNPDNSDVDKLFIQLVQTYNQLFEENPINASGVDAKAILSARLSKSRRLENLIAQLPGEKKNGLFGNLIALSLGLTPNFKSNFDLAEDAKLQLSKDTYDDDLDNLLAQIGDQYADLFLAAKNLSDAILLSDILRVNTEITKAPLSASMIKRYDEHHQDLTLLKALVRQQLPEKYKEIFFDQSKNGYAGYIDGGASQEEFYKFIKPILEKMDGTEELLVKLNREDLLRKQRTFDNGSIPHQIHLGELHAILRRQEDFYPFLKDNREKIEKILTFRIPYYVGPLARGNSRFAWMTRKSEETITPWNFEEVVDKGASAQSFIERMTNFDKNLPNEKVLPKHSLLYEYFTVYNELTKVKYVTEGMRKPAFLSGEQKKAIVDLLFKTNRKVTVKQLKEDYFKKIECFDSVEISGVEDRFNASLGTYHDLLKIIKDKDFLDNEENEDILEDIVLTLTLFEDREMIEERLKTYAHLFDDKVMKQLKRRRYTGWGRLSRKLINGIRDKQSGKTILDFLKSDGFANRNFMQLIHDDSLTFKEDIQKAQVSGQGDSLHEHIANLAGSPAIKKGILQTVKVVDELVKVMGRHKPENIVIEMARENQTTQKGQKNSRERMKRIEEGIKELGSQILKEHPVENTQLQNEKLYLYYLQNGRDMYVDQELDINRLSDYDVDHIVPQSFLKDDSIDNKVLTRSDKARGKSDNVPSEEVVKKMKNYWRQLLNAKLITQRKFDNLTKAERGGLSELDKAGFIKRQLVETRQITKHVAQILDSRMNTKYDENDKLIREVKVITLKSKLVSDFRKDFQFYKVREINNYHHAHDAYLNAVVGTALIKKYPKLESEFVYGDYKVYDVRKMIAKSEQEIGKATAKYFFYSNIMNFFKTEITLANGEIRKRPLIETNGETGEIVWDKGRDFATVRKVLSMPQVNIVKKTEVQTGGFSKESILPKRNSDKLIARKKDWDPKKYGGFDSPTVAYSVLVVAKVEKGKSKKLKSVKELLGITIMERSSFEKNPIDFLEAKGYKEVKKDLIIKLPKYSLFELENGRKRMLASAGELQKGNELALPSKYVNFLYLASHYEKLKGSPEDNEQKQLFVEQHKHYLDEIIEQISEFSKRVILADANLDKVLSAYNKHRDKPIREQAENIIHLFTLTNLGAPAAFKYFDTTIDRKRYTSTKEVLDATLIHQSITGLYETRIDLSQLGGDGGGGGEAAAKGSSGGTLNLEDEYRLYETSAEPEVSPGSTWLSDFPQAWAETGGMGLAVRQAPLIIPLKATSTPVSIKQYPMSQEAKLGIKPHIQRLLDQGILVPCQSPWNTPLLPVKKPGTNDYRPVQDLREVNKRVEDIHPTVPNPYNLLSGLPPSHRWYTVLDLKDAFFCLRLHPTSQPLFAFEWRDPGMGISGQLTWTRLPQGFKNSPTLFNEALHRDLADFRIQHPDLILLQYVDDILLAATSELDCQQGTRALLLTLGNLGYRASAKKAQLCQKQVKYLGYLLKEGQRWLTEARKETVMGQPTPKTPRQLREFLGKAGFCRLFIPGFAEMAAPLYPLTKPGTLFNWGPDQQKAYQEIKQALLTAPALGLPDLTKPFELFVDEKQGYAKGVLTQKLGPWRRPVAYLSKKLDPVAAGWPPCLRMVAAIAVLRKDAGKLTMGQPLVILAPHAVEALVKQPPDRWLSNARMTHYQAMLLDTDRVQFGPVVALNPATLLPLPEEGAPHDCLEILAETHGTRPDLTDQPIPDADHTWYTDGSSFLQEGQRKAGAAVTTETEVIWARALPAGTSAQRAELIALTQALKMAEGKRLNVYTDSRYAFATAHIHGEIYRRRGWLTSEGREIKNKSEILALLKALFLPKRLSIIHCLGHQKGDSAEARGNRLADQAAREAAIKTPPDTSTLLAGKRTADGSEFEKRTADGSEFESPKKKAKVE

SEQ ID NO: 1879 - protein, 2100 aa, synthetic construct
MPAAKRVKLDGGDKKYSIGLDIGTNSVGWAVITDEYKVPSKKFKVLGNTDRHSIKKNLIGALLFDSGETAEATRLKRTARRRYTRRKNRICYLQEIFSNEMAKVDDSFFHRLEESFLVEEDKKHERHPIFGNIVDEVAYHEKYPTIYHLRKKLVDSTDKADLRLIYLALAHMIKFRGHFLIEGDLNPDNSDVDKLFIQLVQTYNQLFEENPINASGVDAKAILSARLSKSRRLENLIAQLPGEKKNGLFGNLIALSLGLTPNFKSNFDLAEDAKLQLSKDTYDDDLDNLLAQIGDQYADLFLAAKNLSDAILLSDILRVNTEITKAPLSASMIKRYDEHHQDLTLLKALVRQQLPEKYKEIFFDQSKNGYAGYIDGGASQEEFYKFIKPILEKMDGTEELLVKLNREDLLRKQRTFDNGSIPHQIHLGELHAILRRQEDFYPFLKDNREKIEKILTFRIPYYVGPLARGNSRFAWMTRKSEETITPWNFEEVVDKGASAQSFIERMTNFDKNLPNEKVLPKHSLLYEYFTVYNELTKVKYVTEGMRKPAFLSGEQKKAIVDLLFKTNRKVTVKQLKEDYFKKIECFDSVEISGVEDRFNASLGTYHDLLKIIKDKDFLDNEENEDILEDIVLTLTLFEDREMIEERLKTYAHLFDDKVMKQLKRRRYTGWGRLSRKLINGIRDKQSGKTILDFLKSDGFANRNFMQLIHDDSLTFKEDIQKAQVSGQGDSLHEHIANLAGSPAIKKGILQTVKVVDELVKVMGRHKPENIVIEMARENQTTQKGQKNSRERMKRIEEGIKELGSQILKEHPVENTQLQNEKLYLYYLQNGRDMYVDQELDINRLSDYDVDHIVPQSFLKDDSIDNKVLTRSDKARGKSDNVPSEEVVKKMKNYWRQLLNAKLITQRKFDNLTKAERGGLSELDKAGFIKRQLVETRQITKHVAQILDSRMNTKYDENDKLIREVKVITLKSKLVSDFRKDFQFYKVREINNYHHAHDAYLNAVVGTALIKKYPKLESEFVYGDYKVYDVRKMIAKSEQEIGKATAKYFFYSNIMNFFKTEITLANGEIRKRPLIETNGETGEIVWDKGRDFATVRKVLSMPQVNIVKKTEVQTGGFSKESILPKRNSDKLIARKKDWDPKKYGGFDSPTVAYSVLVVAKVEKGKSKKLKSVKELLGITIMERSSFEKNPIDFLEAKGYKEVKKDLIIKLPKYSLFELENGRKRMLASAGELQKGNELALPSKYVNFLYLASHYEKLKGSPEDNEQKQLFVEQHKHYLDEIIEQISEFSKRVILADANLDKVLSAYNKHRDKPIREQAENIIHLFTLTNLGAPAAFKYFDTTIDRKRYTSTKEVLDATLIHQSITGLYETRIDLSQLGGDGGEAAAKEAAAKEAAAKGGTLNLEDEYRLYETSAEPEVSPGSTWLSDFPQAWAETGGMGLAVRQAPLIIPLKATSTPVSIKQYPMSQEAKLGIKPHIQRLLDQGILVPCQSPWNTPLLPVKKPGTNDYRPVQDLREVNKRVEDIHPTVPNPYNLLSGLPPSHRWYTVLDLKDAFFCLRLHPTSQPLFAFEWRDPGMGISGQLTWTRLPQGFKNSPTLFNEALHRDLADFRIQHPDLILLQYVDDILLAATSELDCQQGTRALLLTLGNLGYRASAKKAQLCQKQVKYLGYLLKEGQRWLTEARKETVMGQPTPKTPRQLREFLGKAGFCRLFIPGFAEMAAPLYPLTKPGTLFNWGPDQQKAYQEIKQALLTAPALGLPDLTKPFELFVDEKQGYAKGVLTQKLGPWRRPVAYLSKKLDPVAAGWPPCLRMVAAIAVLRKDAGKLTMGQPLVILAPHAVEALVKQPPDRWLSNARMTHYQAMLLDTDRVQFGPVVALNPATLLPLPEEGAPHDCLEILAETHGTRPDLTDQPIPDADHTWYTDGSSFLQEGQRKAGAAVTTETEVIWARALPAGTSAQRAELIALTQALKMAEGKRLNVYTDSRYAFATAHIHGEIYRRRGWLTSEGREIKNKSEILALLKALFLPKRLSIIHCLGHQKGDSAEARGNRLADQAAREAAIKTPPDTSTLLAGKRTADGSEFEKRTADGSEFESPKKKAKVE

SEQ ID NO: 1880 - protein, 2103 aa, synthetic construct
MPAAKRVKLDGGDKKYSIGLDIGTNSVGWAVITDEYKVPSKKFKVLGNTDRHSIKKNLIGALLFDSGETAEATRLKRTARRRYTRRKNRICYLQEIFSNEMAKVDDSFFHRLEESFLVEEDKKHERHPIFGNIVDEVAYHEKYPTIYHLRKKLVDSTDKADLRLIYLALAHMIKFRGHFLIEGDLNPDNSDVDKLFIQLVQTYNQLFEENPINASGVDAKAILSARLSKSRRLENLIAQLPGEKKNGLFGNLIALSLGLTPNFKSNFDLAEDAKLQLSKDTYDDDLDNLLAQIGDQYADLFLAAKNLSDAILLSDILRVNTEITKAPLSASMIKRYDEHHQDLTLLKALVRQQLPEKYKEIFFDQSKNGYAGYIDGGASQEEFYKFIKPILEKMDGTEELLVKLNREDLLRKQRTFDNGSIPHQIHLGELHAILRRQEDFYPFLKDNREKIEKILTFRIPYYVGPLARGNSRFAWMTRKSEETITPWNFEEVVDKGASAQSFIERMTNFDKNLPNEKVLPKHSLLYEYFTVYNELTKVKYVTEGMRKPAFLSGEQKKAIVDLLFKTNRKVTVKQLKEDYFKKIECFDSVEISGVEDRFNASLGTYHDLLKIIKDKDFLDNEENEDILEDIVLTLTLFEDREMIEERLKTYAHLFDDKVMKQLKRRRYTGWGRLSRKLINGIRDKQSGKTILDFLKSDGFANRNFMQLIHDDSLTFKEDIQKAQVSGQGDSLHEHIANLAGSPAIKKGILQTVKVVDELVKVMGRHKPENIVIEMARENQTTQKGQKNSRERMKRIEEGIKELGSQILKEHPVENTQLQNEKLYLYYLQNGRDMYVDQELDINRLSDYDVDHIVPQSFLKDDSIDNKVLTRSDKARGKSDNVPSEEVVKKMKNYWRQLLNAKLITQRKFDNLTKAERGGLSELDKAGFIKRQLVETRQITKHVAQILDSRMNTKYDENDKLIREVKVITLKSKLVSDFRKDFQFYKVREINNYHHAHDAYLNAVVGTALIKKYPKLESEFVYGDYKVYDVRKMIAKSEQEIGKATAKYFFYSNIMNFFKTEITLANGEIRKRPLIETNGETGEIVWDKGRDFATVRKVLSMPQVNIVKKTEVQTGGFSKESILPKRNSDKLIARKKDWDPKKYGGFDSPTVAYSVLVVAKVEKGKSKKLKSVKELLGITIMERSSFEKNPIDFLEAKGYKEVKKDLIIKLPKYSLFELENGRKRMLASAGELQKGNELALPSKYVNFLYLASHYEKLKGSPEDNEQKQLFVEQHKHYLDEIIEQISEFSKRVILADANLDKVLSAYNKHRDKPIREQAENIIHLFTLTNLGAPAAFKYFDTTIDRKRYTSTKEVLDATLIHQSITGLYETRIDLSQLGGDGGGGSGGSGGSGGSGGSGGSGGTLNLEDEYRLYETSAEPEVSPGSTWLSDFPQAWAETGGMGLAVRQAPLIIPLKATSTPVSIKQYPMSQEAKLGIKPHIQRLLDQGILVPCQSPWNTPLLPVKKPGTNDYRPVQDLREVNKRVEDIHPTVPNPYNLLSGLPPSHRWYTVLDLKDAFFCLRLHPTSQPLFAFEWRDPGMGISGQLTWTRLPQGFKNSPTLFNEALHRDLADFRIQHPDLILLQYVDDILLAATSELDCQQGTRALLLTLGNLGYRASAKKAQLCQKQVKYLGYLLKEGQRWLTEARKETVMGQPTPKTPRQLREFLGKAGFCRLFIPGFAEMAAPLYPLTKPGTLFNWGPDQQKAYQEIKQALLTAPALGLPDLTKPFELFVDEKQGYAKGVLTQKLGPWRRPVAYLSKKLDPVAAGWPPCLRMVAAIAVLRKDAGKLTMGQPLVILAPHAVEALVKQPPDRWLSNARMTHYQAMLLDTDRVQFGPVVALNPATLLPLPEEGAPHDCLEILAETHGTRPDLTDQPIPDADHTWYTDGSSFLQEGQRKAGAAVTTETEVIWARALPAGTSAQRAELIALTQALKMAEGKRLNVYTDSRYAFATAHIHGEIYRRRGWLTSEGREIKNKSEILALLKALFLPKRLSIIHCLGHQKGDSAEARGNRLADQAAREAAIKTPPDTSTLLAGKRTADGSEFEKRTADGSEFESPKKKAKVE

SEQ ID NO: 1881 - protein, 2094 aa, synthetic construct
MPAAKRVKLDGGDKKYSIGLDIGTNSVGWAVITDEYKVPSKKFKVLGNTDRHSIKKNLIGALLFDSGETAEATRLKRTARRRYTRRKNRICYLQEIFSNEMAKVDDSFFHRLEESFLVEEDKKHERHPIFGNIVDEVAYHEKYPTIYHLRKKLVDSTDKADLRLIYLALAHMIKFRGHFLIEGDLNPDNSDVDKLFIQLVQTYNQLFEENPINASGVDAKAILSARLSKSRRLENLIAQLPGEKKNGLFGNLIALSLGLTPNFKSNFDLAEDAKLQLSKDTYDDDLDNLLAQIGDQYADLFLAAKNLSDAILLSDILRVNTEITKAPLSASMIKRYDEHHQDLTLLKALVRQQLPEKYKEIFFDQSKNGYAGYIDGGASQEEFYKFIKPILEKMDGTEELLVKLNREDLLRKQRTFDNGSIPHQIHLGELHAILRRQEDFYPFLKDNREKIEKILTFRIPYYVGPLARGNSRFAWMTRKSEETITPWNFEEVVDKGASAQSFIERMTNFDKNLPNEKVLPKHSLLYEYFTVYNELTKVKYVTEGMRKPAFLSGEQKKAIVDLLFKTNRKVTVKQLKEDYFKKIECFDSVEISGVEDRFNASLGTYHDLLKIIKDKDFLDNEENEDILEDIVLTLTLFEDREMIEERLKTYAHLFDDKVMKQLKRRRYTGWGRLSRKLINGIRDKQSGKTILDFLKSDGFANRNFMQLIHDDSLTFKEDIQKAQVSGQGDSLHEHIANLAGSPAIKKGILQTVKVVDELVKVMGRHKPENIVIEMARENQTTQKGQKNSRERMKRIEEGIKELGSQILKEHPVENTQLQNEKLYLYYLQNGRDMYVDQELDINRLSDYDVDHIVPQSFLKDDSIDNKVLTRSDKARGKSDNVPSEEVVKKMKNYWRQLLNAKLITQRKFDNLTKAERGGLSELDKAGFIKRQLVETRQITKHVAQILDSRMNTKYDENDKLIREVKVITLKSKLVSDFRKDFQFYKVREINNYHHAHDAYLNAVVGTALIKKYPKLESEFVYGDYKVYDVRKMIAKSEQEIGKATAKYFFYSNIMNFFKTEITLANGEIRKRPLIETNGETGEIVWDKGRDFATVRKVLSMPQVNIVKKTEVQTGGFSKESILPKRNSDKLIARKKDWDPKKYGGFDSPTVAYSVLVVAKVEKGKSKKLKSVKELLGITIMERSSFEKNPIDFLEAKGYKEVKKDLIIKLPKYSLFELENGRKRMLASAGELQKGNELALPSKYVNFLYLASHYEKLKGSPEDNEQKQLFVEQHKHYLDEIIEQISEFSKRVILADANLDKVLSAYNKHRDKPIREQAENIIHLFTLTNLGAPAAFKYFDTTIDRKRYTSTKEVLDATLIHQSITGLYETRIDLSQLGGDGGPAPAPAPAPGGTLNLEDEYRLYETSAEPEVSPGSTWLSDFPQAWAETGGMGLAVRQAPLIIPLKATSTPVSIKQYPMSQEAKLGIKPHIQRLLDQGILVPCQSPWNTPLLPVKKPGTNDYRPVQDLREVNKRVEDIHPTVPNPYNLLSGLPPSHRWYTVLDLKDAFFCLRLHPTSQPLFAFEWRDPGMGISGQLTWTRLPQGFKNSPTLFNEALHRDLADFRIQHPDLILLQYVDDILLAATSELDCQQGTRALLLTLGNLGYRASAKKAQLCQKQVKYLGYLLKEGQRWLTEARKETVMGQPTPKTPRQLREFLGKAGFCRLFIPGFAEMAAPLYPLTKPGTLFNWGPDQQKAYQEIKQALLTAPALGLPDLTKPFELFVDEKQGYAKGVLTQKLGPWRRPVAYLSKKLDPVAAGWPPCLRMVAAIAVLRKDAGKLTMGQPLVILAPHAVEALVKQPPDRWLSNARMTHYQAMLLDTDRVQFGPVVALNPATLLPLPEEGAPHDCLEILAETHGTRPDLTDQPIPDADHTWYTDGSSFLQEGQRKAGAAVTTETEVIWARALPAGTSAQRAELIALTQALKMAEGKRLNVYTDSRYAFATAHIHGEIYRRRGWLTSEGREIKNKSEILALLKALFLPKRLSIIHCLGHQKGDSAEARGNRLADQAAREAAIKTPPDTSTLLAGKRTADGSEFEKRTADGSEFESPKKKAKVE

SEQ ID NO: 1882 - protein, 2093 aa, synthetic construct
MPAAKRVKLDGGDKKYSIGLDIGTNSVGWAVITDEYKVPSKKFKVLGNTDRHSIKKNLIGALLFDSGETAEATRLKRTARRRYTRRKNRICYLQEIFSNEMAKVDDSFFHRLEESFLVEEDKKHERHPIFGNIVDEVAYHEKYPTIYHLRKKLVDSTDKADLRLIYLALAHMIKFRGHFLIEGDLNPDNSDVDKLFIQLVQTYNQLFEENPINASGVDAKAILSARLSKSRRLENLIAQLPGEKKNGLFGNLIALSLGLTPNFKSNFDLAEDAKLQLSKDTYDDDLDNLLAQIGDQYADLFLAAKNLSDAILLSDILRVNTEITKAPLSASMIKRYDEHHQDLTLLKALVRQQLPEKYKEIFFDQSKNGYAGYIDGGASQEEFYKFIKPILEKMDGTEELLVKLNREDLLRKQRTFDNGSIPHQIHLGELHAILRRQEDFYPFLKDNREKIEKILTFRIPYYVGPLARGNSRFAWMTRKSEETITPWNFEEVVDKGASAQSFIERMTNFDKNLPNEKVLPKHSLLYEYFTVYNELTKVKYVTEGMRKPAFLSGEQKKAIVDLLFKTNRKVTVKQLKEDYFKKIECFDSVEISGVEDRFNASLGTYHDLLKIIKDKDFLDNEENEDILEDIVLTLTLFEDREMIEERLKTYAHLFDDKVMKQLKRRRYTGWGRLSRKLINGIRDKQSGKTILDFLKSDGFANRNFMQLIHDDSLTFKEDIQKAQVSGQGDSLHEHIANLAGSPAIKKGILQTVKVVDELVKVMGRHKPENIVIEMARENQTTQKGQKNSRERMKRIEEGIKELGSQILKEHPVENTQLQNEKLYLYYLQNGRDMYVDQELDINRLSDYDVDHIVPQSFLKDDSIDNKVLTRSDKARGKSDNVPSEEVVKKMKNYWRQLLNAKLITQRKFDNLTKAERGGLSELDKAGFIKRQLVETRQITKHVAQILDSRMNTKYDENDKLIREVKVITLKSKLVSDFRKDFQFYKVREINNYHHAHDAYLNAVVGTALIKKYPKLESEFVYGDYKVYDVRKMIAKSEQEIGKATAKYFFYSNIMNFFKTEITLANGEIRKRPLIETNGETGEIVWDKGRDFATVRKVLSMPQVNIVKKTEVQTGGFSKESILPKRNSDKLIARKKDWDPKKYGGFDSPTVAYSVLVVAKVEKGKSKKLKSVKELLGITIMERSSFEKNPIDFLEAKGYKEVKKDLIIKLPKYSLFELENGRKRMLASAGELQKGNELALPSKYVNFLYLASHYEKLKGSPEDNEQKQLFVEQHKHYLDEIIEQISEFSKRVILADANLDKVLSAYNKHRDKPIREQAENIIHLFTLTNLGAPAAFKYFDTTIDRKRYTSTKEVLDATLIHQSITGLYETRIDLSQLGGDGGEAAAKGGSGGTLNLEDEYRLYETSAEPEVSPGSTWLSDFPQAWAETGGMGLAVRQAPLIIPLKATSTPVSIKQYPMSQEAKLGIKPHIQRLLDQGILVPCQSPWNTPLLPVKKPGTNDYRPVQDLREVNKRVEDIHPTVPNPYNLLSGLPPSHRWYTVLDLKDAFFCLRLHPTSQPLFAFEWRDPGMGISGQLTWTRLPQGFKNSPTLFNEALHRDLADFRIQHPDLILLQYVDDILLAATSELDCQQGTRALLLTLGNLGYRASAKKAQLCQKQVKYLGYLLKEGQRWLTEARKETVMGQPTPKTPRQLREFLGKAGFCRLFIPGFAEMAAPLYPLTKPGTLFNWGPDQQKAYQEIKQALLTAPALGLPDLTKPFELFVDEKQGYAKGVLTQKLGPWRRPVAYLSKKLDPVAAGWPPCLRMVAAIAVLRKDAGKLTMGQPLVILAPHAVEALVKQPPDRWLSNARMTHYQAMLLDTDRVQFGPVVALNPATLLPLPEEGAPHDCLEILAETHGTRPDLTDQPIPDADHTWYTDGSSFLQEGQRKAGAAVTTETEVIWARALPAGTSAQRAELIALTQALKMAEGKRLNVYTDSRYAFATAHIHGEIYRRRGWLTSEGREIKNKSEILALLKALFLPKRLSIIHCLGHQKGDSAEARGNRLADQAAREAAIKTPPDTSTLLAGKRTADGSEFEKRTADGSEFESPKKKAKVE

SEQ ID NO: 1883 - protein, 2094 aa, synthetic construct
MPAAKRVKLDGGDKKYSIGLDIGTNSVGWAVITDEYKVPSKKFKVLGNTDRHSIKKNLIGALLFDSGETAEATRLKRTARRRYTRRKNRICYLQEIFSNEMAKVDDSFFHRLEESFLVEEDKKHERHPIFGNIVDEVAYHEKYPTIYHLRKKLVDSTDKADLRLIYLALAHMIKFRGHFLIEGDLNPDNSDVDKLFIQLVQTYNQLFEENPINASGVDAKAILSARLSKSRRLENLIAQLPGEKKNGLFGNLIALSLGLTPNFKSNFDLAEDAKLQLSKDTYDDDLDNLLAQIGDQYADLFLAAKNLSDAILLSDILRVNTEITKAPLSASMIKRYDEHHQDLTLLKALVRQQLPEKYKEIFFDQSKNGYAGYIDGGASQEEFYKFIKPILEKMDGTEELLVKLNREDLLRKQRTFDNGSIPHQIHLGELHAILRRQEDFYPFLKDNREKIEKILTFRIPYYVGPLARGNSRFAWMTRKSEETITPWNFEEVVDKGASAQSFIERMTNFDKNLPNEKVLPKHSLLYEYFTVYNELTKVKYVTEGMRKPAFLSGEQKKAIVDLLFKTNRKVTVKQLKEDYFKKIECFDSVEISGVEDRFNASLGTYHDLLKIIKDKDFLDNEENEDILEDIVLTLTLFEDREMIEERLKTYAHLFDDKVMKQLKRRRYTGWGRLSRKLINGIRDKQSGKTILDFLKSDGFANRNFMQLIHDDSLTFKEDIQKAQVSGQGDSLHEHIANLAGSPAIKKGILQTVKVVDELVKVMGRHKPENIVIEMARENQTTQKGQKNSRERMKRIEEGIKELGSQILKEHPVENTQLQNEKLYLYYLQNGRDMYVDQELDINRLSDYDVDHIVPQSFLKDDSIDNKVLTRSDKARGKSDNVPSEEVVKKMKNYWRQLLNAKLITQRKFDNLTKAERGGLSELDKAGFIKRQLVETRQITKHVAQILDSRMNTKYDENDKLIREVKVITLKSKLVSDFRKDFQFYKVREINNYHHAHDAYLNAVVGTALIKKYPKLESEFVYGDYKVYDVRKMIAKSEQEIGKATAKYFFYSNIMNFFKTEITLANGEIRKRPLIETNGETGEIVWDKGRDFATVRKVLSMPQVNIVKKTEVQTGGFSKESILPKRNSDKLIARKKDWDPKKYGGFDSPTVAYSVLVVAKVEKGKSKKLKSVKELLGITIMERSSFEKNPIDFLEAKGYKEVKKDLIIKLPKYSLFELENGRKRMLASAGELQKGNELALPSKYVNFLYLASHYEKLKGSPEDNEQKQLFVEQHKHYLDEIIEQISEFSKRVILADANLDKVLSAYNKHRDKPIREQAENIIHLFTLTNLGAPAAFKYFDTTIDRKRYTSTKEVLDATLIHQSITGLYETRIDLSQLGGDGGPAPGSSGGSGGTLNLEDEYRLYETSAEPEVSPGSTWLSDFPQAWAETGGMGLAVRQAPLIIPLKATSTPVSIKQYPMSQEAKLGIKPHIQRLLDQGILVPCQSPWNTPLLPVKKPGTNDYRPVQDLREVNKRVEDIHPTVPNPYNLLSGLPPSHRWYTVLDLKDAFFCLRLHPTSQPLFAFEWRDPGMGISGQLTWTRLPQGFKNSPTLFNEALHRDLADFRIQHPDLILLQYVDDILLAATSELDCQQGTRALLLTLGNLGYRASAKKAQLCQKQVKYLGYLLKEGQRWLTEARKETVMGQPTPKTPRQLREFLGKAGFCRLFIPGFAEMAAPLYPLTKPGTLFNWGPDQQKAYQEIKQALLTAPALGLPDLTKPFELFVDEKQGYAKGVLTQKLGPWRRPVAYLSKKLDPVAAGWPPCLRMVAAIAVLRKDAGKLTMGQPLVILAPHAVEALVKQPPDRWLSNARMTHYQAMLLDTDRVQFGPVVALNPATLLPLPEEGAPHDCLEILAETHGTRPDLTDQPIPDADHTWYTDGSSFLQEGQRKAGAAVTTETEVIWARALPAGTSAQRAELIALTQALKMAEGKRLNVYTDSRYAFATAHIHGEIYRRRGWLTSEGREIKNKSEILALLKALFLPKRLSIIHCLGHQKGDSAEARGNRLADQAAREAAIKTPPDTSTLLAGKRTADGSEFEKRTADGSEFESPKKKAKVE

SEQ ID NO: 1884 - protein, 2094 aa, synthetic construct
MPAAKRVKLDGGDKKYSIGLDIGTNSVGWAVITDEYKVPSKKFKVLGNTDRHSIKKNLIGALLFDSGETAEATRLKRTARRRYTRRKNRICYLQEIFSNEMAKVDDSFFHRLEESFLVEEDKKHERHPIFGNIVDEVAYHEKYPTIYHLRKKLVDSTDKADLRLIYLALAHMIKFRGHFLIEGDLNPDNSDVDKLFIQLVQTYNQLFEENPINASGVDAKAILSARLSKSRRLENLIAQLPGEKKNGLFGNLIALSLGLTPNFKSNFDLAEDAKLQLSKDTYDDDLDNLLAQIGDQYADLFLAAKNLSDAILLSDILRVNTEITKAPLSASMIKRYDEHHQDLTLLKALVRQQLPEKYKEIFFDQSKNGYAGYIDGGASQEEFYKFIKPILEKMDGTEELLVKLNREDLLRKQRTFDNGSIPHQIHLGELHAILRRQEDFYPFLKDNREKIEKILTFRIPYYVGPLARGNSRFAWMTRKSEETITPWNFEEVVDKGASAQSFIERMTNFDKNLPNEKVLPKHSLLYEYFTVYNELTKVKYVTEGMRKPAFLSGEQKKAIVDLLFKTNRKVTVKQLKEDYFKKIECFDSVEISGVEDRFNASLGTYHDLLKIIKDKDFLDNEENEDILEDIVLTLTLFEDREMIEERLKTYAHLFDDKVMKQLKRRRYTGWGRLSRKLINGIRDKQSGKTILDFLKSDGFANRNFMQLIHDDSLTFKEDIQKAQVSGQGDSLHEHIANLAGSPAIKKGILQTVKVVDELVKVMGRHKPENIVIEMARENQTTQKGQKNSRERMKRIEEGIKELGSQILKEHPVENTQLQNEKLYLYYLQNGRDMYVDQELDINRLSDYDVDHIVPQSFLKDDSIDNKVLTRSDKARGKSDNVPSEEVVKKMKNYWRQLLNAKLITQRKFDNLTKAERGGLSELDKAGFIKRQLVETRQITKHVAQILDSRMNTKYDENDKLIREVKVITLKSKLVSDFRKDFQFYKVREINNYHHAHDAYLNAVVGTALIKKYPKLESEFVYGDYKVYDVRKMIAKSEQEIGKATAKYFFYSNIMNFFKTEITLANGEIRKRPLIETNGETGEIVWDKGRDFATVRKVLSMPQVNIVKKTEVQTGGFSKESILPKRNSDKLIARKKDWDPKKYGGFDSPTVAYSVLVVAKVEKGKSKKLKSVKELLGITIMERSSFEKNPIDFLEAKGYKEVKKDLIIKLPKYSLFELENGRKRMLASAGELQKGNELALPSKYVNFLYLASHYEKLKGSPEDNEQKQLFVEQHKHYLDEIIEQISEFSKRVILADANLDKVLSAYNKHRDKPIREQAENIIHLFTLTNLGAPAAFKYFDTTIDRKRYTSTKEVLDATLIHQSITGLYETRIDLSQLGGDGGGGGGSSGGSGGTLNLEDEYRLYETSAEPEVSPGSTWLSDFPQAWAETGGMGLAVRQAPLIIPLKATSTPVSIKQYPMSQEAKLGIKPHIQRLLDQGILVPCQSPWNTPLLPVKKPGTNDYRPVQDLREVNKRVEDIHPTVPNPYNLLSGLPPSHRWYTVLDLKDAFFCLRLHPTSQPLFAFEWRDPGMGISGQLTWTRLPQGFKNSPTLFNEALHRDLADFRIQHPDLILLQYVDDILLAATSELDCQQGTRALLLTLGNLGYRASAKKAQLCQKQVKYLGYLLKEGQRWLTEARKETVMGQPTPKTPRQLREFLGKAGFCRLFIPGFAEMAAPLYPLTKPGTLFNWGPDQQKAYQEIKQALLTAPALGLPDLTKPFELFVDEKQGYAKGVLTQKLGPWRRPVAYLSKKLDPVAAGWPPCLRMVAAIAVLRKDAGKLTMGQPLVILAPHAVEALVKQPPDRWLSNARMTHYQAMLLDTDRVQFGPVVALNPATLLPLPEEGAPHDCLEILAETHGTRPDLTDQPIPDADHTWYTDGSSFLQEGQRKAGAAVTTETEVIWARALPAGTSAQRAELIALTQALKMAEGKRLNVYTDSRYAFATAHIHGEIYRRRGWLTSEGREIKNKSEILALLKALFLPKRLSIIHCLGHQKGDSAEARGNRLADQAAREAAIKTPPDTSTLLAGKRTADGSEFEKRTADGSEFESPKKKAKVE

SEQ ID NO: 1885 - protein, 2090 aa, synthetic construct
MPAAKRVKLDGGDKKYSIGLDIGTNSVGWAVITDEYKVPSKKFKVLGNTDRHSIKKNLIGALLFDSGETAEATRLKRTARRRYTRRKNRICYLQEIFSNEMAKVDDSFFHRLEESFLVEEDKKHERHPIFGNIVDEVAYHEKYPTIYHLRKKLVDSTDKADLRLIYLALAHMIKFRGHFLIEGDLNPDNSDVDKLFIQLVQTYNQLFEENPINASGVDAKAILSARLSKSRRLENLIAQLPGEKKNGLFGNLIALSLGLTPNFKSNFDLAEDAKLQLSKDTYDDDLDNLLAQIGDQYADLFLAAKNLSDAILLSDILRVNTEITKAPLSASMIKRYDEHHQDLTLLKALVRQQLPEKYKEIFFDQSKNGYAGYIDGGASQEEFYKFIKPILEKMDGTEELLVKLNREDLLRKQRTFDNGSIPHQIHLGELHAILRRQEDFYPFLKDNREKIEKILTFRIPYYVGPLARGNSRFAWMTRKSEETITPWNFEEVVDKGASAQSFIERMTNFDKNLPNEKVLPKHSLLYEYFTVYNELTKVKYVTEGMRKPAFLSGEQKKAIVDLLFKTNRKVTVKQLKEDYFKKIECFDSVEISGVEDRFNASLGTYHDLLKIIKDKDFLDNEENEDILEDIVLTLTLFEDREMIEERLKTYAHLFDDKVMKQLKRRRYTGWGRLSRKLINGIRDKQSGKTILDFLKSDGFANRNFMQLIHDDSLTFKEDIQKAQVSGQGDSLHEHIANLAGSPAIKKGILQTVKVVDELVKVMGRHKPENIVIEMARENQTTQKGQKNSRERMKRIEEGIKELGSQILKEHPVENTQLQNEKLYLYYLQNGRDMYVDQELDINRLSDYDVDHIVPQSFLKDDSIDNKVLTRSDKARGKSDNVPSEEVVKKMKNYWRQLLNAKLITQRKFDNLTKAERGGLSELDKAGFIKRQLVETRQITKHVAQILDSRMNTKYDENDKLIREVKVITLKSKLVSDFRKDFQFYKVREINNYHHAHDAYLNAVVGTALIKKYPKLESEFVYGDYKVYDVRKMIAKSEQEIGKATAKYFFYSNIMNFFKTEITLANGEIRKRPLIETNGETGEIVWDKGRDFATVRKVLSMPQVNIVKKTEVQTGGFSKESILPKRNSDKLIARKKDWDPKKYGGFDSPTVAYSVLVVAKVEKGKSKKLKSVKELLGITIMERSSFEKNPIDFLEAKGYKEVKKDLIIKLPKYSLFELENGRKRMLASAGELQKGNELALPSKYVNFLYLASHYEKLKGSPEDNEQKQLFVEQHKHYLDEIIEQISEFSKRVILADANLDKVLSAYNKHRDKPIREQAENIIHLFTLTNLGAPAAFKYFDTTIDRKRYTSTKEVLDATLIHQSITGLYETRIDLSQLGGDGGGGGGSGGTLNLEDEYRLYETSAEPEVSPGSTWLSDFPQAWAETGGMGLAVRQAPLIIPLKATSTPVSIKQYPMSQEAKLGIKPHIQRLLDQGILVPCQSPWNTPLLPVKKPGTNDYRPVQDLREVNKRVEDIHPTVPNPYNLLSGLPPSHRWYTVLDLKDAFFCLRLHPTSQPLFAFEWRDPGMGISGQLTWTRLPQGFKNSPTLFNEALHRDLADFRIQHPDLILLQYVDDILLAATSELDCQQGTRALLLTLGNLGYRASAKKAQLCQKQVKYLGYLLKEGQRWLTEARKETVMGQPTPKTPRQLREFLGKAGFCRLFIPGFAEMAAPLYPLTKPGTLFNWGPDQQKAYQEIKQALLTAPALGLPDLTKPFELFVDEKQGYAKGVLTQKLGPWRRPVAYLSKKLDPVAAGWPPCLRMVAAIAVLRKDAGKLTMGQPLVILAPHAVEALVKQPPDRWLSNARMTHYQAMLLDTDRVQFGPVVALNPATLLPLPEEGAPHDCLEILAETHGTRPDLTDQPIPDADHTWYTDGSSFLQEGQRKAGAAVTTETEVIWARALPAGTSAQRAELIALTQALKMAEGKRLNVYTDSRYAFATAHIHGEIYRRRGWLTSEGREIKNKSEILALLKALFLPKRLSIIHCLGHQKGDSAEARGNRLADQAAREAAIKTPPDTSTLLAGKRTADGSEFEKRTADGSEFESPKKKAKVE

SEQ ID NO: 1886 - protein, 2096 aa, synthetic construct
MPAAKRVKLDGGDKKYSIGLDIGTNSVGWAVITDEYKVPSKKFKVLGNTDRHSIKKNLIGALLFDSGETAEATRLKRTARRRYTRRKNRICYLQEIFSNEMAKVDDSFFHRLEESFLVEEDKKHERHPIFGNIVDEVAYHEKYPTIYHLRKKLVDSTDKADLRLIYLALAHMIKFRGHFLIEGDLNPDNSDVDKLFIQLVQTYNQLFEENPINASGVDAKAILSARLSKSRRLENLIAQLPGEKKNGLFGNLIALSLGLTPNFKSNFDLAEDAKLQLSKDTYDDDLDNLLAQIGDQYADLFLAAKNLSDAILLSDILRVNTEITKAPLSASMIKRYDEHHQDLTLLKALVRQQLPEKYKEIFFDQSKNGYAGYIDGGASQEEFYKFIKPILEKMDGTEELLVKLNREDLLRKQRTFDNGSIPHQIHLGELHAILRRQEDFYPFLKDNREKIEKILTFRIPYYVGPLARGNSRFAWMTRKSEETITPWNFEEVVDKGASAQSFIERMTNFDKNLPNEKVLPKHSLLYEYFTVYNELTKVKYVTEGMRKPAFLSGEQKKAIVDLLFKTNRKVTVKQLKEDYFKKIECFDSVEISGVEDRFNASLGTYHDLLKIIKDKDFLDNEENEDILEDIVLTLTLFEDREMIEERLKTYAHLFDDKVMKQLKRRRYTGWGRLSRKLINGIRDKQSGKTILDFLKSDGFANRNFMQLIHDDSLTFKEDIQKAQVSGQGDSLHEHIANLAGSPAIKKGILQTVKVVDELVKVMGRHKPENIVIEMARENQTTQKGQKNSRERMKRIEEGIKELGSQILKEHPVENTQLQNEKLYLYYLQNGRDMYVDQELDINRLSDYDVDHIVPQSFLKDDSIDNKVLTRSDKARGKSDNVPSEEVVKKMKNYWRQLLNAKLITQRKFDNLTKAERGGLSELDKAGFIKRQLVETRQITKHVAQILDSRMNTKYDENDKLIREVKVITLKSKLVSDFRKDFQFYKVREINNYHHAHDAYLNAVVGTALIKKYPKLESEFVYGDYKVYDVRKMIAKSEQEIGKATAKYFFYSNIMNFFKTEITLANGEIRKRPLIETNGETGEIVWDKGRDFATVRKVLSMPQVNIVKKTEVQTGGFSKESILPKRNSDKLIARKKDWDPKKYGGFDSPTVAYSVLVVAKVEKGKSKKLKSVKELLGITIMERSSFEKNPIDFLEAKGYKEVKKDLIIKLPKYSLFELENGRKRMLASAGELQKGNELALPSKYVNFLYLASHYEKLKGSPEDNEQKQLFVEQHKHYLDEIIEQISEFSKRVILADANLDKVLSAYNKHRDKPIREQAENIIHLFTLTNLGAPAAFKYFDTTIDRKRYTSTKEVLDATLIHQSITGLYETRIDLSQLGGDGGGGGEAAAKPAPGGTLNLEDEYRLYETSAEPEVSPGSTWLSDFPQAWAETGGMGLAVRQAPLIIPLKATSTPVSIKQYPMSQEAKLGIKPHIQRLLDQGILVPCQSPWNTPLLPVKKPGTNDYRPVQDLREVNKRVEDIHPTVPNPYNLLSGLPPSHRWYTVLDLKDAFFCLRLHPTSQPLFAFEWRDPGMGISGQLTWTRLPQGFKNSPTLFNEALHRDLADFRIQHPDLILLQYVDDILLAATSELDCQQGTRALLLTLGNLGYRASAKKAQLCQKQVKYLGYLLKEGQRWLTEARKETVMGQPTPKTPRQLREFLGKAGFCRLFIPGFAEMAAPLYPLTKPGTLFNWGPDQQKAYQEIKQALLTAPALGLPDLTKPFELFVDEKQGYAKGVLTQKLGPWRRPVAYLSKKLDPVAAGWPPCLRMVAAIAVLRKDAGKLTMGQPLVILAPHAVEALVKQPPDRWLSNARMTHYQAMLLDTDRVQFGPVVALNPATLLPLPEEGAPHDCLEILAETHGTRPDLTDQPIPDADHTWYTDGSSFLQEGQRKAGAAVTTETEVIWARALPAGTSAQRAELIALTQALKMAEGKRLNVYTDSRYAFATAHIHGEIYRRRGWLTSEGREIKNKSEILALLKALFLPKRLSIIHCLGHQKGDSAEARGNRLADQAAREAAIKTPPDTSTLLAGKRTADGSEFEKRTADGSEFESPKKKAKVE

SEQ ID NO: 1887 - protein, 2091 aa, synthetic construct
MPAAKRVKLDGGDKKYSIGLDIGTNSVGWAVITDEYKVPSKKFKVLGNTDRHSIKKNLIGALLFDSGETAEATRLKRTARRRYTRRKNRICYLQEIFSNEMAKVDDSFFHRLEESFLVEEDKKHERHPIFGNIVDEVAYHEKYPTIYHLRKKLVDSTDKADLRLIYLALAHMIKFRGHFLIEGDLNPDNSDVDKLFIQLVQTYNQLFEENPINASGVDAKAILSARLSKSRRLENLIAQLPGEKKNGLFGNLIALSLGLTPNFKSNFDLAEDAKLQLSKDTYDDDLDNLLAQIGDQYADLFLAAKNLSDAILLSDILRVNTEITKAPLSASMIKRYDEHHQDLTLLKALVRQQLPEKYKEIFFDQSKNGYAGYIDGGASQEEFYKFIKPILEKMDGTEELLVKLNREDLLRKQRTFDNGSIPHQIHLGELHAILRRQEDFYPFLKDNREKIEKILTFRIPYYVGPLARGNSRFAWMTRKSEETITPWNFEEVVDKGASAQSFIERMTNFDKNLPNEKVLPKHSLLYEYFTVYNELTKVKYVTEGMRKPAFLSGEQKKAIVDLLFKTNRKVTVKQLKEDYFKKIECFDSVEISGVEDRFNASLGTYHDLLKIIKDKDFLDNEENEDILEDIVLTLTLFEDREMIEERLKTYAHLFDDKVMKQLKRRRYTGWGRLSRKLINGIRDKQSGKTILDFLKSDGFANRNFMQLIHDDSLTFKEDIQKAQVSGQGDSLHEHIANLAGSPAIKKGILQTVKVVDELVKVMGRHKPENIVIEMARENQTTQKGQKNSRERMKRIEEGIKELGSQILKEHPVENTQLQNEKLYLYYLQNGRDMYVDQELDINRLSDYDVDHIVPQSFLKDDSIDNKVLTRSDKARGKSDNVPSEEVVKKMKNYWRQLLNAKLITQRKFDNLTKAERGGLSELDKAGFIKRQLVETRQITKHVAQILDSRMNTKYDENDKLIREVKVITLKSKLVSDFRKDFQFYKVREINNYHHAHDAYLNAVVGTALIKKYPKLESEFVYGDYKVYDVRKMIAKSEQEIGKATAKYFFYSNIMNFFKTEITLANGEIRKRPLIETNGETGEIVWDKGRDFATVRKVLSMPQVNIVKKTEVQTGGFSKESILPKRNSDKLIARKKDWDPKKYGGFDSPTVAYSVLVVAKVEKGKSKKLKSVKELLGITIMERSSFEKNPIDFLEAKGYKEVKKDLIIKLPKYSLFELENGRKRMLASAGELQKGNELALPSKYVNFLYLASHYEKLKGSPEDNEQKQLFVEQHKHYLDEIIEQISEFSKRVILADANLDKVLSAYNKHRDKPIREQAENIIHLFTLTNLGAPAAFKYFDTTIDRKRYTSTKEVLDATLIHQSITGLYETRIDLSQLGGDGGGSSPAPGGTLNLEDEYRLYETSAEPEVSPGSTWLSDFPQAWAETGGMGLAVRQAPLIIPLKATSTPVSIKQYPMSQEAKLGIKPHIQRLLDQGILVPCQSPWNTPLLPVKKPGTNDYRPVQDLREVNKRVEDIHPTVPNPYNLLSGLPPSHRWYTVLDLKDAFFCLRLHPTSQPLFAFEWRDPGMGISGQLTWTRLPQGFKNSPTLFNEALHRDLADFRIQHPDLILLQYVDDILLAATSELDCQQGTRALLLTLGNLGYRASAKKAQLCQKQVKYLGYLLKEGQRWLTEARKETVMGQPTPKTPRQLREFLGKAGFCRLFIPGFAEMAAPLYPLTKPGTLFNWGPDQQKAYQEIKQALLTAPALGLPDLTKPFELFVDEKQGYAKGVLTQKLGPWRRPVAYLSKKLDPVAAGWPPCLRMVAAIAVLRKDAGKLTMGQPLVILAPHAVEALVKQPPDRWLSNARMTHYQAMLLDTDRVQFGPVVALNPATLLPLPEEGAPHDCLEILAETHGTRPDLTDQPIPDADHTWYTDGSSFLQEGQRKAGAAVTTETEVIWARALPAGTSAQRAELIALTQALKMAEGKRLNVYTDSRYAFATAHIHGEIYRRRGWLTSEGREIKNKSEILALLKALFLPKRLSIIHCLGHQKGDSAEARGNRLADQAAREAAIKTPPDTSTLLAGKRTADGSEFEKRTADGSEFESPKKKAKVE

SEQ ID NO: 1888 - protein, 2093 aa, synthetic construct
MPAAKRVKLDGGDKKYSIGLDIGTNSVGWAVITDEYKVPSKKFKVLGNTDRHSIKKNLIGALLFDSGETAEATRLKRTARRRYTRRKNRICYLQEIFSNEMAKVDDSFFHRLEESFLVEEDKKHERHPIFGNIVDEVAYHEKYPTIYHLRKKLVDSTDKADLRLIYLALAHMIKFRGHFLIEGDLNPDNSDVDKLFIQLVQTYNQLFEENPINASGVDAKAILSARLSKSRRLENLIAQLPGEKKNGLFGNLIALSLGLTPNFKSNFDLAEDAKLQLSKDTYDDDLDNLLAQIGDQYADLFLAAKNLSDAILLSDILRVNTEITKAPLSASMIKRYDEHHQDLTLLKALVRQQLPEKYKEIFFDQSKNGYAGYIDGGASQEEFYKFIKPILEKMDGTEELLVKLNREDLLRKQRTFDNGSIPHQIHLGELHAILRRQEDFYPFLKDNREKIEKILTFRIPYYVGPLARGNSRFAWMTRKSEETITPWNFEEVVDKGASAQSFIERMTNFDKNLPNEKVLPKHSLLYEYFTVYNELTKVKYVTEGMRKPAFLSGEQKKAIVDLLFKTNRKVTVKQLKEDYFKKIECFDSVEISGVEDRFNASLGTYHDLLKIIKDKDFLDNEENEDILEDIVLTLTLFEDREMIEERLKTYAHLFDDKVMKQLKRRRYTGWGRLSRKLINGIRDKQSGKTILDFLKSDGFANRNFMQLIHDDSLTFKEDIQKAQVSGQGDSLHEHIANLAGSPAIKKGILQTVKVVDELVKVMGRHKPENIVIEMARENQTTQKGQKNSRERMKRIEEGIKELGSQILKEHPVENTQLQNEKLYLYYLQNGRDMYVDQELDINRLSDYDVDHIVPQSFLKDDSIDNKVLTRSDKARGKSDNVPSEEVVKKMKNYWRQLLNAKLITQRKFDNLTKAERGGLSELDKAGFIKRQLVETRQITKHVAQILDSRMNTKYDENDKLIREVKVITLKSKLVSDFRKDFQFYKVREINNYHHAHDAYLNAVVGTALIKKYPKLESEFVYGDYKVYDVRKMIAKSEQEIGKATAKYFFYSNIMNFFKTEITLANGEIRKRPLIETNGETGEIVWDKGRDFATVRKVLSMPQVNIVKKTEVQTGGFSKESILPKRNSDKLIARKKDWDPKKYGGFDSPTVAYSVLVVAKVEKGKSKKLKSVKELLGITIMERSSFEKNPIDFLEAKGYKEVKKDLIIKLPKYSLFELENGRKRMLASAGELQKGNELALPSKYVNFLYLASHYEKLKGSPEDNEQKQLFVEQHKHYLDEIIEQISEFSKRVILADANLDKVLSAYNKHRDKPIREQAENIIHLFTLTNLGAPAAFKYFDTTIDRKRYTSTKEVLDATLIHQSITGLYETRIDLSQLGGDGGEAAAKGGGGGTLNLEDEYRLYETSAEPEVSPGSTWLSDFPQAWAETGGMGLAVRQAPLIIPLKATSTPVSIKQYPMSQEAKLGIKPHIQRLLDQGILVPCQSPWNTPLLPVKKPGTNDYRPVQDLREVNKRVEDIHPTVPNPYNLLSGLPPSHRWYTVLDLKDAFFCLRLHPTSQPLFAFEWRDPGMGISGQLTWTRLPQGFKNSPTLFNEALHRDLADFRIQHPDLILLQYVDDILLAATSELDCQQGTRALLLTLGNLGYRASAKKAQLCQKQVKYLGYLLKEGQRWLTEARKETVMGQPTPKTPRQLREFLGKAGFCRLFIPGFAEMAAPLYPLTKPGTLFNWGPDQQKAYQEIKQALLTAPALGLPDLTKPFELFVDEKQGYAKGVLTQKLGPWRRPVAYLSKKLDPVAAGWPPCLRMVAAIAVLRKDAGKLTMGQPLVILAPHAVEALVKQPPDRWLSNARMTHYQAMLLDTDRVQFGPVVALNPATLLPLPEEGAPHDCLEILAETHGTRPDLTDQPIPDADHTWYTDGSSFLQEGQRKAGAAVTTETEVIWARALPAGTSAQRAELIALTQALKMAEGKRLNVYTDSRYAFATAHIHGEIYRRRGWLTSEGREIKNKSEILALLKALFLPKRLSIIHCLGHQKGDSAEARGNRLADQAAREAAIKTPPDTSTLLAGKRTADGSEFEKRTADGSEFESPKKKAKVE

SEQ ID NO: 1889 - protein, 2096 aa, synthetic construct
MPAAKRVKLDGGDKKYSIGLDIGTNSVGWAVITDEYKVPSKKFKVLGNTDRHSIKKNLIGALLFDSGETAEATRLKRTARRRYTRRKNRICYLQEIFSNEMAKVDDSFFHRLEESFLVEEDKKHERHPIFGNIVDEVAYHEKYPTIYHLRKKLVDSTDKADLRLIYLALAHMIKFRGHFLIEGDLNPDNSDVDKLFIQLVQTYNQLFEENPINASGVDAKAILSARLSKSRRLENLIAQLPGEKKNGLFGNLIALSLGLTPNFKSNFDLAEDAKLQLSKDTYDDDLDNLLAQIGDQYADLFLAAKNLSDAILLSDILRVNTEITKAPLSASMIKRYDEHHQDLTLLKALVRQQLPEKYKEIFFDQSKNGYAGYIDGGASQEEFYKFIKPILEKMDGTEELLVKLNREDLLRKQRTFDNGSIPHQIHLGELHAILRRQEDFYPFLKDNREKIEKILTFRIPYYVGPLARGNSRFAWMTRKSEETITPWNFEEVVDKGASAQSFIERMTNFDKNLPNEKVLPKHSLLYEYFTVYNELTKVKYVTEGMRKPAFLSGEQKKAIVDLLFKTNRKVTVKQLKEDYFKKIECFDSVEISGVEDRFNASLGTYHDLLKIIKDKDFLDNEENEDILEDIVLTLTLFEDREMIEERLKTYAHLFDDKVMKQLKRRRYTGWGRLSRKLINGIRDKQSGKTILDFLKSDGFANRNFMQLIHDDSLTFKEDIQKAQVSGQGDSLHEHIANLAGSPAIKKGILQTVKVVDELVKVMGRHKPENIVIEMARENQTTQKGQKNSRERMKRIEEGIKELGSQILKEHPVENTQLQNEKLYLYYLQNGRDMYVDQELDINRLSDYDVDHIVPQSFLKDDSIDNKVLTRSDKARGKSDNVPSEEVVKKMKNYWRQLLNAKLITQRKFDNLTKAERGGLSELDKAGFIKRQLVETRQITKHVAQILDSRMNTKYDENDKLIREVKVITLKSKLVSDFRKDFQFYKVREINNYHHAHDAYLNAVVGTALIKKYPKLESEFVYGDYKVYDVRKMIAKSEQEIGKATAKYFFYSNIMNFFKTEITLANGEIRKRPLIETNGETGEIVWDKGRDFATVRKVLSMPQVNIVKKTEVQTGGFSKESILPKRNSDKLIARKKDWDPKKYGGFDSPTVAYSVLVVAKVEKGKSKKLKSVKELLGITIMERSSFEKNPIDFLEAKGYKEVKKDLIIKLPKYSLFELENGRKRMLASAGELQKGNELALPSKYVNFLYLASHYEKLKGSPEDNEQKQLFVEQHKHYLDEIIEQISEFSKRVILADANLDKVLSAYNKHRDKPIREQAENIIHLFTLTNLGAPAAFKYFDTTIDRKRYTSTKEVLDATLIHQSITGLYETRIDLSQLGGDGGGGSGSSEAAAKGGTLNLEDEYRLYETSAEPEVSPGSTWLSDFPQAWAETGGMGLAVRQAPLIIPLKATSTPVSIKQYPMSQEAKLGIKPHIQRLLDQGILVPCQSPWNTPLLPVKKPGTNDYRPVQDLREVNKRVEDIHPTVPNPYNLLSGLPPSHRWYTVLDLKDAFFCLRLHPTSQPLFAFEWRDPGMGISGQLTWTRLPQGFKNSPTLFNEALHRDLADFRIQHPDLILLQYVDDILLAATSELDCQQGTRALLLTLGNLGYRASAKKAQLCQKQVKYLGYLLKEGQRWLTEARKETVMGQPTPKTPRQLREFLGKAGFCRLFIPGFAEMAAPLYPLTKPGTLFNWGPDQQKAYQEIKQALLTAPALGLPDLTKPFELFVDEKQGYAKGVLTQKLGPWRRPVAYLSKKLDPVAAGWPPCLRMVAAIAVLRKDAGKLTMGQPLVILAPHAVEALVKQPPDRWLSNARMTHYQAMLLDTDRVQFGPVVALNPATLLPLPEEGAPHDCLEILAETHGTRPDLTDQPIPDADHTWYTDGSSFLQEGQRKAGAAVTTETEVIWARALPAGTSAQRAELIALTQALKMAEGKRLNVYTDSRYAFATAHIHGEIYRRRGWLTSEGREIKNKSEILALLKALFLPKRLSIIHCLGHQKGDSAEARGNRLADQAAREAAIKTPPDTSTLLAGKRTADGSEFEKRTADGSEFESPKKKAKVE

SEQ ID NO: 1890 - protein, 2096 aa, synthetic construct
MPAAKRVKLDGGDKKYSIGLDIGTNSVGWAVITDEYKVPSKKFKVLGNTDRHSIKKNLIGALLFDSGETAEATRLKRTARRRYTRRKNRICYLQEIFSNEMAKVDDSFFHRLEESFLVEEDKKHERHPIFGNIVDEVAYHEKYPTIYHLRKKLVDSTDKADLRLIYLALAHMIKFRGHFLIEGDLNPDNSDVDKLFIQLVQTYNQLFEENPINASGVDAKAILSARLSKSRRLENLIAQLPGEKKNGLFGNLIALSLGLTPNFKSNFDLAEDAKLQLSKDTYDDDLDNLLAQIGDQYADLFLAAKNLSDAILLSDILRVNTEITKAPLSASMIKRYDEHHQDLTLLKALVRQQLPEKYKEIFFDQSKNGYAGYIDGGASQEEFYKFIKPILEKMDGTEELLVKLNREDLLRKQRTFDNGSIPHQIHLGELHAILRRQEDFYPFLKDNREKIEKILTFRIPYYVGPLARGNSRFAWMTRKSEETITPWNFEEVVDKGASAQSFIERMTNFDKNLPNEKVLPKHSLLYEYFTVYNELTKVKYVTEGMRKPAFLSGEQKKAIVDLLFKTNRKVTVKQLKEDYFKKIECFDSVEISGVEDRFNASLGTYHDLLKIIKDKDFLDNEENEDILEDIVLTLTLFEDREMIEERLKTYAHLFDDKVMKQLKRRRYTGWGRLSRKLINGIRDKQSGKTILDFLKSDGFANRNFMQLIHDDSLTFKEDIQKAQVSGQGDSLHEHIANLAGSPAIKKGILQTVKVVDELVKVMGRHKPENIVIEMARENQTTQKGQKNSRERMKRIEEGIKELGSQILKEHPVENTQLQNEKLYLYYLQNGRDMYVDQELDINRLSDYDVDHIVPQSFLKDDSIDNKVLTRSDKARGKSDNVPSEEVVKKMKNYWRQLLNAKLITQRKFDNLTKAERGGLSELDKAGFIKRQLVETRQITKHVAQILDSRMNTKYDENDKLIREVKVITLKSKLVSDFRKDFQFYKVREINNYHHAHDAYLNAVVGTALIKKYPKLESEFVYGDYKVYDVRKMIAKSEQEIGKATAKYFFYSNIMNFFKTEITLANGEIRKRPLIETNGETGEIVWDKGRDFATVRKVLSMPQVNIVKKTEVQTGGFSKESILPKRNSDKLIARKKDWDPKKYGGFDSPTVAYSVLVVAKVEKGKSKKLKSVKELLGITIMERSSFEKNPIDFLEAKGYKEVKKDLIIKLPKYSLFELENGRKRMLASAGELQKGNELALPSKYVNFLYLASHYEKLKGSPEDNEQKQLFVEQHKHYLDEIIEQISEFSKRVILADANLDKVLSAYNKHRDKPIREQAENIIHLFTLTNLGAPAAFKYFDTTIDRKRYTSTKEVLDATLIHQSITGLYETRIDLSQLGGDGGGSSPAPEAAAKGGTLNLEDEYRLYETSAEPEVSPGSTWLSDFPQAWAETGGMGLAVRQAPLIIPLKATSTPVSIKQYPMSQEAKLGIKPHIQRLLDQGILVPCQSPWNTPLLPVKKPGTNDYRPVQDLREVNKRVEDIHPTVPNPYNLLSGLPPSHRWYTVLDLKDAFFCLRLHPTSQPLFAFEWRDPGMGISGQLTWTRLPQGFKNSPTLFNEALHRDLADFRIQHPDLILLQYVDDILLAATSELDCQQGTRALLLTLGNLGYRASAKKAQLCQKQVKYLGYLLKEGQRWLTEARKETVMGQPTPKTPRQLREFLGKAGFCRLFIPGFAEMAAPLYPLTKPGTLFNWGPDQQKAYQEIKQALLTAPALGLPDLTKPFELFVDEKQGYAKGVLTQKLGPWRRPVAYLSKKLDPVAAGWPPCLRMVAAIAVLRKDAGKLTMGQPLVILAPHAVEALVKQPPDRWLSNARMTHYQAMLLDTDRVQFGPVVALNPATLLPLPEEGAPHDCLEILAETHGTRPDLTDQPIPDADHTWYTDGSSFLQEGQRKAGAAVTTETEVIWARALPAGTSAQRAELIALTQALKMAEGKRLNVYTDSRYAFATAHIHGEIYRRRGWLTSEGREIKNKSEILALLKALFLPKRLSIIHCLGHQKGDSAEARGNRLADQAAREAAIKTPPDTSTLLAGKRTADGSEFEKRTADGSEFESPKKKAKVE

SEQ ID NO: 1891 - protein, 2093 aa, synthetic construct
MPAAKRVKLDGGDKKYSIGLDIGTNSVGWAVITDEYKVPSKKFKVLGNTDRHSIKKNLIGALLFDSGETAEATRLKRTARRRYTRRKNRICYLQEIFSNEMAKVDDSFFHRLEESFLVEEDKKHERHPIFGNIVDEVAYHEKYPTIYHLRKKLVDSTDKADLRLIYLALAHMIKFRGHFLIEGDLNPDNSDVDKLFIQLVQTYNQLFEENPINASGVDAKAILSARLSKSRRLENLIAQLPGEKKNGLFGNLIALSLGLTPNFKSNFDLAEDAKLQLSKDTYDDDLDNLLAQIGDQYADLFLAAKNLSDAILLSDILRVNTEITKAPLSASMIKRYDEHHQDLTLLKALVRQQLPEKYKEIFFDQSKNGYAGYIDGGASQEEFYKFIKPILEKMDGTEELLVKLNREDLLRKQRTFDNGSIPHQIHLGELHAILRRQEDFYPFLKDNREKIEKILTFRIPYYVGPLARGNSRFAWMTRKSEETITPWNFEEVVDKGASAQSFIERMTNFDKNLPNEKVLPKHSLLYEYFTVYNELTKVKYVTEGMRKPAFLSGEQKKAIVDLLFKTNRKVTVKQLKEDYFKKIECFDSVEISGVEDRFNASLGTYHDLLKIIKDKDFLDNEENEDILEDIVLTLTLFEDREMIEERLKTYAHLFDDKVMKQLKRRRYTGWGRLSRKLINGIRDKQSGKTILDFLKSDGFANRNFMQLIHDDSLTFKEDIQKAQVSGQGDSLHEHIANLAGSPAIKKGILQTVKVVDELVKVMGRHKPENIVIEMARENQTTQKGQKNSRERMKRIEEGIKELGSQILKEHPVENTQLQNEKLYLYYLQNGRDMYVDQELDINRLSDYDVDHIVPQSFLKDDSIDNKVLTRSDKARGKSDNVPSEEVVKKMKNYWRQLLNAKLITQRKFDNLTKAERGGLSELDKAGFIKRQLVETRQITKHVAQILDSRMNTKYDENDKLIREVKVITLKSKLVSDFRKDFQFYKVREINNYHHAHDAYLNAVVGTALIKKYPKLESEFVYGDYKVYDVRKMIAKSEQEIGKATAKYFFYSNIMNFFKTEITLANGEIRKRPLIETNGETGEIVWDKGRDFATVRKVLSMPQVNIVKKTEVQTGGFSKESILPKRNSDKLIARKKDWDPKKYGGFDSPTVAYSVLVVAKVEKGKSKKLKSVKELLGITIMERSSFEKNPIDFLEAKGYKEVKKDLIIKLPKYSLFELENGRKRMLASAGELQKGNELALPSKYVNFLYLASHYEKLKGSPEDNEQKQLFVEQHKHYLDEIIEQISEFSKRVILADANLDKVLSAYNKHRDKPIREQAENIIHLFTLTNLGAPAAFKYFDTTIDRKRYTSTKEVLDATLIHQSITGLYETRIDLSQLGGDGGGSSEAAAKGGTLNLEDEYRLYETSAEPEVSPGSTWLSDFPQAWAETGGMGLAVRQAPLIIPLKATSTPVSIKQYPMSQEAKLGIKPHIQRLLDQGILVPCQSPWNTPLLPVKKPGTNDYRPVQDLREVNKRVEDIHPTVPNPYNLLSGLPPSHRWYTVLDLKDAFFCLRLHPTSQPLFAFEWRDPGMGISGQLTWTRLPQGFKNSPTLFNEALHRDLADFRIQHPDLILLQYVDDILLAATSELDCQQGTRALLLTLGNLGYRASAKKAQLCQKQVKYLGYLLKEGQRWLTEARKETVMGQPTPKTPRQLREFLGKAGFCRLFIPGFAEMAAPLYPLTKPGTLFNWGPDQQKAYQEIKQALLTAPALGLPDLTKPFELFVDEKQGYAKGVLTQKLGPWRRPVAYLSKKLDPVAAGWPPCLRMVAAIAVLRKDAGKLTMGQPLVILAPHAVEALVKQPPDRWLSNARMTHYQAMLLDTDRVQFGPVVALNPATLLPLPEEGAPHDCLEILAETHGTRPDLTDQPIPDADHTWYTDGSSFLQEGQRKAGAAVTTETEVIWARALPAGTSAQRAELIALTQALKMAEGKRLNVYTDSRYAFATAHIHGEIYRRRGWLTSEGREIKNKSEILALLKALFLPKRLSIIHCLGHQKGDSAEARGNRLADQAAREAAIKTPPDTSTLLAGKRTADGSEFEKRTADGSEFESPKKKAKVE

SEQ ID NO: 1892 - protein, 2094 aa, synthetic construct
MPAAKRVKLDGGDKKYSIGLDIGTNSVGWAVITDEYKVPSKKFKVLGNTDRHSIKKNLIGALLFDSGETAEATRLKRTARRRYTRRKNRICYLQEIFSNEMAKVDDSFFHRLEESFLVEEDKKHERHPIFGNIVDEVAYHEKYPTIYHLRKKLVDSTDKADLRLIYLALAHMIKFRGHFLIEGDLNPDNSDVDKLFIQLVQTYNQLFEENPINASGVDAKAILSARLSKSRRLENLIAQLPGEKKNGLFGNLIALSLGLTPNFKSNFDLAEDAKLQLSKDTYDDDLDNLLAQIGDQYADLFLAAKNLSDAILLSDILRVNTEITKAPLSASMIKRYDEHHQDLTLLKALVRQQLPEKYKEIFFDQSKNGYAGYIDGGASQEEFYKFIKPILEKMDGTEELLVKLNREDLLRKQRTFDNGSIPHQIHLGELHAILRRQEDFYPFLKDNREKIEKILTFRIPYYVGPLARGNSRFAWMTRKSEETITPWNFEEVVDKGASAQSFIERMTNFDKNLPNEKVLPKHSLLYEYFTVYNELTKVKYVTEGMRKPAFLSGEQKKAIVDLLFKTNRKVTVKQLKEDYFKKIECFDSVEISGVEDRFNASLGTYHDLLKIIKDKDFLDNEENEDILEDIVLTLTLFEDREMIEERLKTYAHLFDDKVMKQLKRRRYTGWGRLSRKLINGIRDKQSGKTILDFLKSDGFANRNFMQLIHDDSLTFKEDIQKAQVSGQGDSLHEHIANLAGSPAIKKGILQTVKVVDELVKVMGRHKPENIVIEMARENQTTQKGQKNSRERMKRIEEGIKELGSQILKEHPVENTQLQNEKLYLYYLQNGRDMYVDQELDINRLSDYDVDHIVPQSFLKDDSIDNKVLTRSDKARGKSDNVPSEEVVKKMKNYWRQLLNAKLITQRKFDNLTKAERGGLSELDKAGFIKRQLVETRQITKHVAQILDSRMNTKYDENDKLIREVKVITLKSKLVSDFRKDFQFYKVREINNYHHAHDAYLNAVVGTALIKKYPKLESEFVYGDYKVYDVRKMIAKSEQEIGKATAKYFFYSNIMNFFKTEITLANGEIRKRPLIETNGETGEIVWDKGRDFATVRKVLSMPQVNIVKKTEVQTGGFSKESILPKRNSDKLIARKKDWDPKKYGGFDSPTVAYSVLVVAKVEKGKSKKLKSVKELLGITIMERSSFEKNPIDFLEAKGYKEVKKDLIIKLPKYSLFELENGRKRMLASAGELQKGNELALPSKYVNFLYLASHYEKLKGSPEDNEQKQLFVEQHKHYLDEIIEQISEFSKRVILADANLDKVLSAYNKHRDKPIREQAENIIHLFTLTNLGAPAAFKYFDTTIDRKRYTSTKEVLDATLIHQSITGLYETRIDLSQLGGDGGGGGPAPGGSGGTLNLEDEYRLYETSAEPEVSPGSTWLSDFPQAWAETGGMGLAVRQAPLIIPLKATSTPVSIKQYPMSQEAKLGIKPHIQRLLDQGILVPCQSPWNTPLLPVKKPGTNDYRPVQDLREVNKRVEDIHPTVPNPYNLLSGLPPSHRWYTVLDLKDAFFCLRLHPTSQPLFAFEWRDPGMGISGQLTWTRLPQGFKNSPTLFNEALHRDLADFRIQHPDLILLQYVDDILLAATSELDCQQGTRALLLTLGNLGYRASAKKAQLCQKQVKYLGYLLKEGQRWLTEARKETVMGQPTPKTPRQLREFLGKAGFCRLFIPGFAEMAAPLYPLTKPGTLFNWGPDQQKAYQEIKQALLTAPALGLPDLTKPFELFVDEKQGYAKGVLTQKLGPWRRPVAYLSKKLDPVAAGWPPCLRMVAAIAVLRKDAGKLTMGQPLVILAPHAVEALVKQPPDRWLSNARMTHYQAMLLDTDRVQFGPVVALNPATLLPLPEEGAPHDCLEILAETHGTRPDLTDQPIPDADHTWYTDGSSFLQEGQRKAGAAVTTETEVIWARALPAGTSAQRAELIALTQALKMAEGKRLNVYTDSRYAFATAHIHGEIYRRRGWLTSEGREIKNKSEILALLKALFLPKRLSIIHCLGHQKGDSAEARGNRLADQAAREAAIKTPPDTSTLLAGKRTADGSEFEKRTADGSEFESPKKKAKVE

SEQ ID NO: 1893 - protein, 2094 aa, synthetic construct
MPAAKRVKLDGGDKKYSIGLDIGTNSVGWAVITDEYKVPSKKFKVLGNTDRHSIKKNLIGALLFDSGETAEATRLKRTARRRYTRRKNRICYLQEIFSNEMAKVDDSFFHRLEESFLVEEDKKHERHPIFGNIVDEVAYHEKYPTIYHLRKKLVDSTDKADLRLIYLALAHMIKFRGHFLIEGDLNPDNSDVDKLFIQLVQTYNQLFEENPINASGVDAKAILSARLSKSRRLENLIAQLPGEKKNGLFGNLIALSLGLTPNFKSNFDLAEDAKLQLSKDTYDDDLDNLLAQIGDQYADLFLAAKNLSDAILLSDILRVNTEITKAPLSASMIKRYDEHHQDLTLLKALVRQQLPEKYKEIFFDQSKNGYAGYIDGGASQEEFYKFIKPILEKMDGTEELLVKLNREDLLRKQRTFDNGSIPHQIHLGELHAILRRQEDFYPFLKDNREKIEKILTFRIPYYVGPLARGNSRFAWMTRKSEETITPWNFEEVVDKGASAQSFIERMTNFDKNLPNEKVLPKHSLLYEYFTVYNELTKVKYVTEGMRKPAFLSGEQKKAIVDLLFKTNRKVTVKQLKEDYFKKIECFDSVEISGVEDRFNASLGTYHDLLKIIKDKDFLDNEENEDILEDIVLTLTLFEDREMIEERLKTYAHLFDDKVMKQLKRRRYTGWGRLSRKLINGIRDKQSGKTILDFLKSDGFANRNFMQLIHDDSLTFKEDIQKAQVSGQGDSLHEHIANLAGSPAIKKGILQTVKVVDELVKVMGRHKPENIVIEMARENQTTQKGQKNSRERMKRIEEGIKELGSQILKEHPVENTQLQNEKLYLYYLQNGRDMYVDQELDINRLSDYDVDHIVPQSFLKDDSIDNKVLTRSDKARGKSDNVPSEEVVKKMKNYWRQLLNAKLITQRKFDNLTKAERGGLSELDKAGFIKRQLVETRQITKHVAQILDSRMNTKYDENDKLIREVKVITLKSKLVSDFRKDFQFYKVREINNYHHAHDAYLNAVVGTALIKKYPKLESEFVYGDYKVYDVRKMIAKSEQEIGKATAKYFFYSNIMNFFKTEITLANGEIRKRPLIETNGETGEIVWDKGRDFATVRKVLSMPQVNIVKKTEVQTGGFSKESILPKRNSDKLIARKKDWDPKKYGGFDSPTVAYSVLVVAKVEKGKSKKLKSVKELLGITIMERSSFEKNPIDFLEAKGYKEVKKDLIIKLPKYSLFELENGRKRMLASAGELQKGNELALPSKYVNFLYLASHYEKLKGSPEDNEQKQLFVEQHKHYLDEIIEQISEFSKRVILADANLDKVLSAYNKHRDKPIREQAENIIHLFTLTNLGAPAAFKYFDTTIDRKRYTSTKEVLDATLIHQSITGLYETRIDLSQLGGDGGPAPGGGGSSGGTLNLEDEYRLYETSAEPEVSPGSTWLSDFPQAWAETGGMGLAVRQAPLIIPLKATSTPVSIKQYPMSQEAKLGIKPHIQRLLDQGILVPCQSPWNTPLLPVKKPGTNDYRPVQDLREVNKRVEDIHPTVPNPYNLLSGLPPSHRWYTVLDLKDAFFCLRLHPTSQPLFAFEWRDPGMGISGQLTWTRLPQGFKNSPTLFNEALHRDLADFRIQHPDLILLQYVDDILLAATSELDCQQGTRALLLTLGNLGYRASAKKAQLCQKQVKYLGYLLKEGQRWLTEARKETVMGQPTPKTPRQLREFLGKAGFCRLFIPGFAEMAAPLYPLTKPGTLFNWGPDQQKAYQEIKQALLTAPALGLPDLTKPFELFVDEKQGYAKGVLTQKLGPWRRPVAYLSKKLDPVAAGWPPCLRMVAAIAVLRKDAGKLTMGQPLVILAPHAVEALVKQPPDRWLSNARMTHYQAMLLDTDRVQFGPVVALNPATLLPLPEEGAPHDCLEILAETHGTRPDLTDQPIPDADHTWYTDGSSFLQEGQRKAGAAVTTETEVIWARALPAGTSAQRAELIALTQALKMAEGKRLNVYTDSRYAFATAHIHGEIYRRRGWLTSEGREIKNKSEILALLKALFLPKRLSIIHCLGHQKGDSAEARGNRLADQAAREAAIKTPPDTSTLLAGKRTADGSEFEKRTADGSEFESPKKKAKVE

SEQ ID NO: 1894 - protein, 2094 aa, synthetic construct
MPAAKRVKLDGGDKKYSIGLDIGTNSVGWAVITDEYKVPSKKFKVLGNTDRHSIKKNLIGALLFDSGETAEATRLKRTARRRYTRRKNRICYLQEIFSNEMAKVDDSFFHRLEESFLVEEDKKHERHPIFGNIVDEVAYHEKYPTIYHLRKKLVDSTDKADLRLIYLALAHMIKFRGHFLIEGDLNPDNSDVDKLFIQLVQTYNQLFEENPINASGVDAKAILSARLSKSRRLENLIAQLPGEKKNGLFGNLIALSLGLTPNFKSNFDLAEDAKLQLSKDTYDDDLDNLLAQIGDQYADLFLAAKNLSDAILLSDILRVNTEITKAPLSASMIKRYDEHHQDLTLLKALVRQQLPEKYKEIFFDQSKNGYAGYIDGGASQEEFYKFIKPILEKMDGTEELLVKLNREDLLRKQRTFDNGSIPHQIHLGELHAILRRQEDFYPFLKDNREKIEKILTFRIPYYVGPLARGNSRFAWMTRKSEETITPWNFEEVVDKGASAQSFIERMTNFDKNLPNEKVLPKHSLLYEYFTVYNELTKVKYVTEGMRKPAFLSGEQKKAIVDLLFKTNRKVTVKQLKEDYFKKIECFDSVEISGVEDRFNASLGTYHDLLKIIKDKDFLDNEENEDILEDIVLTLTLFEDREMIEERLKTYAHLFDDKVMKQLKRRRYTGWGRLSRKLINGIRDKQSGKTILDFLKSDGFANRNFMQLIHDDSLTFKEDIQKAQVSGQGDSLHEHIANLAGSPAIKKGILQTVKVVDELVKVMGRHKPENIVIEMARENQTTQKGQKNSRERMKRIEEGIKELGSQILKEHPVENTQLQNEKLYLYYLQNGRDMYVDQELDINRLSDYDVDHIVPQSFLKDDSIDNKVLTRSDKARGKSDNVPSEEVVKKMKNYWRQLLNAKLITQRKFDNLTKAERGGLSELDKAGFIKRQLVETRQITKHVAQILDSRMNTKYDENDKLIREVKVITLKSKLVSDFRKDFQFYKVREINNYHHAHDAYLNAVVGTALIKKYPKLESEFVYGDYKVYDVRKMIAKSEQEIGKATAKYFFYSNIMNFFKTEITLANGEIRKRPLIETNGETGEIVWDKGRDFATVRKVLSMPQVNIVKKTEVQTGGFSKESILPKRNSDKLIARKKDWDPKKYGGFDSPTVAYSVLVVAKVEKGKSKKLKSVKELLGITIMERSSFEKNPIDFLEAKGYKEVKKDLIIKLPKYSLFELENGRKRMLASAGELQKGNELALPSKYVNFLYLASHYEKLKGSPEDNEQKQLFVEQHKHYLDEIIEQISEFSKRVILADANLDKVLSAYNKHRDKPIREQAENIIHLFTLTNLGAPAAFKYFDTTIDRKRYTSTKEVLDATLIHQSITGLYETRIDLSQLGGDGGGGGGGSGSSGGTLNLEDEYRLYETSAEPEVSPGSTWLSDFPQAWAETGGMGLAVRQAPLIIPLKATSTPVSIKQYPMSQEAKLGIKPHIQRLLDQGILVPCQSPWNTPLLPVKKPGTNDYRPVQDLREVNKRVEDIHPTVPNPYNLLSGLPPSHRWYTVLDLKDAFFCLRLHPTSQPLFAFEWRDPGMGISGQLTWTRLPQGFKNSPTLFNEALHRDLADFRIQHPDLILLQYVDDILLAATSELDCQQGTRALLLTLGNLGYRASAKKAQLCQKQVKYLGYLLKEGQRWLTEARKETVMGQPTPKTPRQLREFLGKAGFCRLFIPGFAEMAAPLYPLTKPGTLFNWGPDQQKAYQEIKQALLTAPALGLPDLTKPFELFVDEKQGYAKGVLTQKLGPWRRPVAYLSKKLDPVAAGWPPCLRMVAAIAVLRKDAGKLTMGQPLVILAPHAVEALVKQPPDRWLSNARMTHYQAMLLDTDRVQFGPVVALNPATLLPLPEEGAPHDCLEILAETHGTRPDLTDQPIPDADHTWYTDGSSFLQEGQRKAGAAVTTETEVIWARALPAGTSAQRAELIALTQALKMAEGKRLNVYTDSRYAFATAHIHGEIYRRRGWLTSEGREIKNKSEILALLKALFLPKRLSIIHCLGHQKGDSAEARGNRLADQAAREAAIKTPPDTSTLLAGKRTADGSEFEKRTADGSEFESPKKKAKVE

SEQ ID NO: 1895 - protein, 2091 aa, synthetic construct
MPAAKRVKLDGGDKKYSIGLDIGTNSVGWAVITDEYKVPSKKFKVLGNTDRHSIKKNLIGALLFDSGETAEATRLKRTARRRYTRRKNRICYLQEIFSNEMAKVDDSFFHRLEESFLVEEDKKHERHPIFGNIVDEVAYHEKYPTIYHLRKKLVDSTDKADLRLIYLALAHMIKFRGHFLIEGDLNPDNSDVDKLFIQLVQTYNQLFEENPINASGVDAKAILSARLSKSRRLENLIAQLPGEKKNGLFGNLIALSLGLTPNFKSNFDLAEDAKLQLSKDTYDDDLDNLLAQIGDQYADLFLAAKNLSDAILLSDILRVNTEITKAPLSASMIKRYDEHHQDLTLLKALVRQQLPEKYKEIFFDQSKNGYAGYIDGGASQEEFYKFIKPILEKMDGTEELLVKLNREDLLRKQRTFDNGSIPHQIHLGELHAILRRQEDFYPFLKDNREKIEKILTFRIPYYVGPLARGNSRFAWMTRKSEETITPWNFEEVVDKGASAQSFIERMTNFDKNLPNEKVLPKHSLLYEYFTVYNELTKVKYVTEGMRKPAFLSGEQKKAIVDLLFKTNRKVTVKQLKEDYFKKIECFDSVEISGVEDRFNASLGTYHDLLKIIKDKDFLDNEENEDILEDIVLTLTLFEDREMIEERLKTYAHLFDDKVMKQLKRRRYTGWGRLSRKLINGIRDKQSGKTILDFLKSDGFANRNFMQLIHDDSLTFKEDIQKAQVSGQGDSLHEHIANLAGSPAIKKGILQTVKVVDELVKVMGRHKPENIVIEMARENQTTQKGQKNSRERMKRIEEGIKELGSQILKEHPVENTQLQNEKLYLYYLQNGRDMYVDQELDINRLSDYDVDHIVPQSFLKDDSIDNKVLTRSDKARGKSDNVPSEEVVKKMKNYWRQLLNAKLITQRKFDNLTKAERGGLSELDKAGFIKRQLVETRQITKHVAQILDSRMNTKYDENDKLIREVKVITLKSKLVSDFRKDFQFYKVREINNYHHAHDAYLNAVVGTALIKKYPKLESEFVYGDYKVYDVRKMIAKSEQEIGKATAKYFFYSNIMNFFKTEITLANGEIRKRPLIETNGETGEIVWDKGRDFATVRKVLSMPQVNIVKKTEVQTGGFSKESILPKRNSDKLIARKKDWDPKKYGGFDSPTVAYSVLVVAKVEKGKSKKLKSVKELLGITIMERSSFEKNPIDFLEAKGYKEVKKDLIIKLPKYSLFELENGRKRMLASAGELQKGNELALPSKYVNFLYLASHYEKLKGSPEDNEQKQLFVEQHKHYLDEIIEQISEFSKRVILADANLDKVLSAYNKHRDKPIREQAENIIHLFTLTNLGAPAAFKYFDTTIDRKRYTSTKEVLDATLIHQSITGLYETRIDLSQLGGDGGPAPGGGGGTLNLEDEYRLYETSAEPEVSPGSTWLSDFPQAWAETGGMGLAVRQAPLIIPLKATSTPVSIKQYPMSQEAKLGIKPHIQRLLDQGILVPCQSPWNTPLLPVKKPGTNDYRPVQDLREVNKRVEDIHPTVPNPYNLLSGLPPSHRWYTVLDLKDAFFCLRLHPTSQPLFAFEWRDPGMGISGQLTWTRLPQGFKNSPTLFNEALHRDLADFRIQHPDLILLQYVDDILLAATSELDCQQGTRALLLTLGNLGYRASAKKAQLCQKQVKYLGYLLKEGQRWLTEARKETVMGQPTPKTPRQLREFLGKAGFCRLFIPGFAEMAAPLYPLTKPGTLFNWGPDQQKAYQEIKQALLTAPALGLPDLTKPFELFVDEKQGYAKGVLTQKLGPWRRPVAYLSKKLDPVAAGWPPCLRMVAAIAVLRKDAGKLTMGQPLVILAPHAVEALVKQPPDRWLSNARMTHYQAMLLDTDRVQFGPVVALNPATLLPLPEEGAPHDCLEILAETHGTRPDLTDQPIPDADHTWYTDGSSFLQEGQRKAGAAVTTETEVIWARALPAGTSAQRAELIALTQALKMAEGKRLNVYTDSRYAFATAHIHGEIYRRRGWLTSEGREIKNKSEILALLKALFLPKRLSIIHCLGHQKGDSAEARGNRLADQAAREAAIKTPPDTSTLLAGKRTADGSEFEKRTADGSEFESPKKKAKVE

SEQ ID NO: 1896 - protein, 2115 aa, synthetic construct
MPAAKRVKLDGGDKKYSIGLDIGTNSVGWAVITDEYKVPSKKFKVLGNTDRHSIKKNLIGALLFDSGETAEATRLKRTARRRYTRRKNRICYLQEIFSNEMAKVDDSFFHRLEESFLVEEDKKHERHPIFGNIVDEVAYHEKYPTIYHLRKKLVDSTDKADLRLIYLALAHMIKFRGHFLIEGDLNPDNSDVDKLFIQLVQTYNQLFEENPINASGVDAKAILSARLSKSRRLENLIAQLPGEKKNGLFGNLIALSLGLTPNFKSNFDLAEDAKLQLSKDTYDDDLDNLLAQIGDQYADLFLAAKNLSDAILLSDILRVNTEITKAPLSASMIKRYDEHHQDLTLLKALVRQQLPEKYKEIFFDQSKNGYAGYIDGGASQEEFYKFIKPILEKMDGTEELLVKLNREDLLRKQRTFDNGSIPHQIHLGELHAILRRQEDFYPFLKDNREKIEKILTFRIPYYVGPLARGNSRFAWMTRKSEETITPWNFEEVVDKGASAQSFIERMTNFDKNLPNEKVLPKHSLLYEYFTVYNELTKVKYVTEGMRKPAFLSGEQKKAIVDLLFKTNRKVTVKQLKEDYFKKIECFDSVEISGVEDRFNASLGTYHDLLKIIKDKDFLDNEENEDILEDIVLTLTLFEDREMIEERLKTYAHLFDDKVMKQLKRRRYTGWGRLSRKLINGIRDKQSGKTILDFLKSDGFANRNFMQLIHDDSLTFKEDIQKAQVSGQGDSLHEHIANLAGSPAIKKGILQTVKVVDELVKVMGRHKPENIVIEMARENQTTQKGQKNSRERMKRIEEGIKELGSQILKEHPVENTQLQNEKLYLYYLQNGRDMYVDQELDINRLSDYDVDHIVPQSFLKDDSIDNKVLTRSDKARGKSDNVPSEEVVKKMKNYWRQLLNAKLITQRKFDNLTKAERGGLSELDKAGFIKRQLVETRQITKHVAQILDSRMNTKYDENDKLIREVKVITLKSKLVSDFRKDFQFYKVREINNYHHAHDAYLNAVVGTALIKKYPKLESEFVYGDYKVYDVRKMIAKSEQEIGKATAKYFFYSNIMNFFKTEITLANGEIRKRPLIETNGETGEIVWDKGRDFATVRKVLSMPQVNIVKKTEVQTGGFSKESILPKRNSDKLIARKKDWDPKKYGGFDSPTVAYSVLVVAKVEKGKSKKLKSVKELLGITIMERSSFEKNPIDFLEAKGYKEVKKDLIIKLPKYSLFELENGRKRMLASAGELQKGNELALPSKYVNFLYLASHYEKLKGSPEDNEQKQLFVEQHKHYLDEIIEQISEFSKRVILADANLDKVLSAYNKHRDKPIREQAENIIHLFTLTNLGAPAAFKYFDTTIDRKRYTSTKEVLDATLIHQSITGLYETRIDLSQLGGDGGEAAAKEAAAKEAAAKEAAAKEAAAKEAAAKGGTLNLEDEYRLYETSAEPEVSPGSTWLSDFPQAWAETGGMGLAVRQAPLIIPLKATSTPVSIKQYPMSQEAKLGIKPHIQRLLDQGILVPCQSPWNTPLLPVKKPGTNDYRPVQDLREVNKRVEDIHPTVPNPYNLLSGLPPSHRWYTVLDLKDAFFCLRLHPTSQPLFAFEWRDPGMGISGQLTWTRLPQGFKNSPTLFNEALHRDLADFRIQHPDLILLQYVDDILLAATSELDCQQGTRALLLTLGNLGYRASAKKAQLCQKQVKYLGYLLKEGQRWLTEARKETVMGQPTPKTPRQLREFLGKAGFCRLFIPGFAEMAAPLYPLTKPGTLFNWGPDQQKAYQEIKQALLTAPALGLPDLTKPFELFVDEKQGYAKGVLTQKLGPWRRPVAYLSKKLDPVAAGWPPCLRMVAAIAVLRKDAGKLTMGQPLVILAPHAVEALVKQPPDRWLSNARMTHYQAMLLDTDRVQFGPVVALNPATLLPLPEEGAPHDCLEILAETHGTRPDLTDQPIPDADHTWYTDGSSFLQEGQRKAGAAVTTETEVIWARALPAGTSAQRAELIALTQALKMAEGKRLNVYTDSRYAFATAHIHGEIYRRRGWLTSEGREIKNKSEILALLKALFLPKRLSIIHCLGHQKGDSAEARGNRLADQAAREAAIKTPPDTSTLLAGKRTADGSEFEKRTADGSEFESPKKKAKVE

SEQ ID NO: 1897 - protein, 2091 aa, synthetic construct
MPAAKRVKLDGGDKKYSIGLDIGTNSVGWAVITDEYKVPSKKFKVLGNTDRHSIKKNLIGALLFDSGETAEATRLKRTARRRYTRRKNRICYLQEIFSNEMAKVDDSFFHRLEESFLVEEDKKHERHPIFGNIVDEVAYHEKYPTIYHLRKKLVDSTDKADLRLIYLALAHMIKFRGHFLIEGDLNPDNSDVDKLFIQLVQTYNQLFEENPINASGVDAKAILSARLSKSRRLENLIAQLPGEKKNGLFGNLIALSLGLTPNFKSNFDLAEDAKLQLSKDTYDDDLDNLLAQIGDQYADLFLAAKNLSDAILLSDILRVNTEITKAPLSASMIKRYDEHHQDLTLLKALVRQQLPEKYKEIFFDQSKNGYAGYIDGGASQEEFYKFIKPILEKMDGTEELLVKLNREDLLRKQRTFDNGSIPHQIHLGELHAILRRQEDFYPFLKDNREKIEKILTFRIPYYVGPLARGNSRFAWMTRKSEETITPWNFEEVVDKGASAQSFIERMTNFDKNLPNEKVLPKHSLLYEYFTVYNELTKVKYVTEGMRKPAFLSGEQKKAIVDLLFKTNRKVTVKQLKEDYFKKIECFDSVEISGVEDRFNASLGTYHDLLKIIKDKDFLDNEENEDILEDIVLTLTLFEDREMIEERLKTYAHLFDDKVMKQLKRRRYTGWGRLSRKLINGIRDKQSGKTILDFLKSDGFANRNFMQLIHDDSLTFKEDIQKAQVSGQGDSLHEHIANLAGSPAIKKGILQTVKVVDELVKVMGRHKPENIVIEMARENQTTQKGQKNSRERMKRIEEGIKELGSQILKEHPVENTQLQNEKLYLYYLQNGRDMYVDQELDINRLSDYDVDHIVPQSFLKDDSIDNKVLTRSDKARGKSDNVPSEEVVKKMKNYWRQLLNAKLITQRKFDNLTKAERGGLSELDKAGFIKRQLVETRQITKHVAQILDSRMNTKYDENDKLIREVKVITLKSKLVSDFRKDFQFYKVREINNYHHAHDAYLNAVVGTALIKKYPKLESEFVYGDYKVYDVRKMIAKSEQEIGKATAKYFFYSNIMNFFKTEITLANGEIRKRPLIETNGETGEIVWDKGRDFATVRKVLSMPQVNIVKKTEVQTGGFSKESILPKRNSDKLIARKKDWDPKKYGGFDSPTVAYSVLVVAKVEKGKSKKLKSVKELLGITIMERSSFEKNPIDFLEAKGYKEVKKDLIIKLPKYSLFELENGRKRMLASAGELQKGNELALPSKYVNFLYLASHYEKLKGSPEDNEQKQLFVEQHKHYLDEIIEQISEFSKRVILADANLDKVLSAYNKHRDKPIREQAENIIHLFTLTNLGAPAAFKYFDTTIDRKRYTSTKEVLDATLIHQSITGLYETRIDLSQLGGDGGGGSGGSGGTLNLEDEYRLYETSAEPEVSPGSTWLSDFPQAWAETGGMGLAVRQAPLIIPLKATSTPVSIKQYPMSQEAKLGIKPHIQRLLDQGILVPCQSPWNTPLLPVKKPGTNDYRPVQDLREVNKRVEDIHPTVPNPYNLLSGLPPSHRWYTVLDLKDAFFCLRLHPTSQPLFAFEWRDPGMGISGQLTWTRLPQGFKNSPTLFNEALHRDLADFRIQHPDLILLQYVDDILLAATSELDCQQGTRALLLTLGNLGYRASAKKAQLCQKQVKYLGYLLKEGQRWLTEARKETVMGQPTPKTPRQLREFLGKAGFCRLFIPGFAEMAAPLYPLTKPGTLFNWGPDQQKAYQEIKQALLTAPALGLPDLTKPFELFVDEKQGYAKGVLTQKLGPWRRPVAYLSKKLDPVAAGWPPCLRMVAAIAVLRKDAGKLTMGQPLVILAPHAVEALVKQPPDRWLSNARMTHYQAMLLDTDRVQFGPVVALNPATLLPLPEEGAPHDCLEILAETHGTRPDLTDQPIPDADHTWYTDGSSFLQEGQRKAGAAVTTETEVIWARALPAGTSAQRAELIALTQALKMAEGKRLNVYTDSRYAFATAHIHGEIYRRRGWLTSEGREIKNKSEILALLKALFLPKRLSIIHCLGHQKGDSAEARGNRLADQAAREAAIKTPPDTSTLLAGKRTADGSEFEKRTADGSEFESPKKKAKVE

SEQ ID NO: 1898 - protein, 2093 aa, synthetic construct
MPAAKRVKLDGGDKKYSIGLDIGTNSVGWAVITDEYKVPSKKFKVLGNTDRHSIKKNLIGALLFDSGETAEATRLKRTARRRYTRRKNRICYLQEIFSNEMAKVDDSFFHRLEESFLVEEDKKHERHPIFGNIVDEVAYHEKYPTIYHLRKKLVDSTDKADLRLIYLALAHMIKFRGHFLIEGDLNPDNSDVDKLFIQLVQTYNQLFEENPINASGVDAKAILSARLSKSRRLENLIAQLPGEKKNGLFGNLIALSLGLTPNFKSNFDLAEDAKLQLSKDTYDDDLDNLLAQIGDQYADLFLAAKNLSDAILLSDILRVNTEITKAPLSASMIKRYDEHHQDLTLLKALVRQQLPEKYKEIFFDQSKNGYAGYIDGGASQEEFYKFIKPILEKMDGTEELLVKLNREDLLRKQRTFDNGSIPHQIHLGELHAILRRQEDFYPFLKDNREKIEKILTFRIPYYVGPLARGNSRFAWMTRKSEETITPWNFEEVVDKGASAQSFIERMTNFDKNLPNEKVLPKHSLLYEYFTVYNELTKVKYVTEGMRKPAFLSGEQKKAIVDLLFKTNRKVTVKQLKEDYFKKIECFDSVEISGVEDRFNASLGTYHDLLKIIKDKDFLDNEENEDILEDIVLTLTLFEDREMIEERLKTYAHLFDDKVMKQLKRRRYTGWGRLSRKLINGIRDKQSGKTILDFLKSDGFANRNFMQLIHDDSLTFKEDIQKAQVSGQGDSLHEHIANLAGSPAIKKGILQTVKVVDELVKVMGRHKPENIVIEMARENQTTQKGQKNSRERMKRIEEGIKELGSQILKEHPVENTQLQNEKLYLYYLQNGRDMYVDQELDINRLSDYDVDHIVPQSFLKDDSIDNKVLTRSDKARGKSDNVPSEEVVKKMKNYWRQLLNAKLITQRKFDNLTKAERGGLSELDKAGFIKRQLVETRQITKHVAQILDSRMNTKYDENDKLIREVKVITLKSKLVSDFRKDFQFYKVREINNYHHAHDAYLNAVVGTALIKKYPKLESEFVYGDYKVYDVRKMIAKSEQEIGKATAKYFFYSNIMNFFKTEITLANGEIRKRPLIETNGETGEIVWDKGRDFATVRKVLSMPQVNIVKKTEVQTGGFSKESILPKRNSDKLIARKKDWDPKKYGGFDSPTVAYSVLVVAKVEKGKSKKLKSVKELLGITIMERSSFEKNPIDFLEAKGYKEVKKDLIIKLPKYSLFELENGRKRMLASAGELQKGNELALPSKYVNFLYLASHYEKLKGSPEDNEQKQLFVEQHKHYLDEIIEQISEFSKRVILADANLDKVLSAYNKHRDKPIREQAENIIHLFTLTNLGAPAAFKYFDTTIDRKRYTSTKEVLDATLIHQSITGLYETRIDLSQLGGDGGEAAAKGSSGGTLNLEDEYRLYETSAEPEVSPGSTWLSDFPQAWAETGGMGLAVRQAPLIIPLKATSTPVSIKQYPMSQEAKLGIKPHIQRLLDQGILVPCQSPWNTPLLPVKKPGTNDYRPVQDLREVNKRVEDIHPTVPNPYNLLSGLPPSHRWYTVLDLKDAFFCLRLHPTSQPLFAFEWRDPGMGISGQLTWTRLPQGFKNSPTLFNEALHRDLADFRIQHPDLILLQYVDDILLAATSELDCQQGTRALLLTLGNLGYRASAKKAQLCQKQVKYLGYLLKEGQRWLTEARKETVMGQPTPKTPRQLREFLGKAGFCRLFIPGFAEMAAPLYPLTKPGTLFNWGPDQQKAYQEIKQALLTAPALGLPDLTKPFELFVDEKQGYAKGVLTQKLGPWRRPVAYLSKKLDPVAAGWPPCLRMVAAIAVLRKDAGKLTMGQPLVILAPHAVEALVKQPPDRWLSNARMTHYQAMLLDTDRVQFGPVVALNPATLLPLPEEGAPHDCLEILAETHGTRPDLTDQPIPDADHTWYTDGSSFLQEGQRKAGAAVTTETEVIWARALPAGTSAQRAELIALTQALKMAEGKRLNVYTDSRYAFATAHIHGEIYRRRGWLTSEGREIKNKSEILALLKALFLPKRLSIIHCLGHQKGDSAEARGNRLADQAAREAAIKTPPDTSTLLAGKRTADGSEFEKRTADGSEFESPKKKAKVE

SEQ ID NO: 1899 - protein, 2094 aa, synthetic construct
MPAAKRVKLDGGDKKYSIGLDIGTNSVGWAVITDEYKVPSKKFKVLGNTDRHSIKKNLIGALLFDSGETAEATRLKRTARRRYTRRKNRICYLQEIFSNEMAKVDDSFFHRLEESFLVEEDKKHERHPIFGNIVDEVAYHEKYPTIYHLRKKLVDSTDKADLRLIYLALAHMIKFRGHFLIEGDLNPDNSDVDKLFIQLVQTYNQLFEENPINASGVDAKAILSARLSKSRRLENLIAQLPGEKKNGLFGNLIALSLGLTPNFKSNFDLAEDAKLQLSKDTYDDDLDNLLAQIGDQYADLFLAAKNLSDAILLSDILRVNTEITKAPLSASMIKRYDEHHQDLTLLKALVRQQLPEKYKEIFFDQSKNGYAGYIDGGASQEEFYKFIKPILEKMDGTEELLVKLNREDLLRKQRTFDNGSIPHQIHLGELHAILRRQEDFYPFLKDNREKIEKILTFRIPYYVGPLARGNSRFAWMTRKSEETITPWNFEEVVDKGASAQSFIERMTNFDKNLPNEKVLPKHSLLYEYFTVYNELTKVKYVTEGMRKPAFLSGEQKKAIVDLLFKTNRKVTVKQLKEDYFKKIECFDSVEISGVEDRFNASLGTYHDLLKIIKDKDFLDNEENEDILEDIVLTLTLFEDREMIEERLKTYAHLFDDKVMKQLKRRRYTGWGRLSRKLINGIRDKQSGKTILDFLKSDGFANRNFMQLIHDDSLTFKEDIQKAQVSGQGDSLHEHIANLAGSPAIKKGILQTVKVVDELVKVMGRHKPENIVIEMARENQTTQKGQKNSRERMKRIEEGIKELGSQILKEHPVENTQLQNEKLYLYYLQNGRDMYVDQELDINRLSDYDVDHIVPQSFLKDDSIDNKVLTRSDKARGKSDNVPSEEVVKKMKNYWRQLLNAKLITQRKFDNLTKAERGGLSELDKAGFIKRQLVETRQITKHVAQILDSRMNTKYDENDKLIREVKVITLKSKLVSDFRKDFQFYKVREINNYHHAHDAYLNAVVGTALIKKYPKLESEFVYGDYKVYDVRKMIAKSEQEIGKATAKYFFYSNIMNFFKTEITLANGEIRKRPLIETNGETGEIVWDKGRDFATVRKVLSMPQVNIVKKTEVQTGGFSKESILPKRNSDKLIARKKDWDPKKYGGFDSPTVAYSVLVVAKVEKGKSKKLKSVKELLGITIMERSSFEKNPIDFLEAKGYKEVKKDLIIKLPKYSLFELENGRKRMLASAGELQKGNELALPSKYVNFLYLASHYEKLKGSPEDNEQKQLFVEQHKHYLDEIIEQISEFSKRVILADANLDKVLSAYNKHRDKPIREQAENIIHLFTLTNLGAPAAFKYFDTTIDRKRYTSTKEVLDATLIHQSITGLYETRIDLSQLGGDGGGGSPAPGGGGGTLNLEDEYRLYETSAEPEVSPGSTWLSDFPQAWAETGGMGLAVRQAPLIIPLKATSTPVSIKQYPMSQEAKLGIKPHIQRLLDQGILVPCQSPWNTPLLPVKKPGTNDYRPVQDLREVNKRVEDIHPTVPNPYNLLSGLPPSHRWYTVLDLKDAFFCLRLHPTSQPLFAFEWRDPGMGISGQLTWTRLPQGFKNSPTLFNEALHRDLADFRIQHPDLILLQYVDDILLAATSELDCQQGTRALLLTLGNLGYRASAKKAQLCQKQVKYLGYLLKEGQRWLTEARKETVMGQPTPKTPRQLREFLGKAGFCRLFIPGFAEMAAPLYPLTKPGTLFNWGPDQQKAYQEIKQALLTAPALGLPDLTKPFELFVDEKQGYAKGVLTQKLGPWRRPVAYLSKKLDPVAAGWPPCLRMVAAIAVLRKDAGKLTMGQPLVILAPHAVEALVKQPPDRWLSNARMTHYQAMLLDTDRVQFGPVVALNPATLLPLPEEGAPHDCLEILAETHGTRPDLTDQPIPDADHTWYTDGSSFLQEGQRKAGAAVTTETEVIWARALPAGTSAQRAELIALTQALKMAEGKRLNVYTDSRYAFATAHIHGEIYRRRGWLTSEGREIKNKSEILALLKALFLPKRLSIIHCLGHQKGDSAEARGNRLADQAAREAAIKTPPDTSTLLAGKRTADGSEFEKRTADGSEFESPKKKAKVE

SEQ ID NO: 1900 - protein, 2091 aa, synthetic construct
MPAAKRVKLDGGDKKYSIGLDIGTNSVGWAVITDEYKVPSKKFKVLGNTDRHSIKKNLIGALLFDSGETAEATRLKRTARRRYTRRKNRICYLQEIFSNEMAKVDDSFFHRLEESFLVEEDKKHERHPIFGNIVDEVAYHEKYPTIYHLRKKLVDSTDKADLRLIYLALAHMIKFRGHFLIEGDLNPDNSDVDKLFIQLVQTYNQLFEENPINASGVDAKAILSARLSKSRRLENLIAQLPGEKKNGLFGNLIALSLGLTPNFKSNFDLAEDAKLQLSKDTYDDDLDNLLAQIGDQYADLFLAAKNLSDAILLSDILRVNTEITKAPLSASMIKRYDEHHQDLTLLKALVRQQLPEKYKEIFFDQSKNGYAGYIDGGASQEEFYKFIKPILEKMDGTEELLVKLNREDLLRKQRTFDNGSIPHQIHLGELHAILRRQEDFYPFLKDNREKIEKILTFRIPYYVGPLARGNSRFAWMTRKSEETITPWNFEEVVDKGASAQSFIERMTNFDKNLPNEKVLPKHSLLYEYFTVYNELTKVKYVTEGMRKPAFLSGEQKKAIVDLLFKTNRKVTVKQLKEDYFKKIECFDSVEISGVEDRFNASLGTYHDLLKIIKDKDFLDNEENEDILEDIVLTLTLFEDREMIEERLKTYAHLFDDKVMKQLKRRRYTGWGRLSRKLINGIRDKQSGKTILDFLKSDGFANRNFMQLIHDDSLTFKEDIQKAQVSGQGDSLHEHIANLAGSPAIKKGILQTVKVVDELVKVMGRHKPENIVIEMARENQTTQKGQKNSRERMKRIEEGIKELGSQILKEHPVENTQLQNEKLYLYYLQNGRDMYVDQELDINRLSDYDVDHIVPQSFLKDDSIDNKVLTRSDKARGKSDNVPSEEVVKKMKNYWRQLLNAKLITQRKFDNLTKAERGGLSELDKAGFIKRQLVETRQITKHVAQILDSRMNTKYDENDKLIREVKVITLKSKLVSDFRKDFQFYKVREINNYHHAHDAYLNAVVGTALIKKYPKLESEFVYGDYKVYDVRKMIAKSEQEIGKATAKYFFYSNIMNFFKTEITLANGEIRKRPLIETNGETGEIVWDKGRDFATVRKVLSMPQVNIVKKTEVQTGGFSKESILPKRNSDKLIARKKDWDPKKYGGFDSPTVAYSVLVVAKVEKGKSKKLKSVKELLGITIMERSSFEKNPIDFLEAKGYKEVKKDLIIKLPKYSLFELENGRKRMLASAGELQKGNELALPSKYVNFLYLASHYEKLKGSPEDNEQKQLFVEQHKHYLDEIIEQISEFSKRVILADANLDKVLSAYNKHRDKPIREQAENIIHLFTLTNLGAPAAFKYFDTTIDRKRYTSTKEVLDATLIHQSITGLYETRIDLSQLGGDGGPAPGSSGGTLNLEDEYRLYETSAEPEVSPGSTWLSDFPQAWAETGGMGLAVRQAPLIIPLKATSTPVSIKQYPMSQEAKLGIKPHIQRLLDQGILVPCQSPWNTPLLPVKKPGTNDYRPVQDLREVNKRVEDIHPTVPNPYNLLSGLPPSHRWYTVLDLKDAFFCLRLHPTSQPLFAFEWRDPGMGISGQLTWTRLPQGFKNSPTLFNEALHRDLADFRIQHPDLILLQYVDDILLAATSELDCQQGTRALLLTLGNLGYRASAKKAQLCQKQVKYLGYLLKEGQRWLTEARKETVMGQPTPKTPRQLREFLGKAGFCRLFIPGFAEMAAPLYPLTKPGTLFNWGPDQQKAYQEIKQALLTAPALGLPDLTKPFELFVDEKQGYAKGVLTQKLGPWRRPVAYLSKKLDPVAAGWPPCLRMVAAIAVLRKDAGKLTMGQPLVILAPHAVEALVKQPPDRWLSNARMTHYQAMLLDTDRVQFGPVVALNPATLLPLPEEGAPHDCLEILAETHGTRPDLTDQPIPDADHTWYTDGSSFLQEGQRKAGAAVTTETEVIWARALPAGTSAQRAELIALTQALKMAEGKRLNVYTDSRYAFATAHIHGEIYRRRGWLTSEGREIKNKSEILALLKALFLPKRLSIIHCLGHQKGDSAEARGNRLADQAAREAAIKTPPDTSTLLAGKRTADGSEFEKRTADGSEFESPKKKAKVE

SEQ ID NO: 1901 - protein, 2096 aa, synthetic construct
MPAAKRVKLDGGDKKYSIGLDIGTNSVGWAVITDEYKVPSKKFKVLGNTDRHSIKKNLIGALLFDSGETAEATRLKRTARRRYTRRKNRICYLQEIFSNEMAKVDDSFFHRLEESFLVEEDKKHERHPIFGNIVDEVAYHEKYPTIYHLRKKLVDSTDKADLRLIYLALAHMIKFRGHFLIEGDLNPDNSDVDKLFIQLVQTYNQLFEENPINASGVDAKAILSARLSKSRRLENLIAQLPGEKKNGLFGNLIALSLGLTPNFKSNFDLAEDAKLQLSKDTYDDDLDNLLAQIGDQYADLFLAAKNLSDAILLSDILRVNTEITKAPLSASMIKRYDEHHQDLTLLKALVRQQLPEKYKEIFFDQSKNGYAGYIDGGASQEEFYKFIKPILEKMDGTEELLVKLNREDLLRKQRTFDNGSIPHQIHLGELHAILRRQEDFYPFLKDNREKIEKILTFRIPYYVGPLARGNSRFAWMTRKSEETITPWNFEEVVDKGASAQSFIERMTNFDKNLPNEKVLPKHSLLYEYFTVYNELTKVKYVTEGMRKPAFLSGEQKKAIVDLLFKTNRKVTVKQLKEDYFKKIECFDSVEISGVEDRFNASLGTYHDLLKIIKDKDFLDNEENEDILEDIVLTLTLFEDREMIEERLKTYAHLFDDKVMKQLKRRRYTGWGRLSRKLINGIRDKQSGKTILDFLKSDGFANRNFMQLIHDDSLTFKEDIQKAQVSGQGDSLHEHIANLAGSPAIKKGILQTVKVVDELVKVMGRHKPENIVIEMARENQTTQKGQKNSRERMKRIEEGIKELGSQILKEHPVENTQLQNEKLYLYYLQNGRDMYVDQELDINRLSDYDVDHIVPQSFLKDDSIDNKVLTRSDKARGKSDNVPSEEVVKKMKNYWRQLLNAKLITQRKFDNLTKAERGGLSELDKAGFIKRQLVETRQITKHVAQILDSRMNTKYDENDKLIREVKVITLKSKLVSDFRKDFQFYKVREINNYHHAHDAYLNAVVGTALIKKYPKLESEFVYGDYKVYDVRKMIAKSEQEIGKATAKYFFYSNIMNFFKTEITLANGEIRKRPLIETNGETGEIVWDKGRDFATVRKVLSMPQVNIVKKTEVQTGGFSKESILPKRNSDKLIARKKDWDPKKYGGFDSPTVAYSVLVVAKVEKGKSKKLKSVKELLGITIMERSSFEKNPIDFLEAKGYKEVKKDLIIKLPKYSLFELENGRKRMLASAGELQKGNELALPSKYVNFLYLASHYEKLKGSPEDNEQKQLFVEQHKHYLDEIIEQISEFSKRVILADANLDKVLSAYNKHRDKPIREQAENIIHLFTLTNLGAPAAFKYFDTTIDRKRYTSTKEVLDATLIHQSITGLYETRIDLSQLGGDGGGSSGGSEAAAKGGTLNLEDEYRLYETSAEPEVSPGSTWLSDFPQAWAETGGMGLAVRQAPLIIPLKATSTPVSIKQYPMSQEAKLGIKPHIQRLLDQGILVPCQSPWNTPLLPVKKPGTNDYRPVQDLREVNKRVEDIHPTVPNPYNLLSGLPPSHRWYTVLDLKDAFFCLRLHPTSQPLFAFEWRDPGMGISGQLTWTRLPQGFKNSPTLFNEALHRDLADFRIQHPDLILLQYVDDILLAATSELDCQQGTRALLLTLGNLGYRASAKKAQLCQKQVKYLGYLLKEGQRWLTEARKETVMGQPTPKTPRQLREFLGKAGFCRLFIPGFAEMAAPLYPLTKPGTLFNWGPDQQKAYQEIKQALLTAPALGLPDLTKPFELFVDEKQGYAKGVLTQKLGPWRRPVAYLSKKLDPVAAGWPPCLRMVAAIAVLRKDAGKLTMGQPLVILAPHAVEALVKQPPDRWLSNARMTHYQAMLLDTDRVQFGPVVALNPATLLPLPEEGAPHDCLEILAETHGTRPDLTDQPIPDADHTWYTDGSSFLQEGQRKAGAAVTTETEVIWARALPAGTSAQRAELIALTQALKMAEGKRLNVYTDSRYAFATAHIHGEIYRRRGWLTSEGREIKNKSEILALLKALFLPKRLSIIHCLGHQKGDSAEARGNRLADQAAREAAIKTPPDTSTLLAGKRTADGSEFEKRTADGSEFESPKKKAKVE

SEQ ID NO: 1902 - protein, 2094 aa, synthetic construct
MPAAKRVKLDGGDKKYSIGLDIGTNSVGWAVITDEYKVPSKKFKVLGNTDRHSIKKNLIGALLFDSGETAEATRLKRTARRRYTRRKNRICYLQEIFSNEMAKVDDSFFHRLEESFLVEEDKKHERHPIFGNIVDEVAYHEKYPTIYHLRKKLVDSTDKADLRLIYLALAHMIKFRGHFLIEGDLNPDNSDVDKLFIQLVQTYNQLFEENPINASGVDAKAILSARLSKSRRLENLIAQLPGEKKNGLFGNLIALSLGLTPNFKSNFDLAEDAKLQLSKDTYDDDLDNLLAQIGDQYADLFLAAKNLSDAILLSDILRVNTEITKAPLSASMIKRYDEHHQDLTLLKALVRQQLPEKYKEIFFDQSKNGYAGYIDGGASQEEFYKFIKPILEKMDGTEELLVKLNREDLLRKQRTFDNGSIPHQIHLGELHAILRRQEDFYPFLKDNREKIEKILTFRIPYYVGPLARGNSRFAWMTRKSEETITPWNFEEVVDKGASAQSFIERMTNFDKNLPNEKVLPKHSLLYEYFTVYNELTKVKYVTEGMRKPAFLSGEQKKAIVDLLFKTNRKVTVKQLKEDYFKKIECFDSVEISGVEDRFNASLGTYHDLLKIIKDKDFLDNEENEDILEDIVLTLTLFEDREMIEERLKTYAHLFDDKVMKQLKRRRYTGWGRLSRKLINGIRDKQSGKTILDFLKSDGFANRNFMQLIHDDSLTFKEDIQKAQVSGQGDSLHEHIANLAGSPAIKKGILQTVKVVDELVKVMGRHKPENIVIEMARENQTTQKGQKNSRERMKRIEEGIKELGSQILKEHPVENTQLQNEKLYLYYLQNGRDMYVDQELDINRLSDYDVDHIVPQSFLKDDSIDNKVLTRSDKARGKSDNVPSEEVVKKMKNYWRQLLNAKLITQRKFDNLTKAERGGLSELDKAGFIKRQLVETRQITKHVAQILDSRMNTKYDENDKLIREVKVITLKSKLVSDFRKDFQFYKVREINNYHHAHDAYLNAVVGTALIKKYPKLESEFVYGDYKVYDVRKMIAKSEQEIGKATAKYFFYSNIMNFFKTEITLANGEIRKRPLIETNGETGEIVWDKGRDFATVRKVLSMPQVNIVKKTEVQTGGFSKESILPKRNSDKLIARKKDWDPKKYGGFDSPTVAYSVLVVAKVEKGKSKKLKSVKELLGITIMERSSFEKNPIDFLEAKGYKEVKKDLIIKLPKYSLFELENGRKRMLASAGELQKGNELALPSKYVNFLYLASHYEKLKGSPEDNEQKQLFVEQHKHYLDEIIEQISEFSKRVILADANLDKVLSAYNKHRDKPIREQAENIIHLFTLTNLGAPAAFKYFDTTIDRKRYTSTKEVLDATLIHQSITGLYETRIDLSQLGGDGGPAPGGSGSSGGTLNLEDEYRLYETSAEPEVSPGSTWLSDFPQAWAETGGMGLAVRQAPLIIPLKATSTPVSIKQYPMSQEAKLGIKPHIQRLLDQGILVPCQSPWNTPLLPVKKPGTNDYRPVQDLREVNKRVEDIHPTVPNPYNLLSGLPPSHRWYTVLDLKDAFFCLRLHPTSQPLFAFEWRDPGMGISGQLTWTRLPQGFKNSPTLFNEALHRDLADFRIQHPDLILLQYVDDILLAATSELDCQQGTRALLLTLGNLGYRASAKKAQLCQKQVKYLGYLLKEGQRWLTEARKETVMGQPTPKTPRQLREFLGKAGFCRLFIPGFAEMAAPLYPLTKPGTLFNWGPDQQKAYQEIKQALLTAPALGLPDLTKPFELFVDEKQGYAKGVLTQKLGPWRRPVAYLSKKLDPVAAGWPPCLRMVAAIAVLRKDAGKLTMGQPLVILAPHAVEALVKQPPDRWLSNARMTHYQAMLLDTDRVQFGPVVALNPATLLPLPEEGAPHDCLEILAETHGTRPDLTDQPIPDADHTWYTDGSSFLQEGQRKAGAAVTTETEVIWARALPAGTSAQRAELIALTQALKMAEGKRLNVYTDSRYAFATAHIHGEIYRRRGWLTSEGREIKNKSEILALLKALFLPKRLSIIHCLGHQKGDSAEARGNRLADQAAREAAIKTPPDTSTLLAGKRTADGSEFEKRTADGSEFESPKKKAKVE

SEQ ID NO: 1903 - protein, 2094 aa, synthetic construct
MPAAKRVKLDGGDKKYSIGLDIGTNSVGWAVITDEYKVPSKKFKVLGNTDRHSIKKNLIGALLFDSGETAEATRLKRTARRRYTRRKNRICYLQEIFSNEMAKVDDSFFHRLEESFLVEEDKKHERHPIFGNIVDEVAYHEKYPTIYHLRKKLVDSTDKADLRLIYLALAHMIKFRGHFLIEGDLNPDNSDVDKLFIQLVQTYNQLFEENPINASGVDAKAILSARLSKSRRLENLIAQLPGEKKNGLFGNLIALSLGLTPNFKSNFDLAEDAKLQLSKDTYDDDLDNLLAQIGDQYADLFLAAKNLSDAILLSDILRVNTEITKAPLSASMIKRYDEHHQDLTLLKALVRQQLPEKYKEIFFDQSKNGYAGYIDGGASQEEFYKFIKPILEKMDGTEELLVKLNREDLLRKQRTFDNGSIPHQIHLGELHAILRRQEDFYPFLKDNREKIEKILTFRIPYYVGPLARGNSRFAWMTRKSEETITPWNFEEVVDKGASAQSFIERMTNFDKNLPNEKVLPKHSLLYEYFTVYNELTKVKYVTEGMRKPAFLSGEQKKAIVDLLFKTNRKVTVKQLKEDYFKKIECFDSVEISGVEDRFNASLGTYHDLLKIIKDKDFLDNEENEDILEDIVLTLTLFEDREMIEERLKTYAHLFDDKVMKQLKRRRYTGWGRLSRKLINGIRDKQSGKTILDFLKSDGFANRNFMQLIHDDSLTFKEDIQKAQVSGQGDSLHEHIANLAGSPAIKKGILQTVKVVDELVKVMGRHKPENIVIEMARENQTTQKGQKNSRERMKRIEEGIKELGSQILKEHPVENTQLQNEKLYLYYLQNGRDMYVDQELDINRLSDYDVDHIVPQSFLKDDSIDNKVLTRSDKARGKSDNVPSEEVVKKMKNYWRQLLNAKLITQRKFDNLTKAERGGLSELDKAGFIKRQLVETRQITKHVAQILDSRMNTKYDENDKLIREVKVITLKSKLVSDFRKDFQFYKVREINNYHHAHDAYLNAVVGTALIKKYPKLESEFVYGDYKVYDVRKMIAKSEQEIGKATAKYFFYSNIMNFFKTEITLANGEIRKRPLIETNGETGEIVWDKGRDFATVRKVLSMPQVNIVKKTEVQTGGFSKESILPKRNSDKLIARKKDWDPKKYGGFDSPTVAYSVLVVAKVEKGKSKKLKSVKELLGITIMERSSFEKNPIDFLEAKGYKEVKKDLIIKLPKYSLFELENGRKRMLASAGELQKGNELALPSKYVNFLYLASHYEKLKGSPEDNEQKQLFVEQHKHYLDEIIEQISEFSKRVILADANLDKVLSAYNKHRDKPIREQAENIIHLFTLTNLGAPAAFKYFDTTIDRKRYTSTKEVLDATLIHQSITGLYETRIDLSQLGGDGGGGSPAPGSSGGTLNLEDEYRLYETSAEPEVSPGSTWLSDFPQAWAETGGMGLAVRQAPLIIPLKATSTPVSIKQYPMSQEAKLGIKPHIQRLLDQGILVPCQSPWNTPLLPVKKPGTNDYRPVQDLREVNKRVEDIHPTVPNPYNLLSGLPPSHRWYTVLDLKDAFFCLRLHPTSQPLFAFEWRDPGMGISGQLTWTRLPQGFKNSPTLFNEALHRDLADFRIQHPDLILLQYVDDILLAATSELDCQQGTRALLLTLGNLGYRASAKKAQLCQKQVKYLGYLLKEGQRWLTEARKETVMGQPTPKTPRQLREFLGKAGFCRLFIPGFAEMAAPLYPLTKPGTLFNWGPDQQKAYQEIKQALLTAPALGLPDLTKPFELFVDEKQGYAKGVLTQKLGPWRRPVAYLSKKLDPVAAGWPPCLRMVAAIAVLRKDAGKLTMGQPLVILAPHAVEALVKQPPDRWLSNARMTHYQAMLLDTDRVQFGPVVALNPATLLPLPEEGAPHDCLEILAETHGTRPDLTDQPIPDADHTWYTDGSSFLQEGQRKAGAAVTTETEVIWARALPAGTSAQRAELIALTQALKMAEGKRLNVYTDSRYAFATAHIHGEIYRRRGWLTSEGREIKNKSEILALLKALFLPKRLSIIHCLGHQKGDSAEARGNRLADQAAREAAIKTPPDTSTLLAGKRTADGSEFEKRTADGSEFESPKKKAKVE

SEQ ID NO: 1904 - protein, 2091 aa, synthetic construct
MPAAKRVKLDGGDKKYSIGLDIGTNSVGWAVITDEYKVPSKKFKVLGNTDRHSIKKNLIGALLFDSGETAEATRLKRTARRRYTRRKNRICYLQEIFSNEMAKVDDSFFHRLEESFLVEEDKKHERHPIFGNIVDEVAYHEKYPTIYHLRKKLVDSTDKADLRLIYLALAHMIKFRGHFLIEGDLNPDNSDVDKLFIQLVQTYNQLFEENPINASGVDAKAILSARLSKSRRLENLIAQLPGEKKNGLFGNLIALSLGLTPNFKSNFDLAEDAKLQLSKDTYDDDLDNLLAQIGDQYADLFLAAKNLSDAILLSDILRVNTEITKAPLSASMIKRYDEHHQDLTLLKALVRQQLPEKYKEIFFDQSKNGYAGYIDGGASQEEFYKFIKPILEKMDGTEELLVKLNREDLLRKQRTFDNGSIPHQIHLGELHAILRRQEDFYPFLKDNREKIEKILTFRIPYYVGPLARGNSRFAWMTRKSEETITPWNFEEVVDKGASAQSFIERMTNFDKNLPNEKVLPKHSLLYEYFTVYNELTKVKYVTEGMRKPAFLSGEQKKAIVDLLFKTNRKVTVKQLKEDYFKKIECFDSVEISGVEDRFNASLGTYHDLLKIIKDKDFLDNEENEDILEDIVLTLTLFEDREMIEERLKTYAHLFDDKVMKQLKRRRYTGWGRLSRKLINGIRDKQSGKTILDFLKSDGFANRNFMQLIHDDSLTFKEDIQKAQVSGQGDSLHEHIANLAGSPAIKKGILQTVKVVDELVKVMGRHKPENIVIEMARENQTTQKGQKNSRERMKRIEEGIKELGSQILKEHPVENTQLQNEKLYLYYLQNGRDMYVDQELDINRLSDYDVDHIVPQSFLKDDSIDNKVLTRSDKARGKSDNVPSEEVVKKMKNYWRQLLNAKLITQRKFDNLTKAERGGLSELDKAGFIKRQLVETRQITKHVAQILDSRMNTKYDENDKLIREVKVITLKSKLVSDFRKDFQFYKVREINNYHHAHDAYLNAVVGTALIKKYPKLESEFVYGDYKVYDVRKMIAKSEQEIGKATAKYFFYSNIMNFFKTEITLANGEIRKRPLIETNGETGEIVWDKGRDFATVRKVLSMPQVNIVKKTEVQTGGFSKESILPKRNSDKLIARKKDWDPKKYGGFDSPTVAYSVLVVAKVEKGKSKKLKSVKELLGITIMERSSFEKNPIDFLEAKGYKEVKKDLIIKLPKYSLFELENGRKRMLASAGELQKGNELALPSKYVNFLYLASHYEKLKGSPEDNEQKQLFVEQHKHYLDEIIEQISEFSKRVILADANLDKVLSAYNKHRDKPIREQAENIIHLFTLTNLGAPAAFKYFDTTIDRKRYTSTKEVLDATLIHQSITGLYETRIDLSQLGGDGGGSSGGGGGTLNLEDEYRLYETSAEPEVSPGSTWLSDFPQAWAETGGMGLAVRQAPLIIPLKATSTPVSIKQYPMSQEAKLGIKPHIQRLLDQGILVPCQSPWNTPLLPVKKPGTNDYRPVQDLREVNKRVEDIHPTVPNPYNLLSGLPPSHRWYTVLDLKDAFFCLRLHPTSQPLFAFEWRDPGMGISGQLTWTRLPQGFKNSPTLFNEALHRDLADFRIQHPDLILLQYVDDILLAATSELDCQQGTRALLLTLGNLGYRASAKKAQLCQKQVKYLGYLLKEGQRWLTEARKETVMGQPTPKTPRQLREFLGKAGFCRLFIPGFAEMAAPLYPLTKPGTLFNWGPDQQKAYQEIKQALLTAPALGLPDLTKPFELFVDEKQGYAKGVLTQKLGPWRRPVAYLSKKLDPVAAGWPPCLRMVAAIAVLRKDAGKLTMGQPLVILAPHAVEALVKQPPDRWLSNARMTHYQAMLLDTDRVQFGPVVALNPATLLPLPEEGAPHDCLEILAETHGTRPDLTDQPIPDADHTWYTDGSSFLQEGQRKAGAAVTTETEVIWARALPAGTSAQRAELIALTQALKMAEGKRLNVYTDSRYAFATAHIHGEIYRRRGWLTSEGREIKNKSEILALLKALFLPKRLSIIHCLGHQKGDSAEARGNRLADQAAREAAIKTPPDTSTLLAGKRTADGSEFEKRTADGSEFESPKKKAKVE

SEQ ID NO: 1905 - protein, 2094 aa, synthetic construct
MPAAKRVKLDGGDKKYSIGLDIGTNSVGWAVITDEYKVPSKKFKVLGNTDRHSIKKNLIGALLFDSGETAEATRLKRTARRRYTRRKNRICYLQEIFSNEMAKVDDSFFHRLEESFLVEEDKKHERHPIFGNIVDEVAYHEKYPTIYHLRKKLVDSTDKADLRLIYLALAHMIKFRGHFLIEGDLNPDNSDVDKLFIQLVQTYNQLFEENPINASGVDAKAILSARLSKSRRLENLIAQLPGEKKNGLFGNLIALSLGLTPNFKSNFDLAEDAKLQLSKDTYDDDLDNLLAQIGDQYADLFLAAKNLSDAILLSDILRVNTEITKAPLSASMIKRYDEHHQDLTLLKALVRQQLPEKYKEIFFDQSKNGYAGYIDGGASQEEFYKFIKPILEKMDGTEELLVKLNREDLLRKQRTFDNGSIPHQIHLGELHAILRRQEDFYPFLKDNREKIEKILTFRIPYYVGPLARGNSRFAWMTRKSEETITPWNFEEVVDKGASAQSFIERMTNFDKNLPNEKVLPKHSLLYEYFTVYNELTKVKYVTEGMRKPAFLSGEQKKAIVDLLFKTNRKVTVKQLKEDYFKKIECFDSVEISGVEDRFNASLGTYHDLLKIIKDKDFLDNEENEDILEDIVLTLTLFEDREMIEERLKTYAHLFDDKVMKQLKRRRYTGWGRLSRKLINGIRDKQSGKTILDFLKSDGFANRNFMQLIHDDSLTFKEDIQKAQVSGQGDSLHEHIANLAGSPAIKKGILQTVKVVDELVKVMGRHKPENIVIEMARENQTTQKGQKNSRERMKRIEEGIKELGSQILKEHPVENTQLQNEKLYLYYLQNGRDMYVDQELDINRLSDYDVDHIVPQSFLKDDSIDNKVLTRSDKARGKSDNVPSEEVVKKMKNYWRQLLNAKLITQRKFDNLTKAERGGLSELDKAGFIKRQLVETRQITKHVAQILDSRMNTKYDENDKLIREVKVITLKSKLVSDFRKDFQFYKVREINNYHHAHDAYLNAVVGTALIKKYPKLESEFVYGDYKVYDVRKMIAKSEQEIGKATAKYFFYSNIMNFFKTEITLANGEIRKRPLIETNGETGEIVWDKGRDFATVRKVLSMPQVNIVKKTEVQTGGFSKESILPKRNSDKLIARKKDWDPKKYGGFDSPTVAYSVLVVAKVEKGKSKKLKSVKELLGITIMERSSFEKNPIDFLEAKGYKEVKKDLIIKLPKYSLFELENGRKRMLASAGELQKGNELALPSKYVNFLYLASHYEKLKGSPEDNEQKQLFVEQHKHYLDEIIEQISEFSKRVILADANLDKVLSAYNKHRDKPIREQAENIIHLFTLTNLGAPAAFKYFDTTIDRKRYTSTKEVLDATLIHQSITGLYETRIDLSQLGGDGGGGGGSSPAPGGTLNLEDEYRLYETSAEPEVSPGSTWLSDFPQAWAETGGMGLAVRQAPLIIPLKATSTPVSIKQYPMSQEAKLGIKPHIQRLLDQGILVPCQSPWNTPLLPVKKPGTNDYRPVQDLREVNKRVEDIHPTVPNPYNLLSGLPPSHRWYTVLDLKDAFFCLRLHPTSQPLFAFEWRDPGMGISGQLTWTRLPQGFKNSPTLFNEALHRDLADFRIQHPDLILLQYVDDILLAATSELDCQQGTRALLLTLGNLGYRASAKKAQLCQKQVKYLGYLLKEGQRWLTEARKETVMGQPTPKTPRQLREFLGKAGFCRLFIPGFAEMAAPLYPLTKPGTLFNWGPDQQKAYQEIKQALLTAPALGLPDLTKPFELFVDEKQGYAKGVLTQKLGPWRRPVAYLSKKLDPVAAGWPPCLRMVAAIAVLRKDAGKLTMGQPLVILAPHAVEALVKQPPDRWLSNARMTHYQAMLLDTDRVQFGPVVALNPATLLPLPEEGAPHDCLEILAETHGTRPDLTDQPIPDADHTWYTDGSSFLQEGQRKAGAAVTTETEVIWARALPAGTSAQRAELIALTQALKMAEGKRLNVYTDSRYAFATAHIHGEIYRRRGWLTSEGREIKNKSEILALLKALFLPKRLSIIHCLGHQKGDSAEARGNRLADQAAREAAIKTPPDTSTLLAGKRTADGSEFEKRTADGSEFESPKKKAKVE

SEQ ID NO: 1906 - protein, 2096 aa, synthetic construct
MPAAKRVKLDGGDKKYSIGLDIGTNSVGWAVITDEYKVPSKKFKVLGNTDRHSIKKNLIGALLFDSGETAEATRLKRTARRRYTRRKNRICYLQEIFSNEMAKVDDSFFHRLEESFLVEEDKKHERHPIFGNIVDEVAYHEKYPTIYHLRKKLVDSTDKADLRLIYLALAHMIKFRGHFLIEGDLNPDNSDVDKLFIQLVQTYNQLFEENPINASGVDAKAILSARLSKSRRLENLIAQLPGEKKNGLFGNLIALSLGLTPNFKSNFDLAEDAKLQLSKDTYDDDLDNLLAQIGDQYADLFLAAKNLSDAILLSDILRVNTEITKAPLSASMIKRYDEHHQDLTLLKALVRQQLPEKYKEIFFDQSKNGYAGYIDGGASQEEFYKFIKPILEKMDGTEELLVKLNREDLLRKQRTFDNGSIPHQIHLGELHAILRRQEDFYPFLKDNREKIEKILTFRIPYYVGPLARGNSRFAWMTRKSEETITPWNFEEVVDKGASAQSFIERMTNFDKNLPNEKVLPKHSLLYEYFTVYNELTKVKYVTEGMRKPAFLSGEQKKAIVDLLFKTNRKVTVKQLKEDYFKKIECFDSVEISGVEDRFNASLGTYHDLLKIIKDKDFLDNEENEDILEDIVLTLTLFEDREMIEERLKTYAHLFDDKVMKQLKRRRYTGWGRLSRKLINGIRDKQSGKTILDFLKSDGFANRNFMQLIHDDSLTFKEDIQKAQVSGQGDSLHEHIANLAGSPAIKKGILQTVKVVDELVKVMGRHKPENIVIEMARENQTTQKGQKNSRERMKRIEEGIKELGSQILKEHPVENTQLQNEKLYLYYLQNGRDMYVDQELDINRLSDYDVDHIVPQSFLKDDSIDNKVLTRSDKARGKSDNVPSEEVVKKMKNYWRQLLNAKLITQRKFDNLTKAERGGLSELDKAGFIKRQLVETRQITKHVAQILDSRMNTKYDENDKLIREVKVITLKSKLVSDFRKDFQFYKVREINNYHHAHDAYLNAVVGTALIKKYPKLESEFVYGDYKVYDVRKMIAKSEQEIGKATAKYFFYSNIMNFFKTEITLANGEIRKRPLIETNGETGEIVWDKGRDFATVRKVLSMPQVNIVKKTEVQTGGFSKESILPKRNSDKLIARKKDWDPKKYGGFDSPTVAYSVLVVAKVEKGKSKKLKSVKELLGITIMERSSFEKNPIDFLEAKGYKEVKKDLIIKLPKYSLFELENGRKRMLASAGELQKGNELALPSKYVNFLYLASHYEKLKGSPEDNEQKQLFVEQHKHYLDEIIEQISEFSKRVILADANLDKVLSAYNKHRDKPIREQAENIIHLFTLTNLGAPAAFKYFDTTIDRKRYTSTKEVLDATLIHQSITGLYETRIDLSQLGGDGGGGGGGSEAAAKGGTLNLEDEYRLYETSAEPEVSPGSTWLSDFPQAWAETGGMGLAVRQAPLIIPLKATSTPVSIKQYPMSQEAKLGIKPHIQRLLDQGILVPCQSPWNTPLLPVKKPGTNDYRPVQDLREVNKRVEDIHPTVPNPYNLLSGLPPSHRWYTVLDLKDAFFCLRLHPTSQPLFAFEWRDPGMGISGQLTWTRLPQGFKNSPTLFNEALHRDLADFRIQHPDLILLQYVDDILLAATSELDCQQGTRALLLTLGNLGYRASAKKAQLCQKQVKYLGYLLKEGQRWLTEARKETVMGQPTPKTPRQLREFLGKAGFCRLFIPGFAEMAAPLYPLTKPGTLFNWGPDQQKAYQEIKQALLTAPALGLPDLTKPFELFVDEKQGYAKGVLTQKLGPWRRPVAYLSKKLDPVAAGWPPCLRMVAAIAVLRKDAGKLTMGQPLVILAPHAVEALVKQPPDRWLSNARMTHYQAMLLDTDRVQFGPVVALNPATLLPLPEEGAPHDCLEILAETHGTRPDLTDQPIPDADHTWYTDGSSFLQEGQRKAGAAVTTETEVIWARALPAGTSAQRAELIALTQALKMAEGKRLNVYTDSRYAFATAHIHGEIYRRRGWLTSEGREIKNKSEILALLKALFLPKRLSIIHCLGHQKGDSAEARGNRLADQAAREAAIKTPPDTSTLLAGKRTADGSEFEKRTADGSEFESPKKKAKVE

SEQ ID NO: 1907 - protein, 2096 aa, synthetic construct
MPAAKRVKLDGGDKKYSIGLDIGTNSVGWAVITDEYKVPSKKFKVLGNTDRHSIKKNLIGALLFDSGETAEATRLKRTARRRYTRRKNRICYLQEIFSNEMAKVDDSFFHRLEESFLVEEDKKHERHPIFGNIVDEVAYHEKYPTIYHLRKKLVDSTDKADLRLIYLALAHMIKFRGHFLIEGDLNPDNSDVDKLFIQLVQTYNQLFEENPINASGVDAKAILSARLSKSRRLENLIAQLPGEKKNGLFGNLIALSLGLTPNFKSNFDLAEDAKLQLSKDTYDDDLDNLLAQIGDQYADLFLAAKNLSDAILLSDILRVNTEITKAPLSASMIKRYDEHHQDLTLLKALVRQQLPEKYKEIFFDQSKNGYAGYIDGGASQEEFYKFIKPILEKMDGTEELLVKLNREDLLRKQRTFDNGSIPHQIHLGELHAILRRQEDFYPFLKDNREKIEKILTFRIPYYVGPLARGNSRFAWMTRKSEETITPWNFEEVVDKGASAQSFIERMTNFDKNLPNEKVLPKHSLLYEYFTVYNELTKVKYVTEGMRKPAFLSGEQKKAIVDLLFKTNRKVTVKQLKEDYFKKIECFDSVEISGVEDRFNASLGTYHDLLKIIKDKDFLDNEENEDILEDIVLTLTLFEDREMIEERLKTYAHLFDDKVMKQLKRRRYTGWGRLSRKLINGIRDKQSGKTILDFLKSDGFANRNFMQLIHDDSLTFKEDIQKAQVSGQGDSLHEHIANLAGSPAIKKGILQTVKVVDELVKVMGRHKPENIVIEMARENQTTQKGQKNSRERMKRIEEGIKELGSQILKEHPVENTQLQNEKLYLYYLQNGRDMYVDQELDINRLSDYDVDHIVPQSFLKDDSIDNKVLTRSDKARGKSDNVPSEEVVKKMKNYWRQLLNAKLITQRKFDNLTKAERGGLSELDKAGFIKRQLVETRQITKHVAQILDSRMNTKYDENDKLIREVKVITLKSKLVSDFRKDFQFYKVREINNYHHAHDAYLNAVVGTALIKKYPKLESEFVYGDYKVYDVRKMIAKSEQEIGKATAKYFFYSNIMNFFKTEITLANGEIRKRPLIETNGETGEIVWDKGRDFATVRKVLSMPQVNIVKKTEVQTGGFSKESILPKRNSDKLIARKKDWDPKKYGGFDSPTVAYSVLVVAKVEKGKSKKLKSVKELLGITIMERSSFEKNPIDFLEAKGYKEVKKDLIIKLPKYSLFELENGRKRMLASAGELQKGNELALPSKYVNFLYLASHYEKLKGSPEDNEQKQLFVEQHKHYLDEIIEQISEFSKRVILADANLDKVLSAYNKHRDKPIREQAENIIHLFTLTNLGAPAAFKYFDTTIDRKRYTSTKEVLDATLIHQSITGLYETRIDLSQLGGDGGEAAAKGGSGGGGGTLNLEDEYRLYETSAEPEVSPGSTWLSDFPQAWAETGGMGLAVRQAPLIIPLKATSTPVSIKQYPMSQEAKLGIKPHIQRLLDQGILVPCQSPWNTPLLPVKKPGTNDYRPVQDLREVNKRVEDIHPTVPNPYNLLSGLPPSHRWYTVLDLKDAFFCLRLHPTSQPLFAFEWRDPGMGISGQLTWTRLPQGFKNSPTLFNEALHRDLADFRIQHPDLILLQYVDDILLAATSELDCQQGTRALLLTLGNLGYRASAKKAQLCQKQVKYLGYLLKEGQRWLTEARKETVMGQPTPKTPRQLREFLGKAGFCRLFIPGFAEMAAPLYPLTKPGTLFNWGPDQQKAYQEIKQALLTAPALGLPDLTKPFELFVDEKQGYAKGVLTQKLGPWRRPVAYLSKKLDPVAAGWPPCLRMVAAIAVLRKDAGKLTMGQPLVILAPHAVEALVKQPPDRWLSNARMTHYQAMLLDTDRVQFGPVVALNPATLLPLPEEGAPHDCLEILAETHGTRPDLTDQPIPDADHTWYTDGSSFLQEGQRKAGAAVTTETEVIWARALPAGTSAQRAELIALTQALKMAEGKRLNVYTDSRYAFATAHIHGEIYRRRGWLTSEGREIKNKSEILALLKALFLPKRLSIIHCLGHQKGDSAEARGNRLADQAAREAAIKTPPDTSTLLAGKRTADGSEFEKRTADGSEFESPKKKAKVE

SEQ ID NO: 1908 - protein, 2096 aa, synthetic construct
MPAAKRVKLDGGDKKYSIGLDIGTNSVGWAVITDEYKVPSKKFKVLGNTDRHSIKKNLIGALLFDSGETAEATRLKRTARRRYTRRKNRICYLQEIFSNEMAKVDDSFFHRLEESFLVEEDKKHERHPIFGNIVDEVAYHEKYPTIYHLRKKLVDSTDKADLRLIYLALAHMIKFRGHFLIEGDLNPDNSDVDKLFIQLVQTYNQLFEENPINASGVDAKAILSARLSKSRRLENLIAQLPGEKKNGLFGNLIALSLGLTPNFKSNFDLAEDAKLQLSKDTYDDDLDNLLAQIGDQYADLFLAAKNLSDAILLSDILRVNTEITKAPLSASMIKRYDEHHQDLTLLKALVRQQLPEKYKEIFFDQSKNGYAGYIDGGASQEEFYKFIKPILEKMDGTEELLVKLNREDLLRKQRTFDNGSIPHQIHLGELHAILRRQEDFYPFLKDNREKIEKILTFRIPYYVGPLARGNSRFAWMTRKSEETITPWNFEEVVDKGASAQSFIERMTNFDKNLPNEKVLPKHSLLYEYFTVYNELTKVKYVTEGMRKPAFLSGEQKKAIVDLLFKTNRKVTVKQLKEDYFKKIECFDSVEISGVEDRFNASLGTYHDLLKIIKDKDFLDNEENEDILEDIVLTLTLFEDREMIEERLKTYAHLFDDKVMKQLKRRRYTGWGRLSRKLINGIRDKQSGKTILDFLKSDGFANRNFMQLIHDDSLTFKEDIQKAQVSGQGDSLHEHIANLAGSPAIKKGILQTVKVVDELVKVMGRHKPENIVIEMARENQTTQKGQKNSRERMKRIEEGIKELGSQILKEHPVENTQLQNEKLYLYYLQNGRDMYVDQELDINRLSDYDVDHIVPQSFLKDDSIDNKVLTRSDKARGKSDNVPSEEVVKKMKNYWRQLLNAKLITQRKFDNLTKAERGGLSELDKAGFIKRQLVETRQITKHVAQILDSRMNTKYDENDKLIREVKVITLKSKLVSDFRKDFQFYKVREINNYHHAHDAYLNAVVGTALIKKYPKLESEFVYGDYKVYDVRKMIAKSEQEIGKATAKYFFYSNIMNFFKTEITLANGEIRKRPLIETNGETGEIVWDKGRDFATVRKVLSMPQVNIVKKTEVQTGGFSKESILPKRNSDKLIARKKDWDPKKYGGFDSPTVAYSVLVVAKVEKGKSKKLKSVKELLGITIMERSSFEKNPIDFLEAKGYKEVKKDLIIKLPKYSLFELENGRKRMLASAGELQKGNELALPSKYVNFLYLASHYEKLKGSPEDNEQKQLFVEQHKHYLDEIIEQISEFSKRVILADANLDKVLSAYNKHRDKPIREQAENIIHLFTLTNLGAPAAFKYFDTTIDRKRYTSTKEVLDATLIHQSITGLYETRIDLSQLGGDGGGGSPAPEAAAKGGTLNLEDEYRLYETSAEPEVSPGSTWLSDFPQAWAETGGMGLAVRQAPLIIPLKATSTPVSIKQYPMSQEAKLGIKPHIQRLLDQGILVPCQSPWNTPLLPVKKPGTNDYRPVQDLREVNKRVEDIHPTVPNPYNLLSGLPPSHRWYTVLDLKDAFFCLRLHPTSQPLFAFEWRDPGMGISGQLTWTRLPQGFKNSPTLFNEALHRDLADFRIQHPDLILLQYVDDILLAATSELDCQQGTRALLLTLGNLGYRASAKKAQLCQKQVKYLGYLLKEGQRWLTEARKETVMGQPTPKTPRQLREFLGKAGFCRLFIPGFAEMAAPLYPLTKPGTLFNWGPDQQKAYQEIKQALLTAPALGLPDLTKPFELFVDEKQGYAKGVLTQKLGPWRRPVAYLSKKLDPVAAGWPPCLRMVAAIAVLRKDAGKLTMGQPLVILAPHAVEALVKQPPDRWLSNARMTHYQAMLLDTDRVQFGPVVALNPATLLPLPEEGAPHDCLEILAETHGTRPDLTDQPIPDADHTWYTDGSSFLQEGQRKAGAAVTTETEVIWARALPAGTSAQRAELIALTQALKMAEGKRLNVYTDSRYAFATAHIHGEIYRRRGWLTSEGREIKNKSEILALLKALFLPKRLSIIHCLGHQKGDSAEARGNRLADQAAREAAIKTPPDTSTLLAGKRTADGSEFEKRTADGSEFESPKKKAKVE

SEQ ID NO: 1909 - protein, 2094 aa, synthetic construct
MPAAKRVKLDGGDKKYSIGLDIGTNSVGWAVITDEYKVPSKKFKVLGNTDRHSIKKNLIGALLFDSGETAEATRLKRTARRRYTRRKNRICYLQEIFSNEMAKVDDSFFHRLEESFLVEEDKKHERHPIFGNIVDEVAYHEKYPTIYHLRKKLVDSTDKADLRLIYLALAHMIKFRGHFLIEGDLNPDNSDVDKLFIQLVQTYNQLFEENPINASGVDAKAILSARLSKSRRLENLIAQLPGEKKNGLFGNLIALSLGLTPNFKSNFDLAEDAKLQLSKDTYDDDLDNLLAQIGDQYADLFLAAKNLSDAILLSDILRVNTEITKAPLSASMIKRYDEHHQDLTLLKALVRQQLPEKYKEIFFDQSKNGYAGYIDGGASQEEFYKFIKPILEKMDGTEELLVKLNREDLLRKQRTFDNGSIPHQIHLGELHAILRRQEDFYPFLKDNREKIEKILTFRIPYYVGPLARGNSRFAWMTRKSEETITPWNFEEVVDKGASAQSFIERMTNFDKNLPNEKVLPKHSLLYEYFTVYNELTKVKYVTEGMRKPAFLSGEQKKAIVDLLFKTNRKVTVKQLKEDYFKKIECFDSVEISGVEDRFNASLGTYHDLLKIIKDKDFLDNEENEDILEDIVLTLTLFEDREMIEERLKTYAHLFDDKVMKQLKRRRYTGWGRLSRKLINGIRDKQSGKTILDFLKSDGFANRNFMQLIHDDSLTFKEDIQKAQVSGQGDSLHEHIANLAGSPAIKKGILQTVKVVDELVKVMGRHKPENIVIEMARENQTTQKGQKNSRERMKRIEEGIKELGSQILKEHPVENTQLQNEKLYLYYLQNGRDMYVDQELDINRLSDYDVDHIVPQSFLKDDSIDNKVLTRSDKARGKSDNVPSEEVVKKMKNYWRQLLNAKLITQRKFDNLTKAERGGLSELDKAGFIKRQLVETRQITKHVAQILDSRMNTKYDENDKLIREVKVITLKSKLVSDFRKDFQFYKVREINNYHHAHDAYLNAVVGTALIKKYPKLESEFVYGDYKVYDVRKMIAKSEQEIGKATAKYFFYSNIMNFFKTEITLANGEIRKRPLIETNGETGEIVWDKGRDFATVRKVLSMPQVNIVKKTEVQTGGFSKESILPKRNSDKLIARKKDWDPKKYGGFDSPTVAYSVLVVAKVEKGKSKKLKSVKELLGITIMERSSFEKNPIDFLEAKGYKEVKKDLIIKLPKYSLFELENGRKRMLASAGELQKGNELALPSKYVNFLYLASHYEKLKGSPEDNEQKQLFVEQHKHYLDEIIEQISEFSKRVILADANLDKVLSAYNKHRDKPIREQAENIIHLFTLTNLGAPAAFKYFDTTIDRKRYTSTKEVLDATLIHQSITGLYETRIDLSQLGGDGGGSSGGGGGSGGTLNLEDEYRLYETSAEPEVSPGSTWLSDFPQAWAETGGMGLAVRQAPLIIPLKATSTPVSIKQYPMSQEAKLGIKPHIQRLLDQGILVPCQSPWNTPLLPVKKPGTNDYRPVQDLREVNKRVEDIHPTVPNPYNLLSGLPPSHRWYTVLDLKDAFFCLRLHPTSQPLFAFEWRDPGMGISGQLTWTRLPQGFKNSPTLFNEALHRDLADFRIQHPDLILLQYVDDILLAATSELDCQQGTRALLLTLGNLGYRASAKKAQLCQKQVKYLGYLLKEGQRWLTEARKETVMGQPTPKTPRQLREFLGKAGFCRLFIPGFAEMAAPLYPLTKPGTLFNWGPDQQKAYQEIKQALLTAPALGLPDLTKPFELFVDEKQGYAKGVLTQKLGPWRRPVAYLSKKLDPVAAGWPPCLRMVAAIAVLRKDAGKLTMGQPLVILAPHAVEALVKQPPDRWLSNARMTHYQAMLLDTDRVQFGPVVALNPATLLPLPEEGAPHDCLEILAETHGTRPDLTDQPIPDADHTWYTDGSSFLQEGQRKAGAAVTTETEVIWARALPAGTSAQRAELIALTQALKMAEGKRLNVYTDSRYAFATAHIHGEIYRRRGWLTSEGREIKNKSEILALLKALFLPKRLSIIHCLGHQKGDSAEARGNRLADQAAREAAIKTPPDTSTLLAGKRTADGSEFEKRTADGSEFESPKKKAKVE

SEQ ID NO: 1910 - protein, 2096 aa, synthetic construct
MPAAKRVKLDGGDKKYSIGLDIGTNSVGWAVITDEYKVPSKKFKVLGNTDRHSIKKNLIGALLFDSGETAEATRLKRTARRRYTRRKNRICYLQEIFSNEMAKVDDSFFHRLEESFLVEEDKKHERHPIFGNIVDEVAYHEKYPTIYHLRKKLVDSTDKADLRLIYLALAHMIKFRGHFLIEGDLNPDNSDVDKLFIQLVQTYNQLFEENPINASGVDAKAILSARLSKSRRLENLIAQLPGEKKNGLFGNLIALSLGLTPNFKSNFDLAEDAKLQLSKDTYDDDLDNLLAQIGDQYADLFLAAKNLSDAILLSDILRVNTEITKAPLSASMIKRYDEHHQDLTLLKALVRQQLPEKYKEIFFDQSKNGYAGYIDGGASQEEFYKFIKPILEKMDGTEELLVKLNREDLLRKQRTFDNGSIPHQIHLGELHAILRRQEDFYPFLKDNREKIEKILTFRIPYYVGPLARGNSRFAWMTRKSEETITPWNFEEVVDKGASAQSFIERMTNFDKNLPNEKVLPKHSLLYEYFTVYNELTKVKYVTEGMRKPAFLSGEQKKAIVDLLFKTNRKVTVKQLKEDYFKKIECFDSVEISGVEDRFNASLGTYHDLLKIIKDKDFLDNEENEDILEDIVLTLTLFEDREMIEERLKTYAHLFDDKVMKQLKRRRYTGWGRLSRKLINGIRDKQSGKTILDFLKSDGFANRNFMQLIHDDSLTFKEDIQKAQVSGQGDSLHEHIANLAGSPAIKKGILQTVKVVDELVKVMGRHKPENIVIEMARENQTTQKGQKNSRERMKRIEEGIKELGSQILKEHPVENTQLQNEKLYLYYLQNGRDMYVDQELDINRLSDYDVDHIVPQSFLKDDSIDNKVLTRSDKARGKSDNVPSEEVVKKMKNYWRQLLNAKLITQRKFDNLTKAERGGLSELDKAGFIKRQLVETRQITKHVAQILDSRMNTKYDENDKLIREVKVITLKSKLVSDFRKDFQFYKVREINNYHHAHDAYLNAVVGTALIKKYPKLESEFVYGDYKVYDVRKMIAKSEQEIGKATAKYFFYSNIMNFFKTEITLANGEIRKRPLIETNGETGEIVWDKGRDFATVRKVLSMPQVNIVKKTEVQTGGFSKESILPKRNSDKLIARKKDWDPKKYGGFDSPTVAYSVLVVAKVEKGKSKKLKSVKELLGITIMERSSFEKNPIDFLEAKGYKEVKKDLIIKLPKYSLFELENGRKRMLASAGELQKGNELALPSKYVNFLYLASHYEKLKGSPEDNEQKQLFVEQHKHYLDEIIEQISEFSKRVILADANLDKVLSAYNKHRDKPIREQAENIIHLFTLTNLGAPAAFKYFDTTIDRKRYTSTKEVLDATLIHQSITGLYETRIDLSQLGGDGGGSSEAAAKGGSGGTLNLEDEYRLYETSAEPEVSPGSTWLSDFPQAWAETGGMGLAVRQAPLIIPLKATSTPVSIKQYPMSQEAKLGIKPHIQRLLDQGILVPCQSPWNTPLLPVKKPGTNDYRPVQDLREVNKRVEDIHPTVPNPYNLLSGLPPSHRWYTVLDLKDAFFCLRLHPTSQPLFAFEWRDPGMGISGQLTWTRLPQGFKNSPTLFNEALHRDLADFRIQHPDLILLQYVDDILLAATSELDCQQGTRALLLTLGNLGYRASAKKAQLCQKQVKYLGYLLKEGQRWLTEARKETVMGQPTPKTPRQLREFLGKAGFCRLFIPGFAEMAAPLYPLTKPGTLFNWGPDQQKAYQEIKQALLTAPALGLPDLTKPFELFVDEKQGYAKGVLTQKLGPWRRPVAYLSKKLDPVAAGWPPCLRMVAAIAVLRKDAGKLTMGQPLVILAPHAVEALVKQPPDRWLSNARMTHYQAMLLDTDRVQFGPVVALNPATLLPLPEEGAPHDCLEILAETHGTRPDLTDQPIPDADHTWYTDGSSFLQEGQRKAGAAVTTETEVIWARALPAGTSAQRAELIALTQALKMAEGKRLNVYTDSRYAFATAHIHGEIYRRRGWLTSEGREIKNKSEILALLKALFLPKRLSIIHCLGHQKGDSAEARGNRLADQAAREAAIKTPPDTSTLLAGKRTADGSEFEKRTADGSEFESPKKKAKVE

SEQ ID NO: 1911 - protein, 2091 aa, synthetic construct
MPAAKRVKLDGGDKKYSIGLDIGTNSVGWAVITDEYKVPSKKFKVLGNTDRHSIKKNLIGALLFDSGETAEATRLKRTARRRYTRRKNRICYLQEIFSNEMAKVDDSFFHRLEESFLVEEDKKHERHPIFGNIVDEVAYHEKYPTIYHLRKKLVDSTDKADLRLIYLALAHMIKFRGHFLIEGDLNPDNSDVDKLFIQLVQTYNQLFEENPINASGVDAKAILSARLSKSRRLENLIAQLPGEKKNGLFGNLIALSLGLTPNFKSNFDLAEDAKLQLSKDTYDDDLDNLLAQIGDQYADLFLAAKNLSDAILLSDILRVNTEITKAPLSASMIKRYDEHHQDLTLLKALVRQQLPEKYKEIFFDQSKNGYAGYIDGGASQEEFYKFIKPILEKMDGTEELLVKLNREDLLRKQRTFDNGSIPHQIHLGELHAILRRQEDFYPFLKDNREKIEKILTFRIPYYVGPLARGNSRFAWMTRKSEETITPWNFEEVVDKGASAQSFIERMTNFDKNLPNEKVLPKHSLLYEYFTVYNELTKVKYVTEGMRKPAFLSGEQKKAIVDLLFKTNRKVTVKQLKEDYFKKIECFDSVEISGVEDRFNASLGTYHDLLKIIKDKDFLDNEENEDILEDIVLTLTLFEDREMIEERLKTYAHLFDDKVMKQLKRRRYTGWGRLSRKLINGIRDKQSGKTILDFLKSDGFANRNFMQLIHDDSLTFKEDIQKAQVSGQGDSLHEHIANLAGSPAIKKGILQTVKVVDELVKVMGRHKPENIVIEMARENQTTQKGQKNSRERMKRIEEGIKELGSQILKEHPVENTQLQNEKLYLYYLQNGRDMYVDQELDINRLSDYDVDHIVPQSFLKDDSIDNKVLTRSDKARGKSDNVPSEEVVKKMKNYWRQLLNAKLITQRKFDNLTKAERGGLSELDKAGFIKRQLVETRQITKHVAQILDSRMNTKYDENDKLIREVKVITLKSKLVSDFRKDFQFYKVREINNYHHAHDAYLNAVVGTALIKKYPKLESEFVYGDYKVYDVRKMIAKSEQEIGKATAKYFFYSNIMNFFKTEITLANGEIRKRPLIETNGETGEIVWDKGRDFATVRKVLSMPQVNIVKKTEVQTGGFSKESILPKRNSDKLIARKKDWDPKKYGGFDSPTVAYSVLVVAKVEKGKSKKLKSVKELLGITIMERSSFEKNPIDFLEAKGYKEVKKDLIIKLPKYSLFELENGRKRMLASAGELQKGNELALPSKYVNFLYLASHYEKLKGSPEDNEQKQLFVEQHKHYLDEIIEQISEFSKRVILADANLDKVLSAYNKHRDKPIREQAENIIHLFTLTNLGAPAAFKYFDTTIDRKRYTSTKEVLDATLIHQSITGLYETRIDLSQLGGDGGGGSGSSGGTLNLEDEYRLYETSAEPEVSPGSTWLSDFPQAWAETGGMGLAVRQAPLIIPLKATSTPVSIKQYPMSQEAKLGIKPHIQRLLDQGILVPCQSPWNTPLLPVKKPGTNDYRPVQDLREVNKRVEDIHPTVPNPYNLLSGLPPSHRWYTVLDLKDAFFCLRLHPTSQPLFAFEWRDPGMGISGQLTWTRLPQGFKNSPTLFNEALHRDLADFRIQHPDLILLQYVDDILLAATSELDCQQGTRALLLTLGNLGYRASAKKAQLCQKQVKYLGYLLKEGQRWLTEARKETVMGQPTPKTPRQLREFLGKAGFCRLFIPGFAEMAAPLYPLTKPGTLFNWGPDQQKAYQEIKQALLTAPALGLPDLTKPFELFVDEKQGYAKGVLTQKLGPWRRPVAYLSKKLDPVAAGWPPCLRMVAAIAVLRKDAGKLTMGQPLVILAPHAVEALVKQPPDRWLSNARMTHYQAMLLDTDRVQFGPVVALNPATLLPLPEEGAPHDCLEILAETHGTRPDLTDQPIPDADHTWYTDGSSFLQEGQRKAGAAVTTETEVIWARALPAGTSAQRAELIALTQALKMAEGKRLNVYTDSRYAFATAHIHGEIYRRRGWLTSEGREIKNKSEILALLKALFLPKRLSIIHCLGHQKGDSAEARGNRLADQAAREAAIKTPPDTSTLLAGKRTADGSEFEKRTADGSEFESPKKKAKVE

SEQ ID NO: 1912 - protein, 2096 aa, synthetic construct
MPAAKRVKLDGGDKKYSIGLDIGTNSVGWAVITDEYKVPSKKFKVLGNTDRHSIKKNLIGALLFDSGETAEATRLKRTARRRYTRRKNRICYLQEIFSNEMAKVDDSFFHRLEESFLVEEDKKHERHPIFGNIVDEVAYHEKYPTIYHLRKKLVDSTDKADLRLIYLALAHMIKFRGHFLIEGDLNPDNSDVDKLFIQLVQTYNQLFEENPINASGVDAKAILSARLSKSRRLENLIAQLPGEKKNGLFGNLIALSLGLTPNFKSNFDLAEDAKLQLSKDTYDDDLDNLLAQIGDQYADLFLAAKNLSDAILLSDILRVNTEITKAPLSASMIKRYDEHHQDLTLLKALVRQQLPEKYKEIFFDQSKNGYAGYIDGGASQEEFYKFIKPILEKMDGTEELLVKLNREDLLRKQRTFDNGSIPHQIHLGELHAILRRQEDFYPFLKDNREKIEKILTFRIPYYVGPLARGNSRFAWMTRKSEETITPWNFEEVVDKGASAQSFIERMTNFDKNLPNEKVLPKHSLLYEYFTVYNELTKVKYVTEGMRKPAFLSGEQKKAIVDLLFKTNRKVTVKQLKEDYFKKIECFDSVEISGVEDRFNASLGTYHDLLKIIKDKDFLDNEENEDILEDIVLTLTLFEDREMIEERLKTYAHLFDDKVMKQLKRRRYTGWGRLSRKLINGIRDKQSGKTILDFLKSDGFANRNFMQLIHDDSLTFKEDIQKAQVSGQGDSLHEHIANLAGSPAIKKGILQTVKVVDELVKVMGRHKPENIVIEMARENQTTQKGQKNSRERMKRIEEGIKELGSQILKEHPVENTQLQNEKLYLYYLQNGRDMYVDQELDINRLSDYDVDHIVPQSFLKDDSIDNKVLTRSDKARGKSDNVPSEEVVKKMKNYWRQLLNAKLITQRKFDNLTKAERGGLSELDKAGFIKRQLVETRQITKHVAQILDSRMNTKYDENDKLIREVKVITLKSKLVSDFRKDFQFYKVREINNYHHAHDAYLNAVVGTALIKKYPKLESEFVYGDYKVYDVRKMIAKSEQEIGKATAKYFFYSNIMNFFKTEITLANGEIRKRPLIETNGETGEIVWDKGRDFATVRKVLSMPQVNIVKKTEVQTGGFSKESILPKRNSDKLIARKKDWDPKKYGGFDSPTVAYSVLVVAKVEKGKSKKLKSVKELLGITIMERSSFEKNPIDFLEAKGYKEVKKDLIIKLPKYSLFELENGRKRMLASAGELQKGNELALPSKYVNFLYLASHYEKLKGSPEDNEQKQLFVEQHKHYLDEIIEQISEFSKRVILADANLDKVLSAYNKHRDKPIREQAENIIHLFTLTNLGAPAAFKYFDTTIDRKRYTSTKEVLDATLIHQSITGLYETRIDLSQLGGDGGPAPGSSEAAAKGGTLNLEDEYRLYETSAEPEVSPGSTWLSDFPQAWAETGGMGLAVRQAPLIIPLKATSTPVSIKQYPMSQEAKLGIKPHIQRLLDQGILVPCQSPWNTPLLPVKKPGTNDYRPVQDLREVNKRVEDIHPTVPNPYNLLSGLPPSHRWYTVLDLKDAFFCLRLHPTSQPLFAFEWRDPGMGISGQLTWTRLPQGFKNSPTLFNEALHRDLADFRIQHPDLILLQYVDDILLAATSELDCQQGTRALLLTLGNLGYRASAKKAQLCQKQVKYLGYLLKEGQRWLTEARKETVMGQPTPKTPRQLREFLGKAGFCRLFIPGFAEMAAPLYPLTKPGTLFNWGPDQQKAYQEIKQALLTAPALGLPDLTKPFELFVDEKQGYAKGVLTQKLGPWRRPVAYLSKKLDPVAAGWPPCLRMVAAIAVLRKDAGKLTMGQPLVILAPHAVEALVKQPPDRWLSNARMTHYQAMLLDTDRVQFGPVVALNPATLLPLPEEGAPHDCLEILAETHGTRPDLTDQPIPDADHTWYTDGSSFLQEGQRKAGAAVTTETEVIWARALPAGTSAQRAELIALTQALKMAEGKRLNVYTDSRYAFATAHIHGEIYRRRGWLTSEGREIKNKSEILALLKALFLPKRLSIIHCLGHQKGDSAEARGNRLADQAAREAAIKTPPDTSTLLAGKRTADGSEFEKRTADGSEFESPKKKAKVE

SEQ ID NO: 1913 - protein, 2096 aa, synthetic construct
MPAAKRVKLDGGDKKYSIGLDIGTNSVGWAVITDEYKVPSKKFKVLGNTDRHSIKKNLIGALLFDSGETAEATRLKRTARRRYTRRKNRICYLQEIFSNEMAKVDDSFFHRLEESFLVEEDKKHERHPIFGNIVDEVAYHEKYPTIYHLRKKLVDSTDKADLRLIYLALAHMIKFRGHFLIEGDLNPDNSDVDKLFIQLVQTYNQLFEENPINASGVDAKAILSARLSKSRRLENLIAQLPGEKKNGLFGNLIALSLGLTPNFKSNFDLAEDAKLQLSKDTYDDDLDNLLAQIGDQYADLFLAAKNLSDAILLSDILRVNTEITKAPLSASMIKRYDEHHQDLTLLKALVRQQLPEKYKEIFFDQSKNGYAGYIDGGASQEEFYKFIKPILEKMDGTEELLVKLNREDLLRKQRTFDNGSIPHQIHLGELHAILRRQEDFYPFLKDNREKIEKILTFRIPYYVGPLARGNSRFAWMTRKSEETITPWNFEEVVDKGASAQSFIERMTNFDKNLPNEKVLPKHSLLYEYFTVYNELTKVKYVTEGMRKPAFLSGEQKKAIVDLLFKTNRKVTVKQLKEDYFKKIECFDSVEISGVEDRFNASLGTYHDLLKIIKDKDFLDNEENEDILEDIVLTLTLFEDREMIEERLKTYAHLFDDKVMKQLKRRRYTGWGRLSRKLINGIRDKQSGKTILDFLKSDGFANRNFMQLIHDDSLTFKEDIQKAQVSGQGDSLHEHIANLAGSPAIKKGILQTVKVVDELVKVMGRHKPENIVIEMARENQTTQKGQKNSRERMKRIEEGIKELGSQILKEHPVENTQLQNEKLYLYYLQNGRDMYVDQELDINRLSDYDVDHIVPQSFLKDDSIDNKVLTRSDKARGKSDNVPSEEVVKKMKNYWRQLLNAKLITQRKFDNLTKAERGGLSELDKAGFIKRQLVETRQITKHVAQILDSRMNTKYDENDKLIREVKVITLKSKLVSDFRKDFQFYKVREINNYHHAHDAYLNAVVGTALIKKYPKLESEFVYGDYKVYDVRKMIAKSEQEIGKATAKYFFYSNIMNFFKTEITLANGEIRKRPLIETNGETGEIVWDKGRDFATVRKVLSMPQVNIVKKTEVQTGGFSKESILPKRNSDKLIARKKDWDPKKYGGFDSPTVAYSVLVVAKVEKGKSKKLKSVKELLGITIMERSSFEKNPIDFLEAKGYKEVKKDLIIKLPKYSLFELENGRKRMLASAGELQKGNELALPSKYVNFLYLASHYEKLKGSPEDNEQKQLFVEQHKHYLDEIIEQISEFSKRVILADANLDKVLSAYNKHRDKPIREQAENIIHLFTLTNLGAPAAFKYFDTTIDRKRYTSTKEVLDATLIHQSITGLYETRIDLSQLGGDGGEAAAKGSSGGSGGTLNLEDEYRLYETSAEPEVSPGSTWLSDFPQAWAETGGMGLAVRQAPLIIPLKATSTPVSIKQYPMSQEAKLGIKPHIQRLLDQGILVPCQSPWNTPLLPVKKPGTNDYRPVQDLREVNKRVEDIHPTVPNPYNLLSGLPPSHRWYTVLDLKDAFFCLRLHPTSQPLFAFEWRDPGMGISGQLTWTRLPQGFKNSPTLFNEALHRDLADFRIQHPDLILLQYVDDILLAATSELDCQQGTRALLLTLGNLGYRASAKKAQLCQKQVKYLGYLLKEGQRWLTEARKETVMGQPTPKTPRQLREFLGKAGFCRLFIPGFAEMAAPLYPLTKPGTLFNWGPDQQKAYQEIKQALLTAPALGLPDLTKPFELFVDEKQGYAKGVLTQKLGPWRRPVAYLSKKLDPVAAGWPPCLRMVAAIAVLRKDAGKLTMGQPLVILAPHAVEALVKQPPDRWLSNARMTHYQAMLLDTDRVQFGPVVALNPATLLPLPEEGAPHDCLEILAETHGTRPDLTDQPIPDADHTWYTDGSSFLQEGQRKAGAAVTTETEVIWARALPAGTSAQRAELIALTQALKMAEGKRLNVYTDSRYAFATAHIHGEIYRRRGWLTSEGREIKNKSEILALLKALFLPKRLSIIHCLGHQKGDSAEARGNRLADQAAREAAIKTPPDTSTLLAGKRTADGSEFEKRTADGSEFESPKKKAKVE

SEQ ID NO: 1914 - protein, 2091 aa, synthetic construct
MPAAKRVKLDGGDKKYSIGLDIGTNSVGWAVITDEYKVPSKKFKVLGNTDRHSIKKNLIGALLFDSGETAEATRLKRTARRRYTRRKNRICYLQEIFSNEMAKVDDSFFHRLEESFLVEEDKKHERHPIFGNIVDEVAYHEKYPTIYHLRKKLVDSTDKADLRLIYLALAHMIKFRGHFLIEGDLNPDNSDVDKLFIQLVQTYNQLFEENPINASGVDAKAILSARLSKSRRLENLIAQLPGEKKNGLFGNLIALSLGLTPNFKSNFDLAEDAKLQLSKDTYDDDLDNLLAQIGDQYADLFLAAKNLSDAILLSDILRVNTEITKAPLSASMIKRYDEHHQDLTLLKALVRQQLPEKYKEIFFDQSKNGYAGYIDGGASQEEFYKFIKPILEKMDGTEELLVKLNREDLLRKQRTFDNGSIPHQIHLGELHAILRRQEDFYPFLKDNREKIEKILTFRIPYYVGPLARGNSRFAWMTRKSEETITPWNFEEVVDKGASAQSFIERMTNFDKNLPNEKVLPKHSLLYEYFTVYNELTKVKYVTEGMRKPAFLSGEQKKAIVDLLFKTNRKVTVKQLKEDYFKKIECFDSVEISGVEDRFNASLGTYHDLLKIIKDKDFLDNEENEDILEDIVLTLTLFEDREMIEERLKTYAHLFDDKVMKQLKRRRYTGWGRLSRKLINGIRDKQSGKTILDFLKSDGFANRNFMQLIHDDSLTFKEDIQKAQVSGQGDSLHEHIANLAGSPAIKKGILQTVKVVDELVKVMGRHKPENIVIEMARENQTTQKGQKNSRERMKRIEEGIKELGSQILKEHPVENTQLQNEKLYLYYLQNGRDMYVDQELDINRLSDYDVDHIVPQSFLKDDSIDNKVLTRSDKARGKSDNVPSEEVVKKMKNYWRQLLNAKLITQRKFDNLTKAERGGLSELDKAGFIKRQLVETRQITKHVAQILDSRMNTKYDENDKLIREVKVITLKSKLVSDFRKDFQFYKVREINNYHHAHDAYLNAVVGTALIKKYPKLESEFVYGDYKVYDVRKMIAKSEQEIGKATAKYFFYSNIMNFFKTEITLANGEIRKRPLIETNGETGEIVWDKGRDFATVRKVLSMPQVNIVKKTEVQTGGFSKESILPKRNSDKLIARKKDWDPKKYGGFDSPTVAYSVLVVAKVEKGKSKKLKSVKELLGITIMERSSFEKNPIDFLEAKGYKEVKKDLIIKLPKYSLFELENGRKRMLASAGELQKGNELALPSKYVNFLYLASHYEKLKGSPEDNEQKQLFVEQHKHYLDEIIEQISEFSKRVILADANLDKVLSAYNKHRDKPIREQAENIIHLFTLTNLGAPAAFKYFDTTIDRKRYTSTKEVLDATLIHQSITGLYETRIDLSQLGGDGGGGSPAPGGTLNLEDEYRLYETSAEPEVSPGSTWLSDFPQAWAETGGMGLAVRQAPLIIPLKATSTPVSIKQYPMSQEAKLGIKPHIQRLLDQGILVPCQSPWNTPLLPVKKPGTNDYRPVQDLREVNKRVEDIHPTVPNPYNLLSGLPPSHRWYTVLDLKDAFFCLRLHPTSQPLFAFEWRDPGMGISGQLTWTRLPQGFKNSPTLFNEALHRDLADFRIQHPDLILLQYVDDILLAATSELDCQQGTRALLLTLGNLGYRASAKKAQLCQKQVKYLGYLLKEGQRWLTEARKETVMGQPTPKTPRQLREFLGKAGFCRLFIPGFAEMAAPLYPLTKPGTLFNWGPDQQKAYQEIKQALLTAPALGLPDLTKPFELFVDEKQGYAKGVLTQKLGPWRRPVAYLSKKLDPVAAGWPPCLRMVAAIAVLRKDAGKLTMGQPLVILAPHAVEALVKQPPDRWLSNARMTHYQAMLLDTDRVQFGPVVALNPATLLPLPEEGAPHDCLEILAETHGTRPDLTDQPIPDADHTWYTDGSSFLQEGQRKAGAAVTTETEVIWARALPAGTSAQRAELIALTQALKMAEGKRLNVYTDSRYAFATAHIHGEIYRRRGWLTSEGREIKNKSEILALLKALFLPKRLSIIHCLGHQKGDSAEARGNRLADQAAREAAIKTPPDTSTLLAGKRTADGSEFEKRTADGSEFESPKKKAKVE

SEQ ID NO: 1915 - protein, 2096 aa, synthetic construct
MPAAKRVKLDGGDKKYSIGLDIGTNSVGWAVITDEYKVPSKKFKVLGNTDRHSIKKNLIGALLFDSGETAEATRLKRTARRRYTRRKNRICYLQEIFSNEMAKVDDSFFHRLEESFLVEEDKKHERHPIFGNIVDEVAYHEKYPTIYHLRKKLVDSTDKADLRLIYLALAHMIKFRGHFLIEGDLNPDNSDVDKLFIQLVQTYNQLFEENPINASGVDAKAILSARLSKSRRLENLIAQLPGEKKNGLFGNLIALSLGLTPNFKSNFDLAEDAKLQLSKDTYDDDLDNLLAQIGDQYADLFLAAKNLSDAILLSDILRVNTEITKAPLSASMIKRYDEHHQDLTLLKALVRQQLPEKYKEIFFDQSKNGYAGYIDGGASQEEFYKFIKPILEKMDGTEELLVKLNREDLLRKQRTFDNGSIPHQIHLGELHAILRRQEDFYPFLKDNREKIEKILTFRIPYYVGPLARGNSRFAWMTRKSEETITPWNFEEVVDKGASAQSFIERMTNFDKNLPNEKVLPKHSLLYEYFTVYNELTKVKYVTEGMRKPAFLSGEQKKAIVDLLFKTNRKVTVKQLKEDYFKKIECFDSVEISGVEDRFNASLGTYHDLLKIIKDKDFLDNEENEDILEDIVLTLTLFEDREMIEERLKTYAHLFDDKVMKQLKRRRYTGWGRLSRKLINGIRDKQSGKTILDFLKSDGFANRNFMQLIHDDSLTFKEDIQKAQVSGQGDSLHEHIANLAGSPAIKKGILQTVKVVDELVKVMGRHKPENIVIEMARENQTTQKGQKNSRERMKRIEEGIKELGSQILKEHPVENTQLQNEKLYLYYLQNGRDMYVDQELDINRLSDYDVDHIVPQSFLKDDSIDNKVLTRSDKARGKSDNVPSEEVVKKMKNYWRQLLNAKLITQRKFDNLTKAERGGLSELDKAGFIKRQLVETRQITKHVAQILDSRMNTKYDENDKLIREVKVITLKSKLVSDFRKDFQFYKVREINNYHHAHDAYLNAVVGTALIKKYPKLESEFVYGDYKVYDVRKMIAKSEQEIGKATAKYFFYSNIMNFFKTEITLANGEIRKRPLIETNGETGEIVWDKGRDFATVRKVLSMPQVNIVKKTEVQTGGFSKESILPKRNSDKLIARKKDWDPKKYGGFDSPTVAYSVLVVAKVEKGKSKKLKSVKELLGITIMERSSFEKNPIDFLEAKGYKEVKKDLIIKLPKYSLFELENGRKRMLASAGELQKGNELALPSKYVNFLYLASHYEKLKGSPEDNEQKQLFVEQHKHYLDEIIEQISEFSKRVILADANLDKVLSAYNKHRDKPIREQAENIIHLFTLTNLGAPAAFKYFDTTIDRKRYTSTKEVLDATLIHQSITGLYETRIDLSQLGGDGGGGSEAAAKGGGGGTLNLEDEYRLYETSAEPEVSPGSTWLSDFPQAWAETGGMGLAVRQAPLIIPLKATSTPVSIKQYPMSQEAKLGIKPHIQRLLDQGILVPCQSPWNTPLLPVKKPGTNDYRPVQDLREVNKRVEDIHPTVPNPYNLLSGLPPSHRWYTVLDLKDAFFCLRLHPTSQPLFAFEWRDPGMGISGQLTWTRLPQGFKNSPTLFNEALHRDLADFRIQHPDLILLQYVDDILLAATSELDCQQGTRALLLTLGNLGYRASAKKAQLCQKQVKYLGYLLKEGQRWLTEARKETVMGQPTPKTPRQLREFLGKAGFCRLFIPGFAEMAAPLYPLTKPGTLFNWGPDQQKAYQEIKQALLTAPALGLPDLTKPFELFVDEKQGYAKGVLTQKLGPWRRPVAYLSKKLDPVAAGWPPCLRMVAAIAVLRKDAGKLTMGQPLVILAPHAVEALVKQPPDRWLSNARMTHYQAMLLDTDRVQFGPVVALNPATLLPLPEEGAPHDCLEILAETHGTRPDLTDQPIPDADHTWYTDGSSFLQEGQRKAGAAVTTETEVIWARALPAGTSAQRAELIALTQALKMAEGKRLNVYTDSRYAFATAHIHGEIYRRRGWLTSEGREIKNKSEILALLKALFLPKRLSIIHCLGHQKGDSAEARGNRLADQAAREAAIKTPPDTSTLLAGKRTADGSEFEKRTADGSEFESPKKKAKVE

SEQ ID NO: 1916 - protein, 2097 aa, synthetic construct
MPAAKRVKLDGGDKKYSIGLDIGTNSVGWAVITDEYKVPSKKFKVLGNTDRHSIKKNLIGALLFDSGETAEATRLKRTARRRYTRRKNRICYLQEIFSNEMAKVDDSFFHRLEESFLVEEDKKHERHPIFGNIVDEVAYHEKYPTIYHLRKKLVDSTDKADLRLIYLALAHMIKFRGHFLIEGDLNPDNSDVDKLFIQLVQTYNQLFEENPINASGVDAKAILSARLSKSRRLENLIAQLPGEKKNGLFGNLIALSLGLTPNFKSNFDLAEDAKLQLSKDTYDDDLDNLLAQIGDQYADLFLAAKNLSDAILLSDILRVNTEITKAPLSASMIKRYDEHHQDLTLLKALVRQQLPEKYKEIFFDQSKNGYAGYIDGGASQEEFYKFIKPILEKMDGTEELLVKLNREDLLRKQRTFDNGSIPHQIHLGELHAILRRQEDFYPFLKDNREKIEKILTFRIPYYVGPLARGNSRFAWMTRKSEETITPWNFEEVVDKGASAQSFIERMTNFDKNLPNEKVLPKHSLLYEYFTVYNELTKVKYVTEGMRKPAFLSGEQKKAIVDLLFKTNRKVTVKQLKEDYFKKIECFDSVEISGVEDRFNASLGTYHDLLKIIKDKDFLDNEENEDILEDIVLTLTLFEDREMIEERLKTYAHLFDDKVMKQLKRRRYTGWGRLSRKLINGIRDKQSGKTILDFLKSDGFANRNFMQLIHDDSLTFKEDIQKAQVSGQGDSLHEHIANLAGSPAIKKGILQTVKVVDELVKVMGRHKPENIVIEMARENQTTQKGQKNSRERMKRIEEGIKELGSQILKEHPVENTQLQNEKLYLYYLQNGRDMYVDQELDINRLSDYDVDHIVPQSFLKDDSIDNKVLTRSDKARGKSDNVPSEEVVKKMKNYWRQLLNAKLITQRKFDNLTKAERGGLSELDKAGFIKRQLVETRQITKHVAQILDSRMNTKYDENDKLIREVKVITLKSKLVSDFRKDFQFYKVREINNYHHAHDAYLNAVVGTALIKKYPKLESEFVYGDYKVYDVRKMIAKSEQEIGKATAKYFFYSNIMNFFKTEITLANGEIRKRPLIETNGETGEIVWDKGRDFATVRKVLSMPQVNIVKKTEVQTGGFSKESILPKRNSDKLIARKKDWDPKKYGGFDSPTVAYSVLVVAKVEKGKSKKLKSVKELLGITIMERSSFEKNPIDFLEAKGYKEVKKDLIIKLPKYSLFELENGRKRMLASAGELQKGNELALPSKYVNFLYLASHYEKLKGSPEDNEQKQLFVEQHKHYLDEIIEQISEFSKRVILADANLDKVLSAYNKHRDKPIREQAENIIHLFTLTNLGAPAAFKYFDTTIDRKRYTSTKEVLDATLIHQSITGLYETRIDLSQLGGDGGGGSGGSGGSGGSGGTLNLEDEYRLYETSAEPEVSPGSTWLSDFPQAWAETGGMGLAVRQAPLIIPLKATSTPVSIKQYPMSQEAKLGIKPHIQRLLDQGILVPCQSPWNTPLLPVKKPGTNDYRPVQDLREVNKRVEDIHPTVPNPYNLLSGLPPSHRWYTVLDLKDAFFCLRLHPTSQPLFAFEWRDPGMGISGQLTWTRLPQGFKNSPTLFNEALHRDLADFRIQHPDLILLQYVDDILLAATSELDCQQGTRALLLTLGNLGYRASAKKAQLCQKQVKYLGYLLKEGQRWLTEARKETVMGQPTPKTPRQLREFLGKAGFCRLFIPGFAEMAAPLYPLTKPGTLFNWGPDQQKAYQEIKQALLTAPALGLPDLTKPFELFVDEKQGYAKGVLTQKLGPWRRPVAYLSKKLDPVAAGWPPCLRMVAAIAVLRKDAGKLTMGQPLVILAPHAVEALVKQPPDRWLSNARMTHYQAMLLDTDRVQFGPVVALNPATLLPLPEEGAPHDCLEILAETHGTRPDLTDQPIPDADHTWYTDGSSFLQEGQRKAGAAVTTETEVIWARALPAGTSAQRAELIALTQALKMAEGKRLNVYTDSRYAFATAHIHGEIYRRRGWLTSEGREIKNKSEILALLKALFLPKRLSIIHCLGHQKGDSAEARGNRLADQAAREAAIKTPPDTSTLLAGKRTADGSEFEKRTADGSEFESPKKKAKVE

SEQ ID NO: 1917 - protein, 2090 aa, synthetic construct
MPAAKRVKLDGGDKKYSIGLDIGTNSVGWAVITDEYKVPSKKFKVLGNTDRHSIKKNLIGALLFDSGETAEATRLKRTARRRYTRRKNRICYLQEIFSNEMAKVDDSFFHRLEESFLVEEDKKHERHPIFGNIVDEVAYHEKYPTIYHLRKKLVDSTDKADLRLIYLALAHMIKFRGHFLIEGDLNPDNSDVDKLFIQLVQTYNQLFEENPINASGVDAKAILSARLSKSRRLENLIAQLPGEKKNGLFGNLIALSLGLTPNFKSNFDLAEDAKLQLSKDTYDDDLDNLLAQIGDQYADLFLAAKNLSDAILLSDILRVNTEITKAPLSASMIKRYDEHHQDLTLLKALVRQQLPEKYKEIFFDQSKNGYAGYIDGGASQEEFYKFIKPILEKMDGTEELLVKLNREDLLRKQRTFDNGSIPHQIHLGELHAILRRQEDFYPFLKDNREKIEKILTFRIPYYVGPLARGNSRFAWMTRKSEETITPWNFEEVVDKGASAQSFIERMTNFDKNLPNEKVLPKHSLLYEYFTVYNELTKVKYVTEGMRKPAFLSGEQKKAIVDLLFKTNRKVTVKQLKEDYFKKIECFDSVEISGVEDRFNASLGTYHDLLKIIKDKDFLDNEENEDILEDIVLTLTLFEDREMIEERLKTYAHLFDDKVMKQLKRRRYTGWGRLSRKLINGIRDKQSGKTILDFLKSDGFANRNFMQLIHDDSLTFKEDIQKAQVSGQGDSLHEHIANLAGSPAIKKGILQTVKVVDELVKVMGRHKPENIVIEMARENQTTQKGQKNSRERMKRIEEGIKELGSQILKEHPVENTQLQNEKLYLYYLQNGRDMYVDQELDINRLSDYDVDHIVPQSFLKDDSIDNKVLTRSDKARGKSDNVPSEEVVKKMKNYWRQLLNAKLITQRKFDNLTKAERGGLSELDKAGFIKRQLVETRQITKHVAQILDSRMNTKYDENDKLIREVKVITLKSKLVSDFRKDFQFYKVREINNYHHAHDAYLNAVVGTALIKKYPKLESEFVYGDYKVYDVRKMIAKSEQEIGKATAKYFFYSNIMNFFKTEITLANGEIRKRPLIETNGETGEIVWDKGRDFATVRKVLSMPQVNIVKKTEVQTGGFSKESILPKRNSDKLIARKKDWDPKKYGGFDSPTVAYSVLVVAKVEKGKSKKLKSVKELLGITIMERSSFEKNPIDFLEAKGYKEVKKDLIIKLPKYSLFELENGRKRMLASAGELQKGNELALPSKYVNFLYLASHYEKLKGSPEDNEQKQLFVEQHKHYLDEIIEQISEFSKRVILADANLDKVLSAYNKHRDKPIREQAENIIHLFTLTNLGAPAAFKYFDTTIDRKRYTSTKEVLDATLIHQSITGLYETRIDLSQLGGDGGGGGGGGGTLNLEDEYRLYETSAEPEVSPGSTWLSDFPQAWAETGGMGLAVRQAPLIIPLKATSTPVSIKQYPMSQEAKLGIKPHIQRLLDQGILVPCQSPWNTPLLPVKKPGTNDYRPVQDLREVNKRVEDIHPTVPNPYNLLSGLPPSHRWYTVLDLKDAFFCLRLHPTSQPLFAFEWRDPGMGISGQLTWTRLPQGFKNSPTLFNEALHRDLADFRIQHPDLILLQYVDDILLAATSELDCQQGTRALLLTLGNLGYRASAKKAQLCQKQVKYLGYLLKEGQRWLTEARKETVMGQPTPKTPRQLREFLGKAGFCRLFIPGFAEMAAPLYPLTKPGTLFNWGPDQQKAYQEIKQALLTAPALGLPDLTKPFELFVDEKQGYAKGVLTQKLGPWRRPVAYLSKKLDPVAAGWPPCLRMVAAIAVLRKDAGKLTMGQPLVILAPHAVEALVKQPPDRWLSNARMTHYQAMLLDTDRVQFGPVVALNPATLLPLPEEGAPHDCLEILAETHGTRPDLTDQPIPDADHTWYTDGSSFLQEGQRKAGAAVTTETEVIWARALPAGTSAQRAELIALTQALKMAEGKRLNVYTDSRYAFATAHIHGEIYRRRGWLTSEGREIKNKSEILALLKALFLPKRLSIIHCLGHQKGDSAEARGNRLADQAAREAAIKTPPDTSTLLAGKRTADGSEFEKRTADGSEFESPKKKAKVE

SEQ ID NO: 1918 - protein, 2131 aa, synthetic construct
MPAAKRVKLDGGDKKYSIGLDIGTNSVGWAVITDEYKVPSKKFKVLGNTDRHSIKKNLIGALLFDSGETAEATRLKRTARRRYTRRKNRICYLQEIFSNEMAKVDDSFFHRLEESFLVEEDKKHERHPIFGNIVDEVAYHEKYPTIYHLRKKLVDSTDKADLRLIYLALAHMIKFRGHFLIEGDLNPDNSDVDKLFIQLVQTYNQLFEENPINASGVDAKAILSARLSKSRRLENLIAQLPGEKKNGLFGNLIALSLGLTPNFKSNFDLAEDAKLQLSKDTYDDDLDNLLAQIGDQYADLFLAAKNLSDAILLSDILRVNTEITKAPLSASMIKRYDEHHQDLTLLKALVRQQLPEKYKEIFFDQSKNGYAGYIDGGASQEEFYKFIKPILEKMDGTEELLVKLNREDLLRKQRTFDNGSIPHQIHLGELHAILRRQEDFYPFLKDNREKIEKILTFRIPYYVGPLARGNSRFAWMTRKSEETITPWNFEEVVDKGASAQSFIERMTNFDKNLPNEKVLPKHSLLYEYFTVYNELTKVKYVTEGMRKPAFLSGEQKKAIVDLLFKTNRKVTVKQLKEDYFKKIECFDSVEISGVEDRFNASLGTYHDLLKIIKDKDFLDNEENEDILEDIVLTLTLFEDREMIEERLKTYAHLFDDKVMKQLKRRRYTGWGRLSRKLINGIRDKQSGKTILDFLKSDGFANRNFMQLIHDDSLTFKEDIQKAQVSGQGDSLHEHIANLAGSPAIKKGILQTVKVVDELVKVMGRHKPENIVIEMARENQTTQKGQKNSRERMKRIEEGIKELGSQILKEHPVENTQLQNEKLYLYYLQNGRDMYVDQELDINRLSDYDVDHIVPQSFLKDDSIDNKVLTRSDKARGKSDNVPSEEVVKKMKNYWRQLLNAKLITQRKFDNLTKAERGGLSELDKAGFIKRQLVETRQITKHVAQILDSRMNTKYDENDKLIREVKVITLKSKLVSDFRKDFQFYKVREINNYHHAHDAYLNAVVGTALIKKYPKLESEFVYGDYKVYDVRKMIAKSEQEIGKATAKYFFYSNIMNFFKTEITLANGEIRKRPLIETNGETGEIVWDKGRDFATVRKVLSMPQVNIVKKTEVQTGGFSKESILPKRNSDKLIARKKDWDPKKYGGFDSPTVAYSVLVVAKVEKGKSKKLKSVKELLGITIMERSSFEKNPIDFLEAKGYKEVKKDLIIKLPKYSLFELENGRKRMLASAGELQKGNELALPSKYVNFLYLASHYEKLKGSPEDNEQKQLFVEQHKHYLDEIIEQISEFSKRVILADANLDKVLSAYNKHRDKPIREQAENIIHLFTLTNLGAPAAFKYFDTTIDRKRYTSTKEVLDATLIHQSITGLYETRIDLSQLGGDGGAEAAAKEAAAKEAAAKEAAAKALEAEAAAKEAAAKEAAAKEAAAKAGGTLNLEDEYRLYETSAEPEVSPGSTWLSDFPQAWAETGGMGLAVRQAPLIIPLKATSTPVSIKQYPMSQEAKLGIKPHIQRLLDQGILVPCQSPWNTPLLPVKKPGTNDYRPVQDLREVNKRVEDIHPTVPNPYNLLSGLPPSHRWYTVLDLKDAFFCLRLHPTSQPLFAFEWRDPGMGISGQLTWTRLPQGFKNSPTLFNEALHRDLADFRIQHPDLILLQYVDDILLAATSELDCQQGTRALLLTLGNLGYRASAKKAQLCQKQVKYLGYLLKEGQRWLTEARKETVMGQPTPKTPRQLREFLGKAGFCRLFIPGFAEMAAPLYPLTKPGTLFNWGPDQQKAYQEIKQALLTAPALGLPDLTKPFELFVDEKQGYAKGVLTQKLGPWRRPVAYLSKKLDPVAAGWPPCLRMVAAIAVLRKDAGKLTMGQPLVILAPHAVEALVKQPPDRWLSNARMTHYQAMLLDTDRVQFGPVVALNPATLLPLPEEGAPHDCLEILAETHGTRPDLTDQPIPDADHTWYTDGSSFLQEGQRKAGAAVTTETEVIWARALPAGTSAQRAELIALTQALKMAEGKRLNVYTDSRYAFATAHIHGEIYRRRGWLTSEGREIKNKSEILALLKALFLPKRLSIIHCLGHQKGDSAEARGNRLADQAAREAAIKTPPDTSTLLAGKRTADGSEFEKRTADGSEFESPKKKAKVE

SEQ ID NO: 1919 - protein, 2096 aa, synthetic construct
MPAAKRVKLDGGDKKYSIGLDIGTNSVGWAVITDEYKVPSKKFKVLGNTDRHSIKKNLIGALLFDSGETAEATRLKRTARRRYTRRKNRICYLQEIFSNEMAKVDDSFFHRLEESFLVEEDKKHERHPIFGNIVDEVAYHEKYPTIYHLRKKLVDSTDKADLRLIYLALAHMIKFRGHFLIEGDLNPDNSDVDKLFIQLVQTYNQLFEENPINASGVDAKAILSARLSKSRRLENLIAQLPGEKKNGLFGNLIALSLGLTPNFKSNFDLAEDAKLQLSKDTYDDDLDNLLAQIGDQYADLFLAAKNLSDAILLSDILRVNTEITKAPLSASMIKRYDEHHQDLTLLKALVRQQLPEKYKEIFFDQSKNGYAGYIDGGASQEEFYKFIKPILEKMDGTEELLVKLNREDLLRKQRTFDNGSIPHQIHLGELHAILRRQEDFYPFLKDNREKIEKILTFRIPYYVGPLARGNSRFAWMTRKSEETITPWNFEEVVDKGASAQSFIERMTNFDKNLPNEKVLPKHSLLYEYFTVYNELTKVKYVTEGMRKPAFLSGEQKKAIVDLLFKTNRKVTVKQLKEDYFKKIECFDSVEISGVEDRFNASLGTYHDLLKIIKDKDFLDNEENEDILEDIVLTLTLFEDREMIEERLKTYAHLFDDKVMKQLKRRRYTGWGRLSRKLINGIRDKQSGKTILDFLKSDGFANRNFMQLIHDDSLTFKEDIQKAQVSGQGDSLHEHIANLAGSPAIKKGILQTVKVVDELVKVMGRHKPENIVIEMARENQTTQKGQKNSRERMKRIEEGIKELGSQILKEHPVENTQLQNEKLYLYYLQNGRDMYVDQELDINRLSDYDVDHIVPQSFLKDDSIDNKVLTRSDKARGKSDNVPSEEVVKKMKNYWRQLLNAKLITQRKFDNLTKAERGGLSELDKAGFIKRQLVETRQITKHVAQILDSRMNTKYDENDKLIREVKVITLKSKLVSDFRKDFQFYKVREINNYHHAHDAYLNAVVGTALIKKYPKLESEFVYGDYKVYDVRKMIAKSEQEIGKATAKYFFYSNIMNFFKTEITLANGEIRKRPLIETNGETGEIVWDKGRDFATVRKVLSMPQVNIVKKTEVQTGGFSKESILPKRNSDKLIARKKDWDPKKYGGFDSPTVAYSVLVVAKVEKGKSKKLKSVKELLGITIMERSSFEKNPIDFLEAKGYKEVKKDLIIKLPKYSLFELENGRKRMLASAGELQKGNELALPSKYVNFLYLASHYEKLKGSPEDNEQKQLFVEQHKHYLDEIIEQISEFSKRVILADANLDKVLSAYNKHRDKPIREQAENIIHLFTLTNLGAPAAFKYFDTTIDRKRYTSTKEVLDATLIHQSITGLYETRIDLSQLGGDGGPAPEAAAKGSSGGTLNLEDEYRLYETSAEPEVSPGSTWLSDFPQAWAETGGMGLAVRQAPLIIPLKATSTPVSIKQYPMSQEAKLGIKPHIQRLLDQGILVPCQSPWNTPLLPVKKPGTNDYRPVQDLREVNKRVEDIHPTVPNPYNLLSGLPPSHRWYTVLDLKDAFFCLRLHPTSQPLFAFEWRDPGMGISGQLTWTRLPQGFKNSPTLFNEALHRDLADFRIQHPDLILLQYVDDILLAATSELDCQQGTRALLLTLGNLGYRASAKKAQLCQKQVKYLGYLLKEGQRWLTEARKETVMGQPTPKTPRQLREFLGKAGFCRLFIPGFAEMAAPLYPLTKPGTLFNWGPDQQKAYQEIKQALLTAPALGLPDLTKPFELFVDEKQGYAKGVLTQKLGPWRRPVAYLSKKLDPVAAGWPPCLRMVAAIAVLRKDAGKLTMGQPLVILAPHAVEALVKQPPDRWLSNARMTHYQAMLLDTDRVQFGPVVALNPATLLPLPEEGAPHDCLEILAETHGTRPDLTDQPIPDADHTWYTDGSSFLQEGQRKAGAAVTTETEVIWARALPAGTSAQRAELIALTQALKMAEGKRLNVYTDSRYAFATAHIHGEIYRRRGWLTSEGREIKNKSEILALLKALFLPKRLSIIHCLGHQKGDSAEARGNRLADQAAREAAIKTPPDTSTLLAGKRTADGSEFEKRTADGSEFESPKKKAKVE

SEQ ID NO: 1920 - protein, 2096 aa, synthetic construct
MPAAKRVKLDGGDKKYSIGLDIGTNSVGWAVITDEYKVPSKKFKVLGNTDRHSIKKNLIGALLFDSGETAEATRLKRTARRRYTRRKNRICYLQEIFSNEMAKVDDSFFHRLEESFLVEEDKKHERHPIFGNIVDEVAYHEKYPTIYHLRKKLVDSTDKADLRLIYLALAHMIKFRGHFLIEGDLNPDNSDVDKLFIQLVQTYNQLFEENPINASGVDAKAILSARLSKSRRLENLIAQLPGEKKNGLFGNLIALSLGLTPNFKSNFDLAEDAKLQLSKDTYDDDLDNLLAQIGDQYADLFLAAKNLSDAILLSDILRVNTEITKAPLSASMIKRYDEHHQDLTLLKALVRQQLPEKYKEIFFDQSKNGYAGYIDGGASQEEFYKFIKPILEKMDGTEELLVKLNREDLLRKQRTFDNGSIPHQIHLGELHAILRRQEDFYPFLKDNREKIEKILTFRIPYYVGPLARGNSRFAWMTRKSEETITPWNFEEVVDKGASAQSFIERMTNFDKNLPNEKVLPKHSLLYEYFTVYNELTKVKYVTEGMRKPAFLSGEQKKAIVDLLFKTNRKVTVKQLKEDYFKKIECFDSVEISGVEDRFNASLGTYHDLLKIIKDKDFLDNEENEDILEDIVLTLTLFEDREMIEERLKTYAHLFDDKVMKQLKRRRYTGWGRLSRKLINGIRDKQSGKTILDFLKSDGFANRNFMQLIHDDSLTFKEDIQKAQVSGQGDSLHEHIANLAGSPAIKKGILQTVKVVDELVKVMGRHKPENIVIEMARENQTTQKGQKNSRERMKRIEEGIKELGSQILKEHPVENTQLQNEKLYLYYLQNGRDMYVDQELDINRLSDYDVDHIVPQSFLKDDSIDNKVLTRSDKARGKSDNVPSEEVVKKMKNYWRQLLNAKLITQRKFDNLTKAERGGLSELDKAGFIKRQLVETRQITKHVAQILDSRMNTKYDENDKLIREVKVITLKSKLVSDFRKDFQFYKVREINNYHHAHDAYLNAVVGTALIKKYPKLESEFVYGDYKVYDVRKMIAKSEQEIGKATAKYFFYSNIMNFFKTEITLANGEIRKRPLIETNGETGEIVWDKGRDFATVRKVLSMPQVNIVKKTEVQTGGFSKESILPKRNSDKLIARKKDWDPKKYGGFDSPTVAYSVLVVAKVEKGKSKKLKSVKELLGITIMERSSFEKNPIDFLEAKGYKEVKKDLIIKLPKYSLFELENGRKRMLASAGELQKGNELALPSKYVNFLYLASHYEKLKGSPEDNEQKQLFVEQHKHYLDEIIEQISEFSKRVILADANLDKVLSAYNKHRDKPIREQAENIIHLFTLTNLGAPAAFKYFDTTIDRKRYTSTKEVLDATLIHQSITGLYETRIDLSQLGGDGGGGGEAAAKGGSGGTLNLEDEYRLYETSAEPEVSPGSTWLSDFPQAWAETGGMGLAVRQAPLIIPLKATSTPVSIKQYPMSQEAKLGIKPHIQRLLDQGILVPCQSPWNTPLLPVKKPGTNDYRPVQDLREVNKRVEDIHPTVPNPYNLLSGLPPSHRWYTVLDLKDAFFCLRLHPTSQPLFAFEWRDPGMGISGQLTWTRLPQGFKNSPTLFNEALHRDLADFRIQHPDLILLQYVDDILLAATSELDCQQGTRALLLTLGNLGYRASAKKAQLCQKQVKYLGYLLKEGQRWLTEARKETVMGQPTPKTPRQLREFLGKAGFCRLFIPGFAEMAAPLYPLTKPGTLFNWGPDQQKAYQEIKQALLTAPALGLPDLTKPFELFVDEKQGYAKGVLTQKLGPWRRPVAYLSKKLDPVAAGWPPCLRMVAAIAVLRKDAGKLTMGQPLVILAPHAVEALVKQPPDRWLSNARMTHYQAMLLDTDRVQFGPVVALNPATLLPLPEEGAPHDCLEILAETHGTRPDLTDQPIPDADHTWYTDGSSFLQEGQRKAGAAVTTETEVIWARALPAGTSAQRAELIALTQALKMAEGKRLNVYTDSRYAFATAHIHGEIYRRRGWLTSEGREIKNKSEILALLKALFLPKRLSIIHCLGHQKGDSAEARGNRLADQAAREAAIKTPPDTSTLLAGKRTADGSEFEKRTADGSEFESPKKKAKVE

SEQ ID NO: 1921 - protein, 2096 aa, synthetic construct
MPAAKRVKLDGGDKKYSIGLDIGTNSVGWAVITDEYKVPSKKFKVLGNTDRHSIKKNLIGALLFDSGETAEATRLKRTARRRYTRRKNRICYLQEIFSNEMAKVDDSFFHRLEESFLVEEDKKHERHPIFGNIVDEVAYHEKYPTIYHLRKKLVDSTDKADLRLIYLALAHMIKFRGHFLIEGDLNPDNSDVDKLFIQLVQTYNQLFEENPINASGVDAKAILSARLSKSRRLENLIAQLPGEKKNGLFGNLIALSLGLTPNFKSNFDLAEDAKLQLSKDTYDDDLDNLLAQIGDQYADLFLAAKNLSDAILLSDILRVNTEITKAPLSASMIKRYDEHHQDLTLLKALVRQQLPEKYKEIFFDQSKNGYAGYIDGGASQEEFYKFIKPILEKMDGTEELLVKLNREDLLRKQRTFDNGSIPHQIHLGELHAILRRQEDFYPFLKDNREKIEKILTFRIPYYVGPLARGNSRFAWMTRKSEETITPWNFEEVVDKGASAQSFIERMTNFDKNLPNEKVLPKHSLLYEYFTVYNELTKVKYVTEGMRKPAFLSGEQKKAIVDLLFKTNRKVTVKQLKEDYFKKIECFDSVEISGVEDRFNASLGTYHDLLKIIKDKDFLDNEENEDILEDIVLTLTLFEDREMIEERLKTYAHLFDDKVMKQLKRRRYTGWGRLSRKLINGIRDKQSGKTILDFLKSDGFANRNFMQLIHDDSLTFKEDIQKAQVSGQGDSLHEHIANLAGSPAIKKGILQTVKVVDELVKVMGRHKPENIVIEMARENQTTQKGQKNSRERMKRIEEGIKELGSQILKEHPVENTQLQNEKLYLYYLQNGRDMYVDQELDINRLSDYDVDHIVPQSFLKDDSIDNKVLTRSDKARGKSDNVPSEEVVKKMKNYWRQLLNAKLITQRKFDNLTKAERGGLSELDKAGFIKRQLVETRQITKHVAQILDSRMNTKYDENDKLIREVKVITLKSKLVSDFRKDFQFYKVREINNYHHAHDAYLNAVVGTALIKKYPKLESEFVYGDYKVYDVRKMIAKSEQEIGKATAKYFFYSNIMNFFKTEITLANGEIRKRPLIETNGETGEIVWDKGRDFATVRKVLSMPQVNIVKKTEVQTGGFSKESILPKRNSDKLIARKKDWDPKKYGGFDSPTVAYSVLVVAKVEKGKSKKLKSVKELLGITIMERSSFEKNPIDFLEAKGYKEVKKDLIIKLPKYSLFELENGRKRMLASAGELQKGNELALPSKYVNFLYLASHYEKLKGSPEDNEQKQLFVEQHKHYLDEIIEQISEFSKRVILADANLDKVLSAYNKHRDKPIREQAENIIHLFTLTNLGAPAAFKYFDTTIDRKRYTSTKEVLDATLIHQSITGLYETRIDLSQLGGDGGEAAAKGSSGGGGGTLNLEDEYRLYETSAEPEVSPGSTWLSDFPQAWAETGGMGLAVRQAPLIIPLKATSTPVSIKQYPMSQEAKLGIKPHIQRLLDQGILVPCQSPWNTPLLPVKKPGTNDYRPVQDLREVNKRVEDIHPTVPNPYNLLSGLPPSHRWYTVLDLKDAFFCLRLHPTSQPLFAFEWRDPGMGISGQLTWTRLPQGFKNSPTLFNEALHRDLADFRIQHPDLILLQYVDDILLAATSELDCQQGTRALLLTLGNLGYRASAKKAQLCQKQVKYLGYLLKEGQRWLTEARKETVMGQPTPKTPRQLREFLGKAGFCRLFIPGFAEMAAPLYPLTKPGTLFNWGPDQQKAYQEIKQALLTAPALGLPDLTKPFELFVDEKQGYAKGVLTQKLGPWRRPVAYLSKKLDPVAAGWPPCLRMVAAIAVLRKDAGKLTMGQPLVILAPHAVEALVKQPPDRWLSNARMTHYQAMLLDTDRVQFGPVVALNPATLLPLPEEGAPHDCLEILAETHGTRPDLTDQPIPDADHTWYTDGSSFLQEGQRKAGAAVTTETEVIWARALPAGTSAQRAELIALTQALKMAEGKRLNVYTDSRYAFATAHIHGEIYRRRGWLTSEGREIKNKSEILALLKALFLPKRLSIIHCLGHQKGDSAEARGNRLADQAAREAAIKTPPDTSTLLAGKRTADGSEFEKRTADGSEFESPKKKAKVE

SEQ ID NO: 1922 - protein, 2093 aa, synthetic construct
MPAAKRVKLDGGDKKYSIGLDIGTNSVGWAVITDEYKVPSKKFKVLGNTDRHSIKKNLIGALLFDSGETAEATRLKRTARRRYTRRKNRICYLQEIFSNEMAKVDDSFFHRLEESFLVEEDKKHERHPIFGNIVDEVAYHEKYPTIYHLRKKLVDSTDKADLRLIYLALAHMIKFRGHFLIEGDLNPDNSDVDKLFIQLVQTYNQLFEENPINASGVDAKAILSARLSKSRRLENLIAQLPGEKKNGLFGNLIALSLGLTPNFKSNFDLAEDAKLQLSKDTYDDDLDNLLAQIGDQYADLFLAAKNLSDAILLSDILRVNTEITKAPLSASMIKRYDEHHQDLTLLKALVRQQLPEKYKEIFFDQSKNGYAGYIDGGASQEEFYKFIKPILEKMDGTEELLVKLNREDLLRKQRTFDNGSIPHQIHLGELHAILRRQEDFYPFLKDNREKIEKILTFRIPYYVGPLARGNSRFAWMTRKSEETITPWNFEEVVDKGASAQSFIERMTNFDKNLPNEKVLPKHSLLYEYFTVYNELTKVKYVTEGMRKPAFLSGEQKKAIVDLLFKTNRKVTVKQLKEDYFKKIECFDSVEISGVEDRFNASLGTYHDLLKIIKDKDFLDNEENEDILEDIVLTLTLFEDREMIEERLKTYAHLFDDKVMKQLKRRRYTGWGRLSRKLINGIRDKQSGKTILDFLKSDGFANRNFMQLIHDDSLTFKEDIQKAQVSGQGDSLHEHIANLAGSPAIKKGILQTVKVVDELVKVMGRHKPENIVIEMARENQTTQKGQKNSRERMKRIEEGIKELGSQILKEHPVENTQLQNEKLYLYYLQNGRDMYVDQELDINRLSDYDVDHIVPQSFLKDDSIDNKVLTRSDKARGKSDNVPSEEVVKKMKNYWRQLLNAKLITQRKFDNLTKAERGGLSELDKAGFIKRQLVETRQITKHVAQILDSRMNTKYDENDKLIREVKVITLKSKLVSDFRKDFQFYKVREINNYHHAHDAYLNAVVGTALIKKYPKLESEFVYGDYKVYDVRKMIAKSEQEIGKATAKYFFYSNIMNFFKTEITLANGEIRKRPLIETNGETGEIVWDKGRDFATVRKVLSMPQVNIVKKTEVQTGGFSKESILPKRNSDKLIARKKDWDPKKYGGFDSPTVAYSVLVVAKVEKGKSKKLKSVKELLGITIMERSSFEKNPIDFLEAKGYKEVKKDLIIKLPKYSLFELENGRKRMLASAGELQKGNELALPSKYVNFLYLASHYEKLKGSPEDNEQKQLFVEQHKHYLDEIIEQISEFSKRVILADANLDKVLSAYNKHRDKPIREQAENIIHLFTLTNLGAPAAFKYFDTTIDRKRYTSTKEVLDATLIHQSITGLYETRIDLSQLGGDGGGGSEAAAKGGTLNLEDEYRLYETSAEPEVSPGSTWLSDFPQAWAETGGMGLAVRQAPLIIPLKATSTPVSIKQYPMSQEAKLGIKPHIQRLLDQGILVPCQSPWNTPLLPVKKPGTNDYRPVQDLREVNKRVEDIHPTVPNPYNLLSGLPPSHRWYTVLDLKDAFFCLRLHPTSQPLFAFEWRDPGMGISGQLTWTRLPQGFKNSPTLFNEALHRDLADFRIQHPDLILLQYVDDILLAATSELDCQQGTRALLLTLGNLGYRASAKKAQLCQKQVKYLGYLLKEGQRWLTEARKETVMGQPTPKTPRQLREFLGKAGFCRLFIPGFAEMAAPLYPLTKPGTLFNWGPDQQKAYQEIKQALLTAPALGLPDLTKPFELFVDEKQGYAKGVLTQKLGPWRRPVAYLSKKLDPVAAGWPPCLRMVAAIAVLRKDAGKLTMGQPLVILAPHAVEALVKQPPDRWLSNARMTHYQAMLLDTDRVQFGPVVALNPATLLPLPEEGAPHDCLEILAETHGTRPDLTDQPIPDADHTWYTDGSSFLQEGQRKAGAAVTTETEVIWARALPAGTSAQRAELIALTQALKMAEGKRLNVYTDSRYAFATAHIHGEIYRRRGWLTSEGREIKNKSEILALLKALFLPKRLSIIHCLGHQKGDSAEARGNRLADQAAREAAIKTPPDTSTLLAGKRTADGSEFEKRTADGSEFESPKKKAKVE

SEQ ID NO: 1923 - protein, 2100 aa, synthetic construct
MPAAKRVKLDGGDKKYSIGLDIGTNSVGWAVITDEYKVPSKKFKVLGNTDRHSIKKNLIGALLFDSGETAEATRLKRTARRRYTRRKNRICYLQEIFSNEMAKVDDSFFHRLEESFLVEEDKKHERHPIFGNIVDEVAYHEKYPTIYHLRKKLVDSTDKADLRLIYLALAHMIKFRGHFLIEGDLNPDNSDVDKLFIQLVQTYNQLFEENPINASGVDAKAILSARLSKSRRLENLIAQLPGEKKNGLFGNLIALSLGLTPNFKSNFDLAEDAKLQLSKDTYDDDLDNLLAQIGDQYADLFLAAKNLSDAILLSDILRVNTEITKAPLSASMIKRYDEHHQDLTLLKALVRQQLPEKYKEIFFDQSKNGYAGYIDGGASQEEFYKFIKPILEKMDGTEELLVKLNREDLLRKQRTFDNGSIPHQIHLGELHAILRRQEDFYPFLKDNREKIEKILTFRIPYYVGPLARGNSRFAWMTRKSEETITPWNFEEVVDKGASAQSFIERMTNFDKNLPNEKVLPKHSLLYEYFTVYNELTKVKYVTEGMRKPAFLSGEQKKAIVDLLFKTNRKVTVKQLKEDYFKKIECFDSVEISGVEDRFNASLGTYHDLLKIIKDKDFLDNEENEDILEDIVLTLTLFEDREMIEERLKTYAHLFDDKVMKQLKRRRYTGWGRLSRKLINGIRDKQSGKTILDFLKSDGFANRNFMQLIHDDSLTFKEDIQKAQVSGQGDSLHEHIANLAGSPAIKKGILQTVKVVDELVKVMGRHKPENIVIEMARENQTTQKGQKNSRERMKRIEEGIKELGSQILKEHPVENTQLQNEKLYLYYLQNGRDMYVDQELDINRLSDYDVDHIVPQSFLKDDSIDNKVLTRSDKARGKSDNVPSEEVVKKMKNYWRQLLNAKLITQRKFDNLTKAERGGLSELDKAGFIKRQLVETRQITKHVAQILDSRMNTKYDENDKLIREVKVITLKSKLVSDFRKDFQFYKVREINNYHHAHDAYLNAVVGTALIKKYPKLESEFVYGDYKVYDVRKMIAKSEQEIGKATAKYFFYSNIMNFFKTEITLANGEIRKRPLIETNGETGEIVWDKGRDFATVRKVLSMPQVNIVKKTEVQTGGFSKESILPKRNSDKLIARKKDWDPKKYGGFDSPTVAYSVLVVAKVEKGKSKKLKSVKELLGITIMERSSFEKNPIDFLEAKGYKEVKKDLIIKLPKYSLFELENGRKRMLASAGELQKGNELALPSKYVNFLYLASHYEKLKGSPEDNEQKQLFVEQHKHYLDEIIEQISEFSKRVILADANLDKVLSAYNKHRDKPIREQAENIIHLFTLTNLGAPAAFKYFDTTIDRKRYTSTKEVLDATLIHQSITGLYETRIDLSQLGGDGGGSSGSSGSSGSSGSSGGTLNLEDEYRLYETSAEPEVSPGSTWLSDFPQAWAETGGMGLAVRQAPLIIPLKATSTPVSIKQYPMSQEAKLGIKPHIQRLLDQGILVPCQSPWNTPLLPVKKPGTNDYRPVQDLREVNKRVEDIHPTVPNPYNLLSGLPPSHRWYTVLDLKDAFFCLRLHPTSQPLFAFEWRDPGMGISGQLTWTRLPQGFKNSPTLFNEALHRDLADFRIQHPDLILLQYVDDILLAATSELDCQQGTRALLLTLGNLGYRASAKKAQLCQKQVKYLGYLLKEGQRWLTEARKETVMGQPTPKTPRQLREFLGKAGFCRLFIPGFAEMAAPLYPLTKPGTLFNWGPDQQKAYQEIKQALLTAPALGLPDLTKPFELFVDEKQGYAKGVLTQKLGPWRRPVAYLSKKLDPVAAGWPPCLRMVAAIAVLRKDAGKLTMGQPLVILAPHAVEALVKQPPDRWLSNARMTHYQAMLLDTDRVQFGPVVALNPATLLPLPEEGAPHDCLEILAETHGTRPDLTDQPIPDADHTWYTDGSSFLQEGQRKAGAAVTTETEVIWARALPAGTSAQRAELIALTQALKMAEGKRLNVYTDSRYAFATAHIHGEIYRRRGWLTSEGREIKNKSEILALLKALFLPKRLSIIHCLGHQKGDSAEARGNRLADQAAREAAIKTPPDTSTLLAGKRTADGSEFEKRTADGSEFESPKKKAKVE

SEQ ID NO: 1924 - protein, 2096 aa, synthetic construct
MPAAKRVKLDGGDKKYSIGLDIGTNSVGWAVITDEYKVPSKKFKVLGNTDRHSIKKNLIGALLFDSGETAEATRLKRTARRRYTRRKNRICYLQEIFSNEMAKVDDSFFHRLEESFLVEEDKKHERHPIFGNIVDEVAYHEKYPTIYHLRKKLVDSTDKADLRLIYLALAHMIKFRGHFLIEGDLNPDNSDVDKLFIQLVQTYNQLFEENPINASGVDAKAILSARLSKSRRLENLIAQLPGEKKNGLFGNLIALSLGLTPNFKSNFDLAEDAKLQLSKDTYDDDLDNLLAQIGDQYADLFLAAKNLSDAILLSDILRVNTEITKAPLSASMIKRYDEHHQDLTLLKALVRQQLPEKYKEIFFDQSKNGYAGYIDGGASQEEFYKFIKPILEKMDGTEELLVKLNREDLLRKQRTFDNGSIPHQIHLGELHAILRRQEDFYPFLKDNREKIEKILTFRIPYYVGPLARGNSRFAWMTRKSEETITPWNFEEVVDKGASAQSFIERMTNFDKNLPNEKVLPKHSLLYEYFTVYNELTKVKYVTEGMRKPAFLSGEQKKAIVDLLFKTNRKVTVKQLKEDYFKKIECFDSVEISGVEDRFNASLGTYHDLLKIIKDKDFLDNEENEDILEDIVLTLTLFEDREMIEERLKTYAHLFDDKVMKQLKRRRYTGWGRLSRKLINGIRDKQSGKTILDFLKSDGFANRNFMQLIHDDSLTFKEDIQKAQVSGQGDSLHEHIANLAGSPAIKKGILQTVKVVDELVKVMGRHKPENIVIEMARENQTTQKGQKNSRERMKRIEEGIKELGSQILKEHPVENTQLQNEKLYLYYLQNGRDMYVDQELDINRLSDYDVDHIVPQSFLKDDSIDNKVLTRSDKARGKSDNVPSEEVVKKMKNYWRQLLNAKLITQRKFDNLTKAERGGLSELDKAGFIKRQLVETRQITKHVAQILDSRMNTKYDENDKLIREVKVITLKSKLVSDFRKDFQFYKVREINNYHHAHDAYLNAVVGTALIKKYPKLESEFVYGDYKVYDVRKMIAKSEQEIGKATAKYFFYSNIMNFFKTEITLANGEIRKRPLIETNGETGEIVWDKGRDFATVRKVLSMPQVNIVKKTEVQTGGFSKESILPKRNSDKLIARKKDWDPKKYGGFDSPTVAYSVLVVAKVEKGKSKKLKSVKELLGITIMERSSFEKNPIDFLEAKGYKEVKKDLIIKLPKYSLFELENGRKRMLASAGELQKGNELALPSKYVNFLYLASHYEKLKGSPEDNEQKQLFVEQHKHYLDEIIEQISEFSKRVILADANLDKVLSAYNKHRDKPIREQAENIIHLFTLTNLGAPAAFKYFDTTIDRKRYTSTKEVLDATLIHQSITGLYETRIDLSQLGGDGGPAPAPAPAPAPGGTLNLEDEYRLYETSAEPEVSPGSTWLSDFPQAWAETGGMGLAVRQAPLIIPLKATSTPVSIKQYPMSQEAKLGIKPHIQRLLDQGILVPCQSPWNTPLLPVKKPGTNDYRPVQDLREVNKRVEDIHPTVPNPYNLLSGLPPSHRWYTVLDLKDAFFCLRLHPTSQPLFAFEWRDPGMGISGQLTWTRLPQGFKNSPTLFNEALHRDLADFRIQHPDLILLQYVDDILLAATSELDCQQGTRALLLTLGNLGYRASAKKAQLCQKQVKYLGYLLKEGQRWLTEARKETVMGQPTPKTPRQLREFLGKAGFCRLFIPGFAEMAAPLYPLTKPGTLFNWGPDQQKAYQEIKQALLTAPALGLPDLTKPFELFVDEKQGYAKGVLTQKLGPWRRPVAYLSKKLDPVAAGWPPCLRMVAAIAVLRKDAGKLTMGQPLVILAPHAVEALVKQPPDRWLSNARMTHYQAMLLDTDRVQFGPVVALNPATLLPLPEEGAPHDCLEILAETHGTRPDLTDQPIPDADHTWYTDGSSFLQEGQRKAGAAVTTETEVIWARALPAGTSAQRAELIALTQALKMAEGKRLNVYTDSRYAFATAHIHGEIYRRRGWLTSEGREIKNKSEILALLKALFLPKRLSIIHCLGHQKGDSAEARGNRLADQAAREAAIKTPPDTSTLLAGKRTADGSEFEKRTADGSEFESPKKKAKVE

SEQ ID NO: 1925 - protein, 2094 aa, synthetic construct
MPAAKRVKLDGGDKKYSIGLDIGTNSVGWAVITDEYKVPSKKFKVLGNTDRHSIKKNLIGALLFDSGETAEATRLKRTARRRYTRRKNRICYLQEIFSNEMAKVDDSFFHRLEESFLVEEDKKHERHPIFGNIVDEVAYHEKYPTIYHLRKKLVDSTDKADLRLIYLALAHMIKFRGHFLIEGDLNPDNSDVDKLFIQLVQTYNQLFEENPINASGVDAKAILSARLSKSRRLENLIAQLPGEKKNGLFGNLIALSLGLTPNFKSNFDLAEDAKLQLSKDTYDDDLDNLLAQIGDQYADLFLAAKNLSDAILLSDILRVNTEITKAPLSASMIKRYDEHHQDLTLLKALVRQQLPEKYKEIFFDQSKNGYAGYIDGGASQEEFYKFIKPILEKMDGTEELLVKLNREDLLRKQRTFDNGSIPHQIHLGELHAILRRQEDFYPFLKDNREKIEKILTFRIPYYVGPLARGNSRFAWMTRKSEETITPWNFEEVVDKGASAQSFIERMTNFDKNLPNEKVLPKHSLLYEYFTVYNELTKVKYVTEGMRKPAFLSGEQKKAIVDLLFKTNRKVTVKQLKEDYFKKIECFDSVEISGVEDRFNASLGTYHDLLKIIKDKDFLDNEENEDILEDIVLTLTLFEDREMIEERLKTYAHLFDDKVMKQLKRRRYTGWGRLSRKLINGIRDKQSGKTILDFLKSDGFANRNFMQLIHDDSLTFKEDIQKAQVSGQGDSLHEHIANLAGSPAIKKGILQTVKVVDELVKVMGRHKPENIVIEMARENQTTQKGQKNSRERMKRIEEGIKELGSQILKEHPVENTQLQNEKLYLYYLQNGRDMYVDQELDINRLSDYDVDHIVPQSFLKDDSIDNKVLTRSDKARGKSDNVPSEEVVKKMKNYWRQLLNAKLITQRKFDNLTKAERGGLSELDKAGFIKRQLVETRQITKHVAQILDSRMNTKYDENDKLIREVKVITLKSKLVSDFRKDFQFYKVREINNYHHAHDAYLNAVVGTALIKKYPKLESEFVYGDYKVYDVRKMIAKSEQEIGKATAKYFFYSNIMNFFKTEITLANGEIRKRPLIETNGETGEIVWDKGRDFATVRKVLSMPQVNIVKKTEVQTGGFSKESILPKRNSDKLIARKKDWDPKKYGGFDSPTVAYSVLVVAKVEKGKSKKLKSVKELLGITIMERSSFEKNPIDFLEAKGYKEVKKDLIIKLPKYSLFELENGRKRMLASAGELQKGNELALPSKYVNFLYLASHYEKLKGSPEDNEQKQLFVEQHKHYLDEIIEQISEFSKRVILADANLDKVLSAYNKHRDKPIREQAENIIHLFTLTNLGAPAAFKYFDTTIDRKRYTSTKEVLDATLIHQSITGLYETRIDLSQLGGDGGGSSGSSGSSGGTLNLEDEYRLYETSAEPEVSPGSTWLSDFPQAWAETGGMGLAVRQAPLIIPLKATSTPVSIKQYPMSQEAKLGIKPHIQRLLDQGILVPCQSPWNTPLLPVKKPGTNDYRPVQDLREVNKRVEDIHPTVPNPYNLLSGLPPSHRWYTVLDLKDAFFCLRLHPTSQPLFAFEWRDPGMGISGQLTWTRLPQGFKNSPTLFNEALHRDLADFRIQHPDLILLQYVDDILLAATSELDCQQGTRALLLTLGNLGYRASAKKAQLCQKQVKYLGYLLKEGQRWLTEARKETVMGQPTPKTPRQLREFLGKAGFCRLFIPGFAEMAAPLYPLTKPGTLFNWGPDQQKAYQEIKQALLTAPALGLPDLTKPFELFVDEKQGYAKGVLTQKLGPWRRPVAYLSKKLDPVAAGWPPCLRMVAAIAVLRKDAGKLTMGQPLVILAPHAVEALVKQPPDRWLSNARMTHYQAMLLDTDRVQFGPVVALNPATLLPLPEEGAPHDCLEILAETHGTRPDLTDQPIPDADHTWYTDGSSFLQEGQRKAGAAVTTETEVIWARALPAGTSAQRAELIALTQALKMAEGKRLNVYTDSRYAFATAHIHGEIYRRRGWLTSEGREIKNKSEILALLKALFLPKRLSIIHCLGHQKGDSAEARGNRLADQAAREAAIKTPPDTSTLLAGKRTADGSEFEKRTADGSEFESPKKKAKVE

SEQ ID NO: 1926 - protein, 2094 aa, synthetic construct
MPAAKRVKLDGGDKKYSIGLDIGTNSVGWAVITDEYKVPSKKFKVLGNTDRHSIKKNLIGALLFDSGETAEATRLKRTARRRYTRRKNRICYLQEIFSNEMAKVDDSFFHRLEESFLVEEDKKHERHPIFGNIVDEVAYHEKYPTIYHLRKKLVDSTDKADLRLIYLALAHMIKFRGHFLIEGDLNPDNSDVDKLFIQLVQTYNQLFEENPINASGVDAKAILSARLSKSRRLENLIAQLPGEKKNGLFGNLIALSLGLTPNFKSNFDLAEDAKLQLSKDTYDDDLDNLLAQIGDQYADLFLAAKNLSDAILLSDILRVNTEITKAPLSASMIKRYDEHHQDLTLLKALVRQQLPEKYKEIFFDQSKNGYAGYIDGGASQEEFYKFIKPILEKMDGTEELLVKLNREDLLRKQRTFDNGSIPHQIHLGELHAILRRQEDFYPFLKDNREKIEKILTFRIPYYVGPLARGNSRFAWMTRKSEETITPWNFEEVVDKGASAQSFIERMTNFDKNLPNEKVLPKHSLLYEYFTVYNELTKVKYVTEGMRKPAFLSGEQKKAIVDLLFKTNRKVTVKQLKEDYFKKIECFDSVEISGVEDRFNASLGTYHDLLKIIKDKDFLDNEENEDILEDIVLTLTLFEDREMIEERLKTYAHLFDDKVMKQLKRRRYTGWGRLSRKLINGIRDKQSGKTILDFLKSDGFANRNFMQLIHDDSLTFKEDIQKAQVSGQGDSLHEHIANLAGSPAIKKGILQTVKVVDELVKVMGRHKPENIVIEMARENQTTQKGQKNSRERMKRIEEGIKELGSQILKEHPVENTQLQNEKLYLYYLQNGRDMYVDQELDINRLSDYDVDHIVPQSFLKDDSIDNKVLTRSDKARGKSDNVPSEEVVKKMKNYWRQLLNAKLITQRKFDNLTKAERGGLSELDKAGFIKRQLVETRQITKHVAQILDSRMNTKYDENDKLIREVKVITLKSKLVSDFRKDFQFYKVREINNYHHAHDAYLNAVVGTALIKKYPKLESEFVYGDYKVYDVRKMIAKSEQEIGKATAKYFFYSNIMNFFKTEITLANGEIRKRPLIETNGETGEIVWDKGRDFATVRKVLSMPQVNIVKKTEVQTGGFSKESILPKRNSDKLIARKKDWDPKKYGGFDSPTVAYSVLVVAKVEKGKSKKLKSVKELLGITIMERSSFEKNPIDFLEAKGYKEVKKDLIIKLPKYSLFELENGRKRMLASAGELQKGNELALPSKYVNFLYLASHYEKLKGSPEDNEQKQLFVEQHKHYLDEIIEQISEFSKRVILADANLDKVLSAYNKHRDKPIREQAENIIHLFTLTNLGAPAAFKYFDTTIDRKRYTSTKEVLDATLIHQSITGLYETRIDLSQLGGDGGGSSGGSPAPGGTLNLEDEYRLYETSAEPEVSPGSTWLSDFPQAWAETGGMGLAVRQAPLIIPLKATSTPVSIKQYPMSQEAKLGIKPHIQRLLDQGILVPCQSPWNTPLLPVKKPGTNDYRPVQDLREVNKRVEDIHPTVPNPYNLLSGLPPSHRWYTVLDLKDAFFCLRLHPTSQPLFAFEWRDPGMGISGQLTWTRLPQGFKNSPTLFNEALHRDLADFRIQHPDLILLQYVDDILLAATSELDCQQGTRALLLTLGNLGYRASAKKAQLCQKQVKYLGYLLKEGQRWLTEARKETVMGQPTPKTPRQLREFLGKAGFCRLFIPGFAEMAAPLYPLTKPGTLFNWGPDQQKAYQEIKQALLTAPALGLPDLTKPFELFVDEKQGYAKGVLTQKLGPWRRPVAYLSKKLDPVAAGWPPCLRMVAAIAVLRKDAGKLTMGQPLVILAPHAVEALVKQPPDRWLSNARMTHYQAMLLDTDRVQFGPVVALNPATLLPLPEEGAPHDCLEILAETHGTRPDLTDQPIPDADHTWYTDGSSFLQEGQRKAGAAVTTETEVIWARALPAGTSAQRAELIALTQALKMAEGKRLNVYTDSRYAFATAHIHGEIYRRRGWLTSEGREIKNKSEILALLKALFLPKRLSIIHCLGHQKGDSAEARGNRLADQAAREAAIKTPPDTSTLLAGKRTADGSEFEKRTADGSEFESPKKKAKVE

SEQ ID NO: 1927 - protein, 2091 aa, synthetic construct
MPAAKRVKLDGGDKKYSIGLDIGTNSVGWAVITDEYKVPSKKFKVLGNTDRHSIKKNLIGALLFDSGETAEATRLKRTARRRYTRRKNRICYLQEIFSNEMAKVDDSFFHRLEESFLVEEDKKHERHPIFGNIVDEVAYHEKYPTIYHLRKKLVDSTDKADLRLIYLALAHMIKFRGHFLIEGDLNPDNSDVDKLFIQLVQTYNQLFEENPINASGVDAKAILSARLSKSRRLENLIAQLPGEKKNGLFGNLIALSLGLTPNFKSNFDLAEDAKLQLSKDTYDDDLDNLLAQIGDQYADLFLAAKNLSDAILLSDILRVNTEITKAPLSASMIKRYDEHHQDLTLLKALVRQQLPEKYKEIFFDQSKNGYAGYIDGGASQEEFYKFIKPILEKMDGTEELLVKLNREDLLRKQRTFDNGSIPHQIHLGELHAILRRQEDFYPFLKDNREKIEKILTFRIPYYVGPLARGNSRFAWMTRKSEETITPWNFEEVVDKGASAQSFIERMTNFDKNLPNEKVLPKHSLLYEYFTVYNELTKVKYVTEGMRKPAFLSGEQKKAIVDLLFKTNRKVTVKQLKEDYFKKIECFDSVEISGVEDRFNASLGTYHDLLKIIKDKDFLDNEENEDILEDIVLTLTLFEDREMIEERLKTYAHLFDDKVMKQLKRRRYTGWGRLSRKLINGIRDKQSGKTILDFLKSDGFANRNFMQLIHDDSLTFKEDIQKAQVSGQGDSLHEHIANLAGSPAIKKGILQTVKVVDELVKVMGRHKPENIVIEMARENQTTQKGQKNSRERMKRIEEGIKELGSQILKEHPVENTQLQNEKLYLYYLQNGRDMYVDQELDINRLSDYDVDHIVPQSFLKDDSIDNKVLTRSDKARGKSDNVPSEEVVKKMKNYWRQLLNAKLITQRKFDNLTKAERGGLSELDKAGFIKRQLVETRQITKHVAQILDSRMNTKYDENDKLIREVKVITLKSKLVSDFRKDFQFYKVREINNYHHAHDAYLNAVVGTALIKKYPKLESEFVYGDYKVYDVRKMIAKSEQEIGKATAKYFFYSNIMNFFKTEITLANGEIRKRPLIETNGETGEIVWDKGRDFATVRKVLSMPQVNIVKKTEVQTGGFSKESILPKRNSDKLIARKKDWDPKKYGGFDSPTVAYSVLVVAKVEKGKSKKLKSVKELLGITIMERSSFEKNPIDFLEAKGYKEVKKDLIIKLPKYSLFELENGRKRMLASAGELQKGNELALPSKYVNFLYLASHYEKLKGSPEDNEQKQLFVEQHKHYLDEIIEQISEFSKRVILADANLDKVLSAYNKHRDKPIREQAENIIHLFTLTNLGAPAAFKYFDTTIDRKRYTSTKEVLDATLIHQSITGLYETRIDLSQLGGDGGGSSGSSGGTLNLEDEYRLYETSAEPEVSPGSTWLSDFPQAWAETGGMGLAVRQAPLIIPLKATSTPVSIKQYPMSQEAKLGIKPHIQRLLDQGILVPCQSPWNTPLLPVKKPGTNDYRPVQDLREVNKRVEDIHPTVPNPYNLLSGLPPSHRWYTVLDLKDAFFCLRLHPTSQPLFAFEWRDPGMGISGQLTWTRLPQGFKNSPTLFNEALHRDLADFRIQHPDLILLQYVDDILLAATSELDCQQGTRALLLTLGNLGYRASAKKAQLCQKQVKYLGYLLKEGQRWLTEARKETVMGQPTPKTPRQLREFLGKAGFCRLFIPGFAEMAAPLYPLTKPGTLFNWGPDQQKAYQEIKQALLTAPALGLPDLTKPFELFVDEKQGYAKGVLTQKLGPWRRPVAYLSKKLDPVAAGWPPCLRMVAAIAVLRKDAGKLTMGQPLVILAPHAVEALVKQPPDRWLSNARMTHYQAMLLDTDRVQFGPVVALNPATLLPLPEEGAPHDCLEILAETHGTRPDLTDQPIPDADHTWYTDGSSFLQEGQRKAGAAVTTETEVIWARALPAGTSAQRAELIALTQALKMAEGKRLNVYTDSRYAFATAHIHGEIYRRRGWLTSEGREIKNKSEILALLKALFLPKRLSIIHCLGHQKGDSAEARGNRLADQAAREAAIKTPPDTSTLLAGKRTADGSEFEKRTADGSEFESPKKKAKVE

SEQ ID NO: 1928 - protein, 2091 aa, synthetic construct
MPAAKRVKLDGGDKKYSIGLDIGTNSVGWAVITDEYKVPSKKFKVLGNTDRHSIKKNLIGALLFDSGETAEATRLKRTARRRYTRRKNRICYLQEIFSNEMAKVDDSFFHRLEESFLVEEDKKHERHPIFGNIVDEVAYHEKYPTIYHLRKKLVDSTDKADLRLIYLALAHMIKFRGHFLIEGDLNPDNSDVDKLFIQLVQTYNQLFEENPINASGVDAKAILSARLSKSRRLENLIAQLPGEKKNGLFGNLIALSLGLTPNFKSNFDLAEDAKLQLSKDTYDDDLDNLLAQIGDQYADLFLAAKNLSDAILLSDILRVNTEITKAPLSASMIKRYDEHHQDLTLLKALVRQQLPEKYKEIFFDQSKNGYAGYIDGGASQEEFYKFIKPILEKMDGTEELLVKLNREDLLRKQRTFDNGSIPHQIHLGELHAILRRQEDFYPFLKDNREKIEKILTFRIPYYVGPLARGNSRFAWMTRKSEETITPWNFEEVVDKGASAQSFIERMTNFDKNLPNEKVLPKHSLLYEYFTVYNELTKVKYVTEGMRKPAFLSGEQKKAIVDLLFKTNRKVTVKQLKEDYFKKIECFDSVEISGVEDRFNASLGTYHDLLKIIKDKDFLDNEENEDILEDIVLTLTLFEDREMIEERLKTYAHLFDDKVMKQLKRRRYTGWGRLSRKLINGIRDKQSGKTILDFLKSDGFANRNFMQLIHDDSLTFKEDIQKAQVSGQGDSLHEHIANLAGSPAIKKGILQTVKVVDELVKVMGRHKPENIVIEMARENQTTQKGQKNSRERMKRIEEGIKELGSQILKEHPVENTQLQNEKLYLYYLQNGRDMYVDQELDINRLSDYDVDHIVPQSFLKDDSIDNKVLTRSDKARGKSDNVPSEEVVKKMKNYWRQLLNAKLITQRKFDNLTKAERGGLSELDKAGFIKRQLVETRQITKHVAQILDSRMNTKYDENDKLIREVKVITLKSKLVSDFRKDFQFYKVREINNYHHAHDAYLNAVVGTALIKKYPKLESEFVYGDYKVYDVRKMIAKSEQEIGKATAKYFFYSNIMNFFKTEITLANGEIRKRPLIETNGETGEIVWDKGRDFATVRKVLSMPQVNIVKKTEVQTGGFSKESILPKRNSDKLIARKKDWDPKKYGGFDSPTVAYSVLVVAKVEKGKSKKLKSVKELLGITIMERSSFEKNPIDFLEAKGYKEVKKDLIIKLPKYSLFELENGRKRMLASAGELQKGNELALPSKYVNFLYLASHYEKLKGSPEDNEQKQLFVEQHKHYLDEIIEQISEFSKRVILADANLDKVLSAYNKHRDKPIREQAENIIHLFTLTNLGAPAAFKYFDTTIDRKRYTSTKEVLDATLIHQSITGLYETRIDLSQLGGDGGGGGGGSGGTLNLEDEYRLYETSAEPEVSPGSTWLSDFPQAWAETGGMGLAVRQAPLIIPLKATSTPVSIKQYPMSQEAKLGIKPHIQRLLDQGILVPCQSPWNTPLLPVKKPGTNDYRPVQDLREVNKRVEDIHPTVPNPYNLLSGLPPSHRWYTVLDLKDAFFCLRLHPTSQPLFAFEWRDPGMGISGQLTWTRLPQGFKNSPTLFNEALHRDLADFRIQHPDLILLQYVDDILLAATSELDCQQGTRALLLTLGNLGYRASAKKAQLCQKQVKYLGYLLKEGQRWLTEARKETVMGQPTPKTPRQLREFLGKAGFCRLFIPGFAEMAAPLYPLTKPGTLFNWGPDQQKAYQEIKQALLTAPALGLPDLTKPFELFVDEKQGYAKGVLTQKLGPWRRPVAYLSKKLDPVAAGWPPCLRMVAAIAVLRKDAGKLTMGQPLVILAPHAVEALVKQPPDRWLSNARMTHYQAMLLDTDRVQFGPVVALNPATLLPLPEEGAPHDCLEILAETHGTRPDLTDQPIPDADHTWYTDGSSFLQEGQRKAGAAVTTETEVIWARALPAGTSAQRAELIALTQALKMAEGKRLNVYTDSRYAFATAHIHGEIYRRRGWLTSEGREIKNKSEILALLKALFLPKRLSIIHCLGHQKGDSAEARGNRLADQAAREAAIKTPPDTSTLLAGKRTADGSEFEKRTADGSEFESPKKKAKVE

SEQ ID NO: 1929 - protein, 2096 aa, synthetic construct
MPAAKRVKLDGGDKKYSIGLDIGTNSVGWAVITDEYKVPSKKFKVLGNTDRHSIKKNLIGALLFDSGETAEATRLKRTARRRYTRRKNRICYLQEIFSNEMAKVDDSFFHRLEESFLVEEDKKHERHPIFGNIVDEVAYHEKYPTIYHLRKKLVDSTDKADLRLIYLALAHMIKFRGHFLIEGDLNPDNSDVDKLFIQLVQTYNQLFEENPINASGVDAKAILSARLSKSRRLENLIAQLPGEKKNGLFGNLIALSLGLTPNFKSNFDLAEDAKLQLSKDTYDDDLDNLLAQIGDQYADLFLAAKNLSDAILLSDILRVNTEITKAPLSASMIKRYDEHHQDLTLLKALVRQQLPEKYKEIFFDQSKNGYAGYIDGGASQEEFYKFIKPILEKMDGTEELLVKLNREDLLRKQRTFDNGSIPHQIHLGELHAILRRQEDFYPFLKDNREKIEKILTFRIPYYVGPLARGNSRFAWMTRKSEETITPWNFEEVVDKGASAQSFIERMTNFDKNLPNEKVLPKHSLLYEYFTVYNELTKVKYVTEGMRKPAFLSGEQKKAIVDLLFKTNRKVTVKQLKEDYFKKIECFDSVEISGVEDRFNASLGTYHDLLKIIKDKDFLDNEENEDILEDIVLTLTLFEDREMIEERLKTYAHLFDDKVMKQLKRRRYTGWGRLSRKLINGIRDKQSGKTILDFLKSDGFANRNFMQLIHDDSLTFKEDIQKAQVSGQGDSLHEHIANLAGSPAIKKGILQTVKVVDELVKVMGRHKPENIVIEMARENQTTQKGQKNSRERMKRIEEGIKELGSQILKEHPVENTQLQNEKLYLYYLQNGRDMYVDQELDINRLSDYDVDHIVPQSFLKDDSIDNKVLTRSDKARGKSDNVPSEEVVKKMKNYWRQLLNAKLITQRKFDNLTKAERGGLSELDKAGFIKRQLVETRQITKHVAQILDSRMNTKYDENDKLIREVKVITLKSKLVSDFRKDFQFYKVREINNYHHAHDAYLNAVVGTALIKKYPKLESEFVYGDYKVYDVRKMIAKSEQEIGKATAKYFFYSNIMNFFKTEITLANGEIRKRPLIETNGETGEIVWDKGRDFATVRKVLSMPQVNIVKKTEVQTGGFSKESILPKRNSDKLIARKKDWDPKKYGGFDSPTVAYSVLVVAKVEKGKSKKLKSVKELLGITIMERSSFEKNPIDFLEAKGYKEVKKDLIIKLPKYSLFELENGRKRMLASAGELQKGNELALPSKYVNFLYLASHYEKLKGSPEDNEQKQLFVEQHKHYLDEIIEQISEFSKRVILADANLDKVLSAYNKHRDKPIREQAENIIHLFTLTNLGAPAAFKYFDTTIDRKRYTSTKEVLDATLIHQSITGLYETRIDLSQLGGDGGGGGPAPEAAAKGGTLNLEDEYRLYETSAEPEVSPGSTWLSDFPQAWAETGGMGLAVRQAPLIIPLKATSTPVSIKQYPMSQEAKLGIKPHIQRLLDQGILVPCQSPWNTPLLPVKKPGTNDYRPVQDLREVNKRVEDIHPTVPNPYNLLSGLPPSHRWYTVLDLKDAFFCLRLHPTSQPLFAFEWRDPGMGISGQLTWTRLPQGFKNSPTLFNEALHRDLADFRIQHPDLILLQYVDDILLAATSELDCQQGTRALLLTLGNLGYRASAKKAQLCQKQVKYLGYLLKEGQRWLTEARKETVMGQPTPKTPRQLREFLGKAGFCRLFIPGFAEMAAPLYPLTKPGTLFNWGPDQQKAYQEIKQALLTAPALGLPDLTKPFELFVDEKQGYAKGVLTQKLGPWRRPVAYLSKKLDPVAAGWPPCLRMVAAIAVLRKDAGKLTMGQPLVILAPHAVEALVKQPPDRWLSNARMTHYQAMLLDTDRVQFGPVVALNPATLLPLPEEGAPHDCLEILAETHGTRPDLTDQPIPDADHTWYTDGSSFLQEGQRKAGAAVTTETEVIWARALPAGTSAQRAELIALTQALKMAEGKRLNVYTDSRYAFATAHIHGEIYRRRGWLTSEGREIKNKSEILALLKALFLPKRLSIIHCLGHQKGDSAEARGNRLADQAAREAAIKTPPDTSTLLAGKRTADGSEFEKRTADGSEFESPKKKAKVE

SEQ ID NO: 1930 - protein, 2091 aa, synthetic construct
MPAAKRVKLDGGDKKYSIGLDIGTNSVGWAVITDEYKVPSKKFKVLGNTDRHSIKKNLIGALLFDSGETAEATRLKRTARRRYTRRKNRICYLQEIFSNEMAKVDDSFFHRLEESFLVEEDKKHERHPIFGNIVDEVAYHEKYPTIYHLRKKLVDSTDKADLRLIYLALAHMIKFRGHFLIEGDLNPDNSDVDKLFIQLVQTYNQLFEENPINASGVDAKAILSARLSKSRRLENLIAQLPGEKKNGLFGNLIALSLGLTPNFKSNFDLAEDAKLQLSKDTYDDDLDNLLAQIGDQYADLFLAAKNLSDAILLSDILRVNTEITKAPLSASMIKRYDEHHQDLTLLKALVRQQLPEKYKEIFFDQSKNGYAGYIDGGASQEEFYKFIKPILEKMDGTEELLVKLNREDLLRKQRTFDNGSIPHQIHLGELHAILRRQEDFYPFLKDNREKIEKILTFRIPYYVGPLARGNSRFAWMTRKSEETITPWNFEEVVDKGASAQSFIERMTNFDKNLPNEKVLPKHSLLYEYFTVYNELTKVKYVTEGMRKPAFLSGEQKKAIVDLLFKTNRKVTVKQLKEDYFKKIECFDSVEISGVEDRFNASLGTYHDLLKIIKDKDFLDNEENEDILEDIVLTLTLFEDREMIEERLKTYAHLFDDKVMKQLKRRRYTGWGRLSRKLINGIRDKQSGKTILDFLKSDGFANRNFMQLIHDDSLTFKEDIQKAQVSGQGDSLHEHIANLAGSPAIKKGILQTVKVVDELVKVMGRHKPENIVIEMARENQTTQKGQKNSRERMKRIEEGIKELGSQILKEHPVENTQLQNEKLYLYYLQNGRDMYVDQELDINRLSDYDVDHIVPQSFLKDDSIDNKVLTRSDKARGKSDNVPSEEVVKKMKNYWRQLLNAKLITQRKFDNLTKAERGGLSELDKAGFIKRQLVETRQITKHVAQILDSRMNTKYDENDKLIREVKVITLKSKLVSDFRKDFQFYKVREINNYHHAHDAYLNAVVGTALIKKYPKLESEFVYGDYKVYDVRKMIAKSEQEIGKATAKYFFYSNIMNFFKTEITLANGEIRKRPLIETNGETGEIVWDKGRDFATVRKVLSMPQVNIVKKTEVQTGGFSKESILPKRNSDKLIARKKDWDPKKYGGFDSPTVAYSVLVVAKVEKGKSKKLKSVKELLGITIMERSSFEKNPIDFLEAKGYKEVKKDLIIKLPKYSLFELENGRKRMLASAGELQKGNELALPSKYVNFLYLASHYEKLKGSPEDNEQKQLFVEQHKHYLDEIIEQISEFSKRVILADANLDKVLSAYNKHRDKPIREQAENIIHLFTLTNLGAPAAFKYFDTTIDRKRYTSTKEVLDATLIHQSITGLYETRIDLSQLGGDGGGGGGSSGGTLNLEDEYRLYETSAEPEVSPGSTWLSDFPQAWAETGGMGLAVRQAPLIIPLKATSTPVSIKQYPMSQEAKLGIKPHIQRLLDQGILVPCQSPWNTPLLPVKKPGTNDYRPVQDLREVNKRVEDIHPTVPNPYNLLSGLPPSHRWYTVLDLKDAFFCLRLHPTSQPLFAFEWRDPGMGISGQLTWTRLPQGFKNSPTLFNEALHRDLADFRIQHPDLILLQYVDDILLAATSELDCQQGTRALLLTLGNLGYRASAKKAQLCQKQVKYLGYLLKEGQRWLTEARKETVMGQPTPKTPRQLREFLGKAGFCRLFIPGFAEMAAPLYPLTKPGTLFNWGPDQQKAYQEIKQALLTAPALGLPDLTKPFELFVDEKQGYAKGVLTQKLGPWRRPVAYLSKKLDPVAAGWPPCLRMVAAIAVLRKDAGKLTMGQPLVILAPHAVEALVKQPPDRWLSNARMTHYQAMLLDTDRVQFGPVVALNPATLLPLPEEGAPHDCLEILAETHGTRPDLTDQPIPDADHTWYTDGSSFLQEGQRKAGAAVTTETEVIWARALPAGTSAQRAELIALTQALKMAEGKRLNVYTDSRYAFATAHIHGEIYRRRGWLTSEGREIKNKSEILALLKALFLPKRLSIIHCLGHQKGDSAEARGNRLADQAAREAAIKTPPDTSTLLAGKRTADGSEFEKRTADGSEFESPKKKAKVE

SEQ ID NO: 1931 - protein, 2091 aa, synthetic construct
MPAAKRVKLDGGDKKYSIGLDIGTNSVGWAVITDEYKVPSKKFKVLGNTDRHSIKKNLIGALLFDSGETAEATRLKRTARRRYTRRKNRICYLQEIFSNEMAKVDDSFFHRLEESFLVEEDKKHERHPIFGNIVDEVAYHEKYPTIYHLRKKLVDSTDKADLRLIYLALAHMIKFRGHFLIEGDLNPDNSDVDKLFIQLVQTYNQLFEENPINASGVDAKAILSARLSKSRRLENLIAQLPGEKKNGLFGNLIALSLGLTPNFKSNFDLAEDAKLQLSKDTYDDDLDNLLAQIGDQYADLFLAAKNLSDAILLSDILRVNTEITKAPLSASMIKRYDEHHQDLTLLKALVRQQLPEKYKEIFFDQSKNGYAGYIDGGASQEEFYKFIKPILEKMDGTEELLVKLNREDLLRKQRTFDNGSIPHQIHLGELHAILRRQEDFYPFLKDNREKIEKILTFRIPYYVGPLARGNSRFAWMTRKSEETITPWNFEEVVDKGASAQSFIERMTNFDKNLPNEKVLPKHSLLYEYFTVYNELTKVKYVTEGMRKPAFLSGEQKKAIVDLLFKTNRKVTVKQLKEDYFKKIECFDSVEISGVEDRFNASLGTYHDLLKIIKDKDFLDNEENEDILEDIVLTLTLFEDREMIEERLKTYAHLFDDKVMKQLKRRRYTGWGRLSRKLINGIRDKQSGKTILDFLKSDGFANRNFMQLIHDDSLTFKEDIQKAQVSGQGDSLHEHIANLAGSPAIKKGILQTVKVVDELVKVMGRHKPENIVIEMARENQTTQKGQKNSRERMKRIEEGIKELGSQILKEHPVENTQLQNEKLYLYYLQNGRDMYVDQELDINRLSDYDVDHIVPQSFLKDDSIDNKVLTRSDKARGKSDNVPSEEVVKKMKNYWRQLLNAKLITQRKFDNLTKAERGGLSELDKAGFIKRQLVETRQITKHVAQILDSRMNTKYDENDKLIREVKVITLKSKLVSDFRKDFQFYKVREINNYHHAHDAYLNAVVGTALIKKYPKLESEFVYGDYKVYDVRKMIAKSEQEIGKATAKYFFYSNIMNFFKTEITLANGEIRKRPLIETNGETGEIVWDKGRDFATVRKVLSMPQVNIVKKTEVQTGGFSKESILPKRNSDKLIARKKDWDPKKYGGFDSPTVAYSVLVVAKVEKGKSKKLKSVKELLGITIMERSSFEKNPIDFLEAKGYKEVKKDLIIKLPKYSLFELENGRKRMLASAGELQKGNELALPSKYVNFLYLASHYEKLKGSPEDNEQKQLFVEQHKHYLDEIIEQISEFSKRVILADANLDKVLSAYNKHRDKPIREQAENIIHLFTLTNLGAPAAFKYFDTTIDRKRYTSTKEVLDATLIHQSITGLYETRIDLSQLGGDGGGSSGGSGGTLNLEDEYRLYETSAEPEVSPGSTWLSDFPQAWAETGGMGLAVRQAPLIIPLKATSTPVSIKQYPMSQEAKLGIKPHIQRLLDQGILVPCQSPWNTPLLPVKKPGTNDYRPVQDLREVNKRVEDIHPTVPNPYNLLSGLPPSHRWYTVLDLKDAFFCLRLHPTSQPLFAFEWRDPGMGISGQLTWTRLPQGFKNSPTLFNEALHRDLADFRIQHPDLILLQYVDDILLAATSELDCQQGTRALLLTLGNLGYRASAKKAQLCQKQVKYLGYLLKEGQRWLTEARKETVMGQPTPKTPRQLREFLGKAGFCRLFIPGFAEMAAPLYPLTKPGTLFNWGPDQQKAYQEIKQALLTAPALGLPDLTKPFELFVDEKQGYAKGVLTQKLGPWRRPVAYLSKKLDPVAAGWPPCLRMVAAIAVLRKDAGKLTMGQPLVILAPHAVEALVKQPPDRWLSNARMTHYQAMLLDTDRVQFGPVVALNPATLLPLPEEGAPHDCLEILAETHGTRPDLTDQPIPDADHTWYTDGSSFLQEGQRKAGAAVTTETEVIWARALPAGTSAQRAELIALTQALKMAEGKRLNVYTDSRYAFATAHIHGEIYRRRGWLTSEGREIKNKSEILALLKALFLPKRLSIIHCLGHQKGDSAEARGNRLADQAAREAAIKTPPDTSTLLAGKRTADGSEFEKRTADGSEFESPKKKAKVE

SEQ ID NO: 1932 - protein, 2094 aa, synthetic construct
MPAAKRVKLDGGDKKYSIGLDIGTNSVGWAVITDEYKVPSKKFKVLGNTDRHSIKKNLIGALLFDSGETAEATRLKRTARRRYTRRKNRICYLQEIFSNEMAKVDDSFFHRLEESFLVEEDKKHERHPIFGNIVDEVAYHEKYPTIYHLRKKLVDSTDKADLRLIYLALAHMIKFRGHFLIEGDLNPDNSDVDKLFIQLVQTYNQLFEENPINASGVDAKAILSARLSKSRRLENLIAQLPGEKKNGLFGNLIALSLGLTPNFKSNFDLAEDAKLQLSKDTYDDDLDNLLAQIGDQYADLFLAAKNLSDAILLSDILRVNTEITKAPLSASMIKRYDEHHQDLTLLKALVRQQLPEKYKEIFFDQSKNGYAGYIDGGASQEEFYKFIKPILEKMDGTEELLVKLNREDLLRKQRTFDNGSIPHQIHLGELHAILRRQEDFYPFLKDNREKIEKILTFRIPYYVGPLARGNSRFAWMTRKSEETITPWNFEEVVDKGASAQSFIERMTNFDKNLPNEKVLPKHSLLYEYFTVYNELTKVKYVTEGMRKPAFLSGEQKKAIVDLLFKTNRKVTVKQLKEDYFKKIECFDSVEISGVEDRFNASLGTYHDLLKIIKDKDFLDNEENEDILEDIVLTLTLFEDREMIEERLKTYAHLFDDKVMKQLKRRRYTGWGRLSRKLINGIRDKQSGKTILDFLKSDGFANRNFMQLIHDDSLTFKEDIQKAQVSGQGDSLHEHIANLAGSPAIKKGILQTVKVVDELVKVMGRHKPENIVIEMARENQTTQKGQKNSRERMKRIEEGIKELGSQILKEHPVENTQLQNEKLYLYYLQNGRDMYVDQELDINRLSDYDVDHIVPQSFLKDDSIDNKVLTRSDKARGKSDNVPSEEVVKKMKNYWRQLLNAKLITQRKFDNLTKAERGGLSELDKAGFIKRQLVETRQITKHVAQILDSRMNTKYDENDKLIREVKVITLKSKLVSDFRKDFQFYKVREINNYHHAHDAYLNAVVGTALIKKYPKLESEFVYGDYKVYDVRKMIAKSEQEIGKATAKYFFYSNIMNFFKTEITLANGEIRKRPLIETNGETGEIVWDKGRDFATVRKVLSMPQVNIVKKTEVQTGGFSKESILPKRNSDKLIARKKDWDPKKYGGFDSPTVAYSVLVVAKVEKGKSKKLKSVKELLGITIMERSSFEKNPIDFLEAKGYKEVKKDLIIKLPKYSLFELENGRKRMLASAGELQKGNELALPSKYVNFLYLASHYEKLKGSPEDNEQKQLFVEQHKHYLDEIIEQISEFSKRVILADANLDKVLSAYNKHRDKPIREQAENIIHLFTLTNLGAPAAFKYFDTTIDRKRYTSTKEVLDATLIHQSITGLYETRIDLSQLGGDGGGSSGGSGGGGGTLNLEDEYRLYETSAEPEVSPGSTWLSDFPQAWAETGGMGLAVRQAPLIIPLKATSTPVSIKQYPMSQEAKLGIKPHIQRLLDQGILVPCQSPWNTPLLPVKKPGTNDYRPVQDLREVNKRVEDIHPTVPNPYNLLSGLPPSHRWYTVLDLKDAFFCLRLHPTSQPLFAFEWRDPGMGISGQLTWTRLPQGFKNSPTLFNEALHRDLADFRIQHPDLILLQYVDDILLAATSELDCQQGTRALLLTLGNLGYRASAKKAQLCQKQVKYLGYLLKEGQRWLTEARKETVMGQPTPKTPRQLREFLGKAGFCRLFIPGFAEMAAPLYPLTKPGTLFNWGPDQQKAYQEIKQALLTAPALGLPDLTKPFELFVDEKQGYAKGVLTQKLGPWRRPVAYLSKKLDPVAAGWPPCLRMVAAIAVLRKDAGKLTMGQPLVILAPHAVEALVKQPPDRWLSNARMTHYQAMLLDTDRVQFGPVVALNPATLLPLPEEGAPHDCLEILAETHGTRPDLTDQPIPDADHTWYTDGSSFLQEGQRKAGAAVTTETEVIWARALPAGTSAQRAELIALTQALKMAEGKRLNVYTDSRYAFATAHIHGEIYRRRGWLTSEGREIKNKSEILALLKALFLPKRLSIIHCLGHQKGDSAEARGNRLADQAAREAAIKTPPDTSTLLAGKRTADGSEFEKRTADGSEFESPKKKAKVE

SEQ ID NO: 1933 - protein, 2092 aa, synthetic construct
MPAAKRVKLDGGDKKYSIGLDIGTNSVGWAVITDEYKVPSKKFKVLGNTDRHSIKKNLIGALLFDSGETAEATRLKRTARRRYTRRKNRICYLQEIFSNEMAKVDDSFFHRLEESFLVEEDKKHERHPIFGNIVDEVAYHEKYPTIYHLRKKLVDSTDKADLRLIYLALAHMIKFRGHFLIEGDLNPDNSDVDKLFIQLVQTYNQLFEENPINASGVDAKAILSARLSKSRRLENLIAQLPGEKKNGLFGNLIALSLGLTPNFKSNFDLAEDAKLQLSKDTYDDDLDNLLAQIGDQYADLFLAAKNLSDAILLSDILRVNTEITKAPLSASMIKRYDEHHQDLTLLKALVRQQLPEKYKEIFFDQSKNGYAGYIDGGASQEEFYKFIKPILEKMDGTEELLVKLNREDLLRKQRTFDNGSIPHQIHLGELHAILRRQEDFYPFLKDNREKIEKILTFRIPYYVGPLARGNSRFAWMTRKSEETITPWNFEEVVDKGASAQSFIERMTNFDKNLPNEKVLPKHSLLYEYFTVYNELTKVKYVTEGMRKPAFLSGEQKKAIVDLLFKTNRKVTVKQLKEDYFKKIECFDSVEISGVEDRFNASLGTYHDLLKIIKDKDFLDNEENEDILEDIVLTLTLFEDREMIEERLKTYAHLFDDKVMKQLKRRRYTGWGRLSRKLINGIRDKQSGKTILDFLKSDGFANRNFMQLIHDDSLTFKEDIQKAQVSGQGDSLHEHIANLAGSPAIKKGILQTVKVVDELVKVMGRHKPENIVIEMARENQTTQKGQKNSRERMKRIEEGIKELGSQILKEHPVENTQLQNEKLYLYYLQNGRDMYVDQELDINRLSDYDVDHIVPQSFLKDDSIDNKVLTRSDKARGKSDNVPSEEVVKKMKNYWRQLLNAKLITQRKFDNLTKAERGGLSELDKAGFIKRQLVETRQITKHVAQILDSRMNTKYDENDKLIREVKVITLKSKLVSDFRKDFQFYKVREINNYHHAHDAYLNAVVGTALIKKYPKLESEFVYGDYKVYDVRKMIAKSEQEIGKATAKYFFYSNIMNFFKTEITLANGEIRKRPLIETNGETGEIVWDKGRDFATVRKVLSMPQVNIVKKTEVQTGGFSKESILPKRNSDKLIARKKDWDPKKYGGFDSPTVAYSVLVVAKVEKGKSKKLKSVKELLGITIMERSSFEKNPIDFLEAKGYKEVKKDLIIKLPKYSLFELENGRKRMLASAGELQKGNELALPSKYVNFLYLASHYEKLKGSPEDNEQKQLFVEQHKHYLDEIIEQISEFSKRVILADANLDKVLSAYNKHRDKPIREQAENIIHLFTLTNLGAPAAFKYFDTTIDRKRYTSTKEVLDATLIHQSITGLYETRIDLSQLGGDGGPAPAPAPGGTLNLEDEYRLYETSAEPEVSPGSTWLSDFPQAWAETGGMGLAVRQAPLIIPLKATSTPVSIKQYPMSQEAKLGIKPHIQRLLDQGILVPCQSPWNTPLLPVKKPGTNDYRPVQDLREVNKRVEDIHPTVPNPYNLLSGLPPSHRWYTVLDLKDAFFCLRLHPTSQPLFAFEWRDPGMGISGQLTWTRLPQGFKNSPTLFNEALHRDLADFRIQHPDLILLQYVDDILLAATSELDCQQGTRALLLTLGNLGYRASAKKAQLCQKQVKYLGYLLKEGQRWLTEARKETVMGQPTPKTPRQLREFLGKAGFCRLFIPGFAEMAAPLYPLTKPGTLFNWGPDQQKAYQEIKQALLTAPALGLPDLTKPFELFVDEKQGYAKGVLTQKLGPWRRPVAYLSKKLDPVAAGWPPCLRMVAAIAVLRKDAGKLTMGQPLVILAPHAVEALVKQPPDRWLSNARMTHYQAMLLDTDRVQFGPVVALNPATLLPLPEEGAPHDCLEILAETHGTRPDLTDQPIPDADHTWYTDGSSFLQEGQRKAGAAVTTETEVIWARALPAGTSAQRAELIALTQALKMAEGKRLNVYTDSRYAFATAHIHGEIYRRRGWLTSEGREIKNKSEILALLKALFLPKRLSIIHCLGHQKGDSAEARGNRLADQAAREAAIKTPPDTSTLLAGKRTADGSEFEKRTADGSEFESPKKKAKVE

SEQ ID NO: 1934 - protein, 2102 aa, synthetic construct
MPAAKRVKLDGGDKKYSIGLDIGTNSVGWAVITDEYKVPSKKFKVLGNTDRHSIKKNLIGALLFDSGETAEATRLKRTARRRYTRRKNRICYLQEIFSNEMAKVDDSFFHRLEESFLVEEDKKHERHPIFGNIVDEVAYHEKYPTIYHLRKKLVDSTDKADLRLIYLALAHMIKFRGHFLIEGDLNPDNSDVDKLFIQLVQTYNQLFEENPINASGVDAKAILSARLSKSRRLENLIAQLPGEKKNGLFGNLIALSLGLTPNFKSNFDLAEDAKLQLSKDTYDDDLDNLLAQIGDQYADLFLAAKNLSDAILLSDILRVNTEITKAPLSASMIKRYDEHHQDLTLLKALVRQQLPEKYKEIFFDQSKNGYAGYIDGGASQEEFYKFIKPILEKMDGTEELLVKLNREDLLRKQRTFDNGSIPHQIHLGELHAILRRQEDFYPFLKDNREKIEKILTFRIPYYVGPLARGNSRFAWMTRKSEETITPWNFEEVVDKGASAQSFIERMTNFDKNLPNEKVLPKHSLLYEYFTVYNELTKVKYVTEGMRKPAFLSGEQKKAIVDLLFKTNRKVTVKQLKEDYFKKIECFDSVEISGVEDRFNASLGTYHDLLKIIKDKDFLDNEENEDILEDIVLTLTLFEDREMIEERLKTYAHLFDDKVMKQLKRRRYTGWGRLSRKLINGIRDKQSGKTILDFLKSDGFANRNFMQLIHDDSLTFKEDIQKAQVSGQGDSLHEHIANLAGSPAIKKGILQTVKVVDELVKVMGRHKPENIVIEMARENQTTQKGQKNSRERMKRIEEGIKELGSQILKEHPVENTQLQNEKLYLYYLQNGRDMYVDQELDINRLSDYDVDHIVPQSFLKDDSIDNKVLTRSDKARGKSDNVPSEEVVKKMKNYWRQLLNAKLITQRKFDNLTKAERGGLSELDKAGFIKRQLVETRQITKHVAQILDSRMNTKYDENDKLIREVKVITLKSKLVSDFRKDFQFYKVREINNYHHAHDAYLNAVVGTALIKKYPKLESEFVYGDYKVYDVRKMIAKSEQEIGKATAKYFFYSNIMNFFKTEITLANGEIRKRPLIETNGETGEIVWDKGRDFATVRKVLSMPQVNIVKKTEVQTGGFSKESILPKRNSDKLIARKKDWDPKKYGGFDSPTVAYSVLVVAKVEKGKSKKLKSVKELLGITIMERSSFEKNPIDFLEAKGYKEVKKDLIIKLPKYSLFELENGRKRMLASAGELQKGNELALPSKYVNFLYLASHYEKLKGSPEDNEQKQLFVEQHKHYLDEIIEQISEFSKRVILADANLDKVLSAYNKHRDKPIREQAENIIHLFTLTNLGAPAAFKYFDTTIDRKRYTSTKEVLDATLIHQSITGLYETRIDLSQLGGDGGPAPAPAPAPAPGGTVSLQDEHRLFDIPVTTSLPDVWLQDFPQAWAETGGLGRAKCQAPIIIDLKPTAVPVSIKQYPMSLEAHMGIRQHIIKFLELGVLRPCRSPWNTPLLPVKKPGTQDYRPVQDLREINKRTVDIHPTVPNPYNLLSTLKPDYSWYTVLDLKDAFFCLPLAPQSQELFAFEWKDPERGISGQLTWTRLPQGFKNSPTLFNEALHRDLTDFRTQHPEVTLLQYVDDLLLAAPTKKACTQGTRHLLQELGEKGYRASAKKAQICQTKVTYLGYILSEGKRWLTPGRIETVARIPPPRNPREVREFLGKAGFCRLFIPGFAELAAPLYALTKPSTPFTWQTEHQLAFEALKKALLSAPALGLPDTSKPFTLFLDERQGIAKGVLTQKLGPWKRPVAYLSKKLDPVAAGWPPCLRIMAATAMLVKDSAKLTLGQPLTVITPHTLEAIVRQPPDRWITNARLTHYQALLLDTDRVQFGPPVTLNPATLLPVPENQPSPHDCRQVLAETHGTREDLKDQELPDADHTWYTDGSSYLDSGTRRAGAAVVDGHNTIWAQSLPPGTSAQKAELIALTKALELSKGKKANIYTDSRYAFATAHTHGSIYERRGWLTSEGKEIKNKAEIIALLKALFLPQEVAIIHCPGHQKGQDPVAVGNRQADRVARQAAMAEVLTLATEPDNTSHITAGKRTADGSEFEKRTADGSEFESPKKKAKVE

SEQ ID NO: 1935 - protein, 2102 aa, synthetic construct
MPAAKRVKLDGGDKKYSIGLDIGTNSVGWAVITDEYKVPSKKFKVLGNTDRHSIKKNLIGALLFDSGETAEATRLKRTARRRYTRRKNRICYLQEIFSNEMAKVDDSFFHRLEESFLVEEDKKHERHPIFGNIVDEVAYHEKYPTIYHLRKKLVDSTDKADLRLIYLALAHMIKFRGHFLIEGDLNPDNSDVDKLFIQLVQTYNQLFEENPINASGVDAKAILSARLSKSRRLENLIAQLPGEKKNGLFGNLIALSLGLTPNFKSNFDLAEDAKLQLSKDTYDDDLDNLLAQIGDQYADLFLAAKNLSDAILLSDILRVNTEITKAPLSASMIKRYDEHHQDLTLLKALVRQQLPEKYKEIFFDQSKNGYAGYIDGGASQEEFYKFIKPILEKMDGTEELLVKLNREDLLRKQRTFDNGSIPHQIHLGELHAILRRQEDFYPFLKDNREKIEKILTFRIPYYVGPLARGNSRFAWMTRKSEETITPWNFEEVVDKGASAQSFIERMTNFDKNLPNEKVLPKHSLLYEYFTVYNELTKVKYVTEGMRKPAFLSGEQKKAIVDLLFKTNRKVTVKQLKEDYFKKIECFDSVEISGVEDRFNASLGTYHDLLKIIKDKDFLDNEENEDILEDIVLTLTLFEDREMIEERLKTYAHLFDDKVMKQLKRRRYTGWGRLSRKLINGIRDKQSGKTILDFLKSDGFANRNFMQLIHDDSLTFKEDIQKAQVSGQGDSLHEHIANLAGSPAIKKGILQTVKVVDELVKVMGRHKPENIVIEMARENQTTQKGQKNSRERMKRIEEGIKELGSQILKEHPVENTQLQNEKLYLYYLQNGRDMYVDQELDINRLSDYDVDHIVPQSFLKDDSIDNKVLTRSDKARGKSDNVPSEEVVKKMKNYWRQLLNAKLITQRKFDNLTKAERGGLSELDKAGFIKRQLVETRQITKHVAQILDSRMNTKYDENDKLIREVKVITLKSKLVSDFRKDFQFYKVREINNYHHAHDAYLNAVVGTALIKKYPKLESEFVYGDYKVYDVRKMIAKSEQEIGKATAKYFFYSNIMNFFKTEITLANGEIRKRPLIETNGETGEIVWDKGRDFATVRKVLSMPQVNIVKKTEVQTGGFSKESILPKRNSDKLIARKKDWDPKKYGGFDSPTVAYSVLVVAKVEKGKSKKLKSVKELLGITIMERSSFEKNPIDFLEAKGYKEVKKDLIIKLPKYSLFELENGRKRMLASAGELQKGNELALPSKYVNFLYLASHYEKLKGSPEDNEQKQLFVEQHKHYLDEIIEQISEFSKRVILADANLDKVLSAYNKHRDKPIREQAENIIHLFTLTNLGAPAAFKYFDTTIDRKRYTSTKEVLDATLIHQSITGLYETRIDLSQLGGDGGEAAAKGGSGGGGGTVSLQDEHRLFDIPVTTSLPDVWLQDFPQAWAETGGLGRAKCQAPIIIDLKPTAVPVSIKQYPMSLEAHMGIRQHIIKFLELGVLRPCRSPWNTPLLPVKKPGTQDYRPVQDLREINKRTVDIHPTVPNPYNLLSTLKPDYSWYTVLDLKDAFFCLPLAPQSQELFAFEWKDPERGISGQLTWTRLPQGFKNSPTLFNEALHRDLTDFRTQHPEVTLLQYVDDLLLAAPTKKACTQGTRHLLQELGEKGYRASAKKAQICQTKVTYLGYILSEGKRWLTPGRIETVARIPPPRNPREVREFLGKAGFCRLFIPGFAELAAPLYALTKPSTPFTWQTEHQLAFEALKKALLSAPALGLPDTSKPFTLFLDERQGIAKGVLTQKLGPWKRPVAYLSKKLDPVAAGWPPCLRIMAATAMLVKDSAKLTLGQPLTVITPHTLEAIVRQPPDRWITNARLTHYQALLLDTDRVQFGPPVTLNPATLLPVPENQPSPHDCRQVLAETHGTREDLKDQELPDADHTWYTDGSSYLDSGTRRAGAAVVDGHNTIWAQSLPPGTSAQKAELIALTKALELSKGKKANIYTDSRYAFATAHTHGSIYERRGWLTSEGKEIKNKAEIIALLKALFLPQEVAIIHCPGHQKGQDPVAVGNRQADRVARQAAMAEVLTLATEPDNTSHITAGKRTADGSEFEKRTADGSEFESPKKKAKVE

SEQ ID NO: 1936 - protein, 2121 aa, synthetic construct
MPAAKRVKLDGGDKKYSIGLDIGTNSVGWAVITDEYKVPSKKFKVLGNTDRHSIKKNLIGALLFDSGETAEATRLKRTARRRYTRRKNRICYLQEIFSNEMAKVDDSFFHRLEESFLVEEDKKHERHPIFGNIVDEVAYHEKYPTIYHLRKKLVDSTDKADLRLIYLALAHMIKFRGHFLIEGDLNPDNSDVDKLFIQLVQTYNQLFEENPINASGVDAKAILSARLSKSRRLENLIAQLPGEKKNGLFGNLIALSLGLTPNFKSNFDLAEDAKLQLSKDTYDDDLDNLLAQIGDQYADLFLAAKNLSDAILLSDILRVNTEITKAPLSASMIKRYDEHHQDLTLLKALVRQQLPEKYKEIFFDQSKNGYAGYIDGGASQEEFYKFIKPILEKMDGTEELLVKLNREDLLRKQRTFDNGSIPHQIHLGELHAILRRQEDFYPFLKDNREKIEKILTFRIPYYVGPLARGNSRFAWMTRKSEETITPWNFEEVVDKGASAQSFIERMTNFDKNLPNEKVLPKHSLLYEYFTVYNELTKVKYVTEGMRKPAFLSGEQKKAIVDLLFKTNRKVTVKQLKEDYFKKIECFDSVEISGVEDRFNASLGTYHDLLKIIKDKDFLDNEENEDILEDIVLTLTLFEDREMIEERLKTYAHLFDDKVMKQLKRRRYTGWGRLSRKLINGIRDKQSGKTILDFLKSDGFANRNFMQLIHDDSLTFKEDIQKAQVSGQGDSLHEHIANLAGSPAIKKGILQTVKVVDELVKVMGRHKPENIVIEMARENQTTQKGQKNSRERMKRIEEGIKELGSQILKEHPVENTQLQNEKLYLYYLQNGRDMYVDQELDINRLSDYDVDHIVPQSFLKDDSIDNKVLTRSDKARGKSDNVPSEEVVKKMKNYWRQLLNAKLITQRKFDNLTKAERGGLSELDKAGFIKRQLVETRQITKHVAQILDSRMNTKYDENDKLIREVKVITLKSKLVSDFRKDFQFYKVREINNYHHAHDAYLNAVVGTALIKKYPKLESEFVYGDYKVYDVRKMIAKSEQEIGKATAKYFFYSNIMNFFKTEITLANGEIRKRPLIETNGETGEIVWDKGRDFATVRKVLSMPQVNIVKKTEVQTGGFSKESILPKRNSDKLIARKKDWDPKKYGGFDSPTVAYSVLVVAKVEKGKSKKLKSVKELLGITIMERSSFEKNPIDFLEAKGYKEVKKDLIIKLPKYSLFELENGRKRMLASAGELQKGNELALPSKYVNFLYLASHYEKLKGSPEDNEQKQLFVEQHKHYLDEIIEQISEFSKRVILADANLDKVLSAYNKHRDKPIREQAENIIHLFTLTNLGAPAAFKYFDTTIDRKRYTSTKEVLDATLIHQSITGLYETRIDLSQLGGDGGGGGGSGGGGSGGGGSGGGGSGGGGSGGGGSGGTVSLQDEHRLFDIPVTTSLPDVWLQDFPQAWAETGGLGRAKCQAPIIIDLKPTAVPVSIKQYPMSLEAHMGIRQHIIKFLELGVLRPCRSPWNTPLLPVKKPGTQDYRPVQDLREINKRTVDIHPTVPNPYNLLSTLKPDYSWYTVLDLKDAFFCLPLAPQSQELFAFEWKDPERGISGQLTWTRLPQGFKNSPTLFNEALHRDLTDFRTQHPEVTLLQYVDDLLLAAPTKKACTQGTRHLLQELGEKGYRASAKKAQICQTKVTYLGYILSEGKRWLTPGRIETVARIPPPRNPREVREFLGKAGFCRLFIPGFAELAAPLYALTKPSTPFTWQTEHQLAFEALKKALLSAPALGLPDTSKPFTLFLDERQGIAKGVLTQKLGPWKRPVAYLSKKLDPVAAGWPPCLRIMAATAMLVKDSAKLTLGQPLTVITPHTLEAIVRQPPDRWITNARLTHYQALLLDTDRVQFGPPVTLNPATLLPVPENQPSPHDCRQVLAETHGTREDLKDQELPDADHTWYTDGSSYLDSGTRRAGAAVVDGHNTIWAQSLPPGTSAQKAELIALTKALELSKGKKANIYTDSRYAFATAHTHGSIYERRGWLTSEGKEIKNKAEIIALLKALFLPQEVAIIHCPGHQKGQDPVAVGNRQADRVARQAAMAEVLTLATEPDNTSHITAGKRTADGSEFEKRTADGSEFESPKKKAKVE

SEQ ID NO: 1937 - protein, 2102 aa, synthetic construct
MPAAKRVKLDGGDKKYSIGLDIGTNSVGWAVITDEYKVPSKKFKVLGNTDRHSIKKNLIGALLFDSGETAEATRLKRTARRRYTRRKNRICYLQEIFSNEMAKVDDSFFHRLEESFLVEEDKKHERHPIFGNIVDEVAYHEKYPTIYHLRKKLVDSTDKADLRLIYLALAHMIKFRGHFLIEGDLNPDNSDVDKLFIQLVQTYNQLFEENPINASGVDAKAILSARLSKSRRLENLIAQLPGEKKNGLFGNLIALSLGLTPNFKSNFDLAEDAKLQLSKDTYDDDLDNLLAQIGDQYADLFLAAKNLSDAILLSDILRVNTEITKAPLSASMIKRYDEHHQDLTLLKALVRQQLPEKYKEIFFDQSKNGYAGYIDGGASQEEFYKFIKPILEKMDGTEELLVKLNREDLLRKQRTFDNGSIPHQIHLGELHAILRRQEDFYPFLKDNREKIEKILTFRIPYYVGPLARGNSRFAWMTRKSEETITPWNFEEVVDKGASAQSFIERMTNFDKNLPNEKVLPKHSLLYEYFTVYNELTKVKYVTEGMRKPAFLSGEQKKAIVDLLFKTNRKVTVKQLKEDYFKKIECFDSVEISGVEDRFNASLGTYHDLLKIIKDKDFLDNEENEDILEDIVLTLTLFEDREMIEERLKTYAHLFDDKVMKQLKRRRYTGWGRLSRKLINGIRDKQSGKTILDFLKSDGFANRNFMQLIHDDSLTFKEDIQKAQVSGQGDSLHEHIANLAGSPAIKKGILQTVKVVDELVKVMGRHKPENIVIEMARENQTTQKGQKNSRERMKRIEEGIKELGSQILKEHPVENTQLQNEKLYLYYLQNGRDMYVDQELDINRLSDYDVDHIVPQSFLKDDSIDNKVLTRSDKARGKSDNVPSEEVVKKMKNYWRQLLNAKLITQRKFDNLTKAERGGLSELDKAGFIKRQLVETRQITKHVAQILDSRMNTKYDENDKLIREVKVITLKSKLVSDFRKDFQFYKVREINNYHHAHDAYLNAVVGTALIKKYPKLESEFVYGDYKVYDVRKMIAKSEQEIGKATAKYFFYSNIMNFFKTEITLANGEIRKRPLIETNGETGEIVWDKGRDFATVRKVLSMPQVNIVKKTEVQTGGFSKESILPKRNSDKLIARKKDWDPKKYGGFDSPTVAYSVLVVAKVEKGKSKKLKSVKELLGITIMERSSFEKNPIDFLEAKGYKEVKKDLIIKLPKYSLFELENGRKRMLASAGELQKGNELALPSKYVNFLYLASHYEKLKGSPEDNEQKQLFVEQHKHYLDEIIEQISEFSKRVILADANLDKVLSAYNKHRDKPIREQAENIIHLFTLTNLGAPAAFKYFDTTIDRKRYTSTKEVLDATLIHQSITGLYETRIDLSQLGGDGGGGGGGSEAAAKGGTVSLQDEHRLFDIPVTTSLPDVWLQDFPQAWAETGGLGRAKCQAPIIIDLKPTAVPVSIKQYPMSLEAHMGIRQHIIKFLELGVLRPCRSPWNTPLLPVKKPGTQDYRPVQDLREINKRTVDIHPTVPNPYNLLSTLKPDYSWYTVLDLKDAFFCLPLAPQSQELFAFEWKDPERGISGQLTWTRLPQGFKNSPTLFNEALHRDLTDFRTQHPEVTLLQYVDDLLLAAPTKKACTQGTRHLLQELGEKGYRASAKKAQICQTKVTYLGYILSEGKRWLTPGRIETVARIPPPRNPREVREFLGKAGFCRLFIPGFAELAAPLYALTKPSTPFTWQTEHQLAFEALKKALLSAPALGLPDTSKPFTLFLDERQGIAKGVLTQKLGPWKRPVAYLSKKLDPVAAGWPPCLRIMAATAMLVKDSAKLTLGQPLTVITPHTLEAIVRQPPDRWITNARLTHYQALLLDTDRVQFGPPVTLNPATLLPVPENQPSPHDCRQVLAETHGTREDLKDQELPDADHTWYTDGSSYLDSGTRRAGAAVVDGHNTIWAQSLPPGTSAQKAELIALTKALELSKGKKANIYTDSRYAFATAHTHGSIYERRGWLTSEGKEIKNKAEIIALLKALFLPQEVAIIHCPGHQKGQDPVAVGNRQADRVARQAAMAEVLTLATEPDNTSHITAGKRTADGSEFEKRTADGSEFESPKKKAKVE

SEQ ID NO: 1938 - protein, 2102 aa, synthetic construct
MPAAKRVKLDGGDKKYSIGLDIGTNSVGWAVITDEYKVPSKKFKVLGNTDRHSIKKNLIGALLFDSGETAEATRLKRTARRRYTRRKNRICYLQEIFSNEMAKVDDSFFHRLEESFLVEEDKKHERHPIFGNIVDEVAYHEKYPTIYHLRKKLVDSTDKADLRLIYLALAHMIKFRGHFLIEGDLNPDNSDVDKLFIQLVQTYNQLFEENPINASGVDAKAILSARLSKSRRLENLIAQLPGEKKNGLFGNLIALSLGLTPNFKSNFDLAEDAKLQLSKDTYDDDLDNLLAQIGDQYADLFLAAKNLSDAILLSDILRVNTEITKAPLSASMIKRYDEHHQDLTLLKALVRQQLPEKYKEIFFDQSKNGYAGYIDGGASQEEFYKFIKPILEKMDGTEELLVKLNREDLLRKQRTFDNGSIPHQIHLGELHAILRRQEDFYPFLKDNREKIEKILTFRIPYYVGPLARGNSRFAWMTRKSEETITPWNFEEVVDKGASAQSFIERMTNFDKNLPNEKVLPKHSLLYEYFTVYNELTKVKYVTEGMRKPAFLSGEQKKAIVDLLFKTNRKVTVKQLKEDYFKKIECFDSVEISGVEDRFNASLGTYHDLLKIIKDKDFLDNEENEDILEDIVLTLTLFEDREMIEERLKTYAHLFDDKVMKQLKRRRYTGWGRLSRKLINGIRDKQSGKTILDFLKSDGFANRNFMQLIHDDSLTFKEDIQKAQVSGQGDSLHEHIANLAGSPAIKKGILQTVKVVDELVKVMGRHKPENIVIEMARENQTTQKGQKNSRERMKRIEEGIKELGSQILKEHPVENTQLQNEKLYLYYLQNGRDMYVDQELDINRLSDYDVDHIVPQSFLKDDSIDNKVLTRSDKARGKSDNVPSEEVVKKMKNYWRQLLNAKLITQRKFDNLTKAERGGLSELDKAGFIKRQLVETRQITKHVAQILDSRMNTKYDENDKLIREVKVITLKSKLVSDFRKDFQFYKVREINNYHHAHDAYLNAVVGTALIKKYPKLESEFVYGDYKVYDVRKMIAKSEQEIGKATAKYFFYSNIMNFFKTEITLANGEIRKRPLIETNGETGEIVWDKGRDFATVRKVLSMPQVNIVKKTEVQTGGFSKESILPKRNSDKLIARKKDWDPKKYGGFDSPTVAYSVLVVAKVEKGKSKKLKSVKELLGITIMERSSFEKNPIDFLEAKGYKEVKKDLIIKLPKYSLFELENGRKRMLASAGELQKGNELALPSKYVNFLYLASHYEKLKGSPEDNEQKQLFVEQHKHYLDEIIEQISEFSKRVILADANLDKVLSAYNKHRDKPIREQAENIIHLFTLTNLGAPAAFKYFDTTIDRKRYTSTKEVLDATLIHQSITGLYETRIDLSQLGGDGGGGGPAPEAAAKGGTVSLQDEHRLFDIPVTTSLPDVWLQDFPQAWAETGGLGRAKCQAPIIIDLKPTAVPVSIKQYPMSLEAHMGIRQHIIKFLELGVLRPCRSPWNTPLLPVKKPGTQDYRPVQDLREINKRTVDIHPTVPNPYNLLSTLKPDYSWYTVLDLKDAFFCLPLAPQSQELFAFEWKDPERGISGQLTWTRLPQGFKNSPTLFNEALHRDLTDFRTQHPEVTLLQYVDDLLLAAPTKKACTQGTRHLLQELGEKGYRASAKKAQICQTKVTYLGYILSEGKRWLTPGRIETVARIPPPRNPREVREFLGKAGFCRLFIPGFAELAAPLYALTKPSTPFTWQTEHQLAFEALKKALLSAPALGLPDTSKPFTLFLDERQGIAKGVLTQKLGPWKRPVAYLSKKLDPVAAGWPPCLRIMAATAMLVKDSAKLTLGQPLTVITPHTLEAIVRQPPDRWITNARLTHYQALLLDTDRVQFGPPVTLNPATLLPVPENQPSPHDCRQVLAETHGTREDLKDQELPDADHTWYTDGSSYLDSGTRRAGAAVVDGHNTIWAQSLPPGTSAQKAELIALTKALELSKGKKANIYTDSRYAFATAHTHGSIYERRGWLTSEGKEIKNKAEIIALLKALFLPQEVAIIHCPGHQKGQDPVAVGNRQADRVARQAAMAEVLTLATEPDNTSHITAGKRTADGSEFEKRTADGSEFESPKKKAKVE

SEQ ID NO: 1939 - protein, 2102 aa, synthetic construct
MPAAKRVKLDGGDKKYSIGLDIGTNSVGWAVITDEYKVPSKKFKVLGNTDRHSIKKNLIGALLFDSGETAEATRLKRTARRRYTRRKNRICYLQEIFSNEMAKVDDSFFHRLEESFLVEEDKKHERHPIFGNIVDEVAYHEKYPTIYHLRKKLVDSTDKADLRLIYLALAHMIKFRGHFLIEGDLNPDNSDVDKLFIQLVQTYNQLFEENPINASGVDAKAILSARLSKSRRLENLIAQLPGEKKNGLFGNLIALSLGLTPNFKSNFDLAEDAKLQLSKDTYDDDLDNLLAQIGDQYADLFLAAKNLSDAILLSDILRVNTEITKAPLSASMIKRYDEHHQDLTLLKALVRQQLPEKYKEIFFDQSKNGYAGYIDGGASQEEFYKFIKPILEKMDGTEELLVKLNREDLLRKQRTFDNGSIPHQIHLGELHAILRRQEDFYPFLKDNREKIEKILTFRIPYYVGPLARGNSRFAWMTRKSEETITPWNFEEVVDKGASAQSFIERMTNFDKNLPNEKVLPKHSLLYEYFTVYNELTKVKYVTEGMRKPAFLSGEQKKAIVDLLFKTNRKVTVKQLKEDYFKKIECFDSVEISGVEDRFNASLGTYHDLLKIIKDKDFLDNEENEDILEDIVLTLTLFEDREMIEERLKTYAHLFDDKVMKQLKRRRYTGWGRLSRKLINGIRDKQSGKTILDFLKSDGFANRNFMQLIHDDSLTFKEDIQKAQVSGQGDSLHEHIANLAGSPAIKKGILQTVKVVDELVKVMGRHKPENIVIEMARENQTTQKGQKNSRERMKRIEEGIKELGSQILKEHPVENTQLQNEKLYLYYLQNGRDMYVDQELDINRLSDYDVDHIVPQSFLKDDSIDNKVLTRSDKARGKSDNVPSEEVVKKMKNYWRQLLNAKLITQRKFDNLTKAERGGLSELDKAGFIKRQLVETRQITKHVAQILDSRMNTKYDENDKLIREVKVITLKSKLVSDFRKDFQFYKVREINNYHHAHDAYLNAVVGTALIKKYPKLESEFVYGDYKVYDVRKMIAKSEQEIGKATAKYFFYSNIMNFFKTEITLANGEIRKRPLIETNGETGEIVWDKGRDFATVRKVLSMPQVNIVKKTEVQTGGFSKESILPKRNSDKLIARKKDWDPKKYGGFDSPTVAYSVLVVAKVEKGKSKKLKSVKELLGITIMERSSFEKNPIDFLEAKGYKEVKKDLIIKLPKYSLFELENGRKRMLASAGELQKGNELALPSKYVNFLYLASHYEKLKGSPEDNEQKQLFVEQHKHYLDEIIEQISEFSKRVILADANLDKVLSAYNKHRDKPIREQAENIIHLFTLTNLGAPAAFKYFDTTIDRKRYTSTKEVLDATLIHQSITGLYETRIDLSQLGGDGGPAPGGSEAAAKGGTVSLQDEHRLFDIPVTTSLPDVWLQDFPQAWAETGGLGRAKCQAPIIIDLKPTAVPVSIKQYPMSLEAHMGIRQHIIKFLELGVLRPCRSPWNTPLLPVKKPGTQDYRPVQDLREINKRTVDIHPTVPNPYNLLSTLKPDYSWYTVLDLKDAFFCLPLAPQSQELFAFEWKDPERGISGQLTWTRLPQGFKNSPTLFNEALHRDLTDFRTQHPEVTLLQYVDDLLLAAPTKKACTQGTRHLLQELGEKGYRASAKKAQICQTKVTYLGYILSEGKRWLTPGRIETVARIPPPRNPREVREFLGKAGFCRLFIPGFAELAAPLYALTKPSTPFTWQTEHQLAFEALKKALLSAPALGLPDTSKPFTLFLDERQGIAKGVLTQKLGPWKRPVAYLSKKLDPVAAGWPPCLRIMAATAMLVKDSAKLTLGQPLTVITPHTLEAIVRQPPDRWITNARLTHYQALLLDTDRVQFGPPVTLNPATLLPVPENQPSPHDCRQVLAETHGTREDLKDQELPDADHTWYTDGSSYLDSGTRRAGAAVVDGHNTIWAQSLPPGTSAQKAELIALTKALELSKGKKANIYTDSRYAFATAHTHGSIYERRGWLTSEGKEIKNKAEIIALLKALFLPQEVAIIHCPGHQKGQDPVAVGNRQADRVARQAAMAEVLTLATEPDNTSHITAGKRTADGSEFEKRTADGSEFESPKKKAKVE

SEQ ID NO: 1940 - protein, 2097 aa, synthetic construct
MPAAKRVKLDGGDKKYSIGLDIGTNSVGWAVITDEYKVPSKKFKVLGNTDRHSIKKNLIGALLFDSGETAEATRLKRTARRRYTRRKNRICYLQEIFSNEMAKVDDSFFHRLEESFLVEEDKKHERHPIFGNIVDEVAYHEKYPTIYHLRKKLVDSTDKADLRLIYLALAHMIKFRGHFLIEGDLNPDNSDVDKLFIQLVQTYNQLFEENPINASGVDAKAILSARLSKSRRLENLIAQLPGEKKNGLFGNLIALSLGLTPNFKSNFDLAEDAKLQLSKDTYDDDLDNLLAQIGDQYADLFLAAKNLSDAILLSDILRVNTEITKAPLSASMIKRYDEHHQDLTLLKALVRQQLPEKYKEIFFDQSKNGYAGYIDGGASQEEFYKFIKPILEKMDGTEELLVKLNREDLLRKQRTFDNGSIPHQIHLGELHAILRRQEDFYPFLKDNREKIEKILTFRIPYYVGPLARGNSRFAWMTRKSEETITPWNFEEVVDKGASAQSFIERMTNFDKNLPNEKVLPKHSLLYEYFTVYNELTKVKYVTEGMRKPAFLSGEQKKAIVDLLFKTNRKVTVKQLKEDYFKKIECFDSVEISGVEDRFNASLGTYHDLLKIIKDKDFLDNEENEDILEDIVLTLTLFEDREMIEERLKTYAHLFDDKVMKQLKRRRYTGWGRLSRKLINGIRDKQSGKTILDFLKSDGFANRNFMQLIHDDSLTFKEDIQKAQVSGQGDSLHEHIANLAGSPAIKKGILQTVKVVDELVKVMGRHKPENIVIEMARENQTTQKGQKNSRERMKRIEEGIKELGSQILKEHPVENTQLQNEKLYLYYLQNGRDMYVDQELDINRLSDYDVDHIVPQSFLKDDSIDNKVLTRSDKARGKSDNVPSEEVVKKMKNYWRQLLNAKLITQRKFDNLTKAERGGLSELDKAGFIKRQLVETRQITKHVAQILDSRMNTKYDENDKLIREVKVITLKSKLVSDFRKDFQFYKVREINNYHHAHDAYLNAVVGTALIKKYPKLESEFVYGDYKVYDVRKMIAKSEQEIGKATAKYFFYSNIMNFFKTEITLANGEIRKRPLIETNGETGEIVWDKGRDFATVRKVLSMPQVNIVKKTEVQTGGFSKESILPKRNSDKLIARKKDWDPKKYGGFDSPTVAYSVLVVAKVEKGKSKKLKSVKELLGITIMERSSFEKNPIDFLEAKGYKEVKKDLIIKLPKYSLFELENGRKRMLASAGELQKGNELALPSKYVNFLYLASHYEKLKGSPEDNEQKQLFVEQHKHYLDEIIEQISEFSKRVILADANLDKVLSAYNKHRDKPIREQAENIIHLFTLTNLGAPAAFKYFDTTIDRKRYTSTKEVLDATLIHQSITGLYETRIDLSQLGGDGGGGSGGGGGTVSLQDEHRLFDIPVTTSLPDVWLQDFPQAWAETGGLGRAKCQAPIIIDLKPTAVPVSIKQYPMSLEAHMGIRQHIIKFLELGVLRPCRSPWNTPLLPVKKPGTQDYRPVQDLREINKRTVDIHPTVPNPYNLLSTLKPDYSWYTVLDLKDAFFCLPLAPQSQELFAFEWKDPERGISGQLTWTRLPQGFKNSPTLFNEALHRDLTDFRTQHPEVTLLQYVDDLLLAAPTKKACTQGTRHLLQELGEKGYRASAKKAQICQTKVTYLGYILSEGKRWLTPGRIETVARIPPPRNPREVREFLGKAGFCRLFIPGFAELAAPLYALTKPSTPFTWQTEHQLAFEALKKALLSAPALGLPDTSKPFTLFLDERQGIAKGVLTQKLGPWKRPVAYLSKKLDPVAAGWPPCLRIMAATAMLVKDSAKLTLGQPLTVITPHTLEAIVRQPPDRWITNARLTHYQALLLDTDRVQFGPPVTLNPATLLPVPENQPSPHDCRQVLAETHGTREDLKDQELPDADHTWYTDGSSYLDSGTRRAGAAVVDGHNTIWAQSLPPGTSAQKAELIALTKALELSKGKKANIYTDSRYAFATAHTHGSIYERRGWLTSEGKEIKNKAEIIALLKALFLPQEVAIIHCPGHQKGQDPVAVGNRQADRVARQAAMAEVLTLATEPDNTSHITAGKRTADGSEFEKRTADGSEFESPKKKAKVE

SEQ ID NO: 1941 - protein, 2111 aa, synthetic construct
MPAAKRVKLDGGDKKYSIGLDIGTNSVGWAVITDEYKVPSKKFKVLGNTDRHSIKKNLIGALLFDSGETAEATRLKRTARRRYTRRKNRICYLQEIFSNEMAKVDDSFFHRLEESFLVEEDKKHERHPIFGNIVDEVAYHEKYPTIYHLRKKLVDSTDKADLRLIYLALAHMIKFRGHFLIEGDLNPDNSDVDKLFIQLVQTYNQLFEENPINASGVDAKAILSARLSKSRRLENLIAQLPGEKKNGLFGNLIALSLGLTPNFKSNFDLAEDAKLQLSKDTYDDDLDNLLAQIGDQYADLFLAAKNLSDAILLSDILRVNTEITKAPLSASMIKRYDEHHQDLTLLKALVRQQLPEKYKEIFFDQSKNGYAGYIDGGASQEEFYKFIKPILEKMDGTEELLVKLNREDLLRKQRTFDNGSIPHQIHLGELHAILRRQEDFYPFLKDNREKIEKILTFRIPYYVGPLARGNSRFAWMTRKSEETITPWNFEEVVDKGASAQSFIERMTNFDKNLPNEKVLPKHSLLYEYFTVYNELTKVKYVTEGMRKPAFLSGEQKKAIVDLLFKTNRKVTVKQLKEDYFKKIECFDSVEISGVEDRFNASLGTYHDLLKIIKDKDFLDNEENEDILEDIVLTLTLFEDREMIEERLKTYAHLFDDKVMKQLKRRRYTGWGRLSRKLINGIRDKQSGKTILDFLKSDGFANRNFMQLIHDDSLTFKEDIQKAQVSGQGDSLHEHIANLAGSPAIKKGILQTVKVVDELVKVMGRHKPENIVIEMARENQTTQKGQKNSRERMKRIEEGIKELGSQILKEHPVENTQLQNEKLYLYYLQNGRDMYVDQELDINRLSDYDVDHIVPQSFLKDDSIDNKVLTRSDKARGKSDNVPSEEVVKKMKNYWRQLLNAKLITQRKFDNLTKAERGGLSELDKAGFIKRQLVETRQITKHVAQILDSRMNTKYDENDKLIREVKVITLKSKLVSDFRKDFQFYKVREINNYHHAHDAYLNAVVGTALIKKYPKLESEFVYGDYKVYDVRKMIAKSEQEIGKATAKYFFYSNIMNFFKTEITLANGEIRKRPLIETNGETGEIVWDKGRDFATVRKVLSMPQVNIVKKTEVQTGGFSKESILPKRNSDKLIARKKDWDPKKYGGFDSPTVAYSVLVVAKVEKGKSKKLKSVKELLGITIMERSSFEKNPIDFLEAKGYKEVKKDLIIKLPKYSLFELENGRKRMLASAGELQKGNELALPSKYVNFLYLASHYEKLKGSPEDNEQKQLFVEQHKHYLDEIIEQISEFSKRVILADANLDKVLSAYNKHRDKPIREQAENIIHLFTLTNLGAPAAFKYFDTTIDRKRYTSTKEVLDATLIHQSITGLYETRIDLSQLGGDGGEAAAKEAAAKEAAAKEAAAKGGTVSLQDEHRLFDIPVTTSLPDVWLQDFPQAWAETGGLGRAKCQAPIIIDLKPTAVPVSIKQYPMSLEAHMGIRQHIIKFLELGVLRPCRSPWNTPLLPVKKPGTQDYRPVQDLREINKRTVDIHPTVPNPYNLLSTLKPDYSWYTVLDLKDAFFCLPLAPQSQELFAFEWKDPERGISGQLTWTRLPQGFKNSPTLFNEALHRDLTDFRTQHPEVTLLQYVDDLLLAAPTKKACTQGTRHLLQELGEKGYRASAKKAQICQTKVTYLGYILSEGKRWLTPGRIETVARIPPPRNPREVREFLGKAGFCRLFIPGFAELAAPLYALTKPSTPFTWQTEHQLAFEALKKALLSAPALGLPDTSKPFTLFLDERQGIAKGVLTQKLGPWKRPVAYLSKKLDPVAAGWPPCLRIMAATAMLVKDSAKLTLGQPLTVITPHTLEAIVRQPPDRWITNARLTHYQALLLDTDRVQFGPPVTLNPATLLPVPENQPSPHDCRQVLAETHGTREDLKDQELPDADHTWYTDGSSYLDSGTRRAGAAVVDGHNTIWAQSLPPGTSAQKAELIALTKALELSKGKKANIYTDSRYAFATAHTHGSIYERRGWLTSEGKEIKNKAEIIALLKALFLPQEVAIIHCPGHQKGQDPVAVGNRQADRVARQAAMAEVLTLATEPDNTSHITAGKRTADGSEFEKRTADGSEFESPKKKAKVE

SEQ ID NO: 1942 - protein, 2100 aa, synthetic construct
MPAAKRVKLDGGDKKYSIGLDIGTNSVGWAVITDEYKVPSKKFKVLGNTDRHSIKKNLIGALLFDSGETAEATRLKRTARRRYTRRKNRICYLQEIFSNEMAKVDDSFFHRLEESFLVEEDKKHERHPIFGNIVDEVAYHEKYPTIYHLRKKLVDSTDKADLRLIYLALAHMIKFRGHFLIEGDLNPDNSDVDKLFIQLVQTYNQLFEENPINASGVDAKAILSARLSKSRRLENLIAQLPGEKKNGLFGNLIALSLGLTPNFKSNFDLAEDAKLQLSKDTYDDDLDNLLAQIGDQYADLFLAAKNLSDAILLSDILRVNTEITKAPLSASMIKRYDEHHQDLTLLKALVRQQLPEKYKEIFFDQSKNGYAGYIDGGASQEEFYKFIKPILEKMDGTEELLVKLNREDLLRKQRTFDNGSIPHQIHLGELHAILRRQEDFYPFLKDNREKIEKILTFRIPYYVGPLARGNSRFAWMTRKSEETITPWNFEEVVDKGASAQSFIERMTNFDKNLPNEKVLPKHSLLYEYFTVYNELTKVKYVTEGMRKPAFLSGEQKKAIVDLLFKTNRKVTVKQLKEDYFKKIECFDSVEISGVEDRFNASLGTYHDLLKIIKDKDFLDNEENEDILEDIVLTLTLFEDREMIEERLKTYAHLFDDKVMKQLKRRRYTGWGRLSRKLINGIRDKQSGKTILDFLKSDGFANRNFMQLIHDDSLTFKEDIQKAQVSGQGDSLHEHIANLAGSPAIKKGILQTVKVVDELVKVMGRHKPENIVIEMARENQTTQKGQKNSRERMKRIEEGIKELGSQILKEHPVENTQLQNEKLYLYYLQNGRDMYVDQELDINRLSDYDVDHIVPQSFLKDDSIDNKVLTRSDKARGKSDNVPSEEVVKKMKNYWRQLLNAKLITQRKFDNLTKAERGGLSELDKAGFIKRQLVETRQITKHVAQILDSRMNTKYDENDKLIREVKVITLKSKLVSDFRKDFQFYKVREINNYHHAHDAYLNAVVGTALIKKYPKLESEFVYGDYKVYDVRKMIAKSEQEIGKATAKYFFYSNIMNFFKTEITLANGEIRKRPLIETNGETGEIVWDKGRDFATVRKVLSMPQVNIVKKTEVQTGGFSKESILPKRNSDKLIARKKDWDPKKYGGFDSPTVAYSVLVVAKVEKGKSKKLKSVKELLGITIMERSSFEKNPIDFLEAKGYKEVKKDLIIKLPKYSLFELENGRKRMLASAGELQKGNELALPSKYVNFLYLASHYEKLKGSPEDNEQKQLFVEQHKHYLDEIIEQISEFSKRVILADANLDKVLSAYNKHRDKPIREQAENIIHLFTLTNLGAPAAFKYFDTTIDRKRYTSTKEVLDATLIHQSITGLYETRIDLSQLGGDGGGGSGGGPAPGGTVSLQDEHRLFDIPVTTSLPDVWLQDFPQAWAETGGLGRAKCQAPIIIDLKPTAVPVSIKQYPMSLEAHMGIRQHIIKFLELGVLRPCRSPWNTPLLPVKKPGTQDYRPVQDLREINKRTVDIHPTVPNPYNLLSTLKPDYSWYTVLDLKDAFFCLPLAPQSQELFAFEWKDPERGISGQLTWTRLPQGFKNSPTLFNEALHRDLTDFRTQHPEVTLLQYVDDLLLAAPTKKACTQGTRHLLQELGEKGYRASAKKAQICQTKVTYLGYILSEGKRWLTPGRIETVARIPPPRNPREVREFLGKAGFCRLFIPGFAELAAPLYALTKPSTPFTWQTEHQLAFEALKKALLSAPALGLPDTSKPFTLFLDERQGIAKGVLTQKLGPWKRPVAYLSKKLDPVAAGWPPCLRIMAATAMLVKDSAKLTLGQPLTVITPHTLEAIVRQPPDRWITNARLTHYQALLLDTDRVQFGPPVTLNPATLLPVPENQPSPHDCRQVLAETHGTREDLKDQELPDADHTWYTDGSSYLDSGTRRAGAAVVDGHNTIWAQSLPPGTSAQKAELIALTKALELSKGKKANIYTDSRYAFATAHTHGSIYERRGWLTSEGKEIKNKAEIIALLKALFLPQEVAIIHCPGHQKGQDPVAVGNRQADRVARQAAMAEVLTLATEPDNTSHITAGKRTADGSEFEKRTADGSEFESPKKKAKVE

SEQ ID NO: 1943 - protein, 2102 aa, synthetic construct
MPAAKRVKLDGGDKKYSIGLDIGTNSVGWAVITDEYKVPSKKFKVLGNTDRHSIKKNLIGALLFDSGETAEATRLKRTARRRYTRRKNRICYLQEIFSNEMAKVDDSFFHRLEESFLVEEDKKHERHPIFGNIVDEVAYHEKYPTIYHLRKKLVDSTDKADLRLIYLALAHMIKFRGHFLIEGDLNPDNSDVDKLFIQLVQTYNQLFEENPINASGVDAKAILSARLSKSRRLENLIAQLPGEKKNGLFGNLIALSLGLTPNFKSNFDLAEDAKLQLSKDTYDDDLDNLLAQIGDQYADLFLAAKNLSDAILLSDILRVNTEITKAPLSASMIKRYDEHHQDLTLLKALVRQQLPEKYKEIFFDQSKNGYAGYIDGGASQEEFYKFIKPILEKMDGTEELLVKLNREDLLRKQRTFDNGSIPHQIHLGELHAILRRQEDFYPFLKDNREKIEKILTFRIPYYVGPLARGNSRFAWMTRKSEETITPWNFEEVVDKGASAQSFIERMTNFDKNLPNEKVLPKHSLLYEYFTVYNELTKVKYVTEGMRKPAFLSGEQKKAIVDLLFKTNRKVTVKQLKEDYFKKIECFDSVEISGVEDRFNASLGTYHDLLKIIKDKDFLDNEENEDILEDIVLTLTLFEDREMIEERLKTYAHLFDDKVMKQLKRRRYTGWGRLSRKLINGIRDKQSGKTILDFLKSDGFANRNFMQLIHDDSLTFKEDIQKAQVSGQGDSLHEHIANLAGSPAIKKGILQTVKVVDELVKVMGRHKPENIVIEMARENQTTQKGQKNSRERMKRIEEGIKELGSQILKEHPVENTQLQNEKLYLYYLQNGRDMYVDQELDINRLSDYDVDHIVPQSFLKDDSIDNKVLTRSDKARGKSDNVPSEEVVKKMKNYWRQLLNAKLITQRKFDNLTKAERGGLSELDKAGFIKRQLVETRQITKHVAQILDSRMNTKYDENDKLIREVKVITLKSKLVSDFRKDFQFYKVREINNYHHAHDAYLNAVVGTALIKKYPKLESEFVYGDYKVYDVRKMIAKSEQEIGKATAKYFFYSNIMNFFKTEITLANGEIRKRPLIETNGETGEIVWDKGRDFATVRKVLSMPQVNIVKKTEVQTGGFSKESILPKRNSDKLIARKKDWDPKKYGGFDSPTVAYSVLVVAKVEKGKSKKLKSVKELLGITIMERSSFEKNPIDFLEAKGYKEVKKDLIIKLPKYSLFELENGRKRMLASAGELQKGNELALPSKYVNFLYLASHYEKLKGSPEDNEQKQLFVEQHKHYLDEIIEQISEFSKRVILADANLDKVLSAYNKHRDKPIREQAENIIHLFTLTNLGAPAAFKYFDTTIDRKRYTSTKEVLDATLIHQSITGLYETRIDLSQLGGDGGGGGEAAAKGGSGGTVSLQDEHRLFDIPVTTSLPDVWLQDFPQAWAETGGLGRAKCQAPIIIDLKPTAVPVSIKQYPMSLEAHMGIRQHIIKFLELGVLRPCRSPWNTPLLPVKKPGTQDYRPVQDLREINKRTVDIHPTVPNPYNLLSTLKPDYSWYTVLDLKDAFFCLPLAPQSQELFAFEWKDPERGISGQLTWTRLPQGFKNSPTLFNEALHRDLTDFRTQHPEVTLLQYVDDLLLAAPTKKACTQGTRHLLQELGEKGYRASAKKAQICQTKVTYLGYILSEGKRWLTPGRIETVARIPPPRNPREVREFLGKAGFCRLFIPGFAELAAPLYALTKPSTPFTWQTEHQLAFEALKKALLSAPALGLPDTSKPFTLFLDERQGIAKGVLTQKLGPWKRPVAYLSKKLDPVAAGWPPCLRIMAATAMLVKDSAKLTLGQPLTVITPHTLEAIVRQPPDRWITNARLTHYQALLLDTDRVQFGPPVTLNPATLLPVPENQPSPHDCRQVLAETHGTREDLKDQELPDADHTWYTDGSSYLDSGTRRAGAAVVDGHNTIWAQSLPPGTSAQKAELIALTKALELSKGKKANIYTDSRYAFATAHTHGSIYERRGWLTSEGKEIKNKAEIIALLKALFLPQEVAIIHCPGHQKGQDPVAVGNRQADRVARQAAMAEVLTLATEPDNTSHITAGKRTADGSEFEKRTADGSEFESPKKKAKVE

SEQ ID NO: 1944 - protein, 2116 aa, synthetic construct
MPAAKRVKLDGGDKKYSIGLDIGTNSVGWAVITDEYKVPSKKFKVLGNTDRHSIKKNLIGALLFDSGETAEATRLKRTARRRYTRRKNRICYLQEIFSNEMAKVDDSFFHRLEESFLVEEDKKHERHPIFGNIVDEVAYHEKYPTIYHLRKKLVDSTDKADLRLIYLALAHMIKFRGHFLIEGDLNPDNSDVDKLFIQLVQTYNQLFEENPINASGVDAKAILSARLSKSRRLENLIAQLPGEKKNGLFGNLIALSLGLTPNFKSNFDLAEDAKLQLSKDTYDDDLDNLLAQIGDQYADLFLAAKNLSDAILLSDILRVNTEITKAPLSASMIKRYDEHHQDLTLLKALVRQQLPEKYKEIFFDQSKNGYAGYIDGGASQEEFYKFIKPILEKMDGTEELLVKLNREDLLRKQRTFDNGSIPHQIHLGELHAILRRQEDFYPFLKDNREKIEKILTFRIPYYVGPLARGNSRFAWMTRKSEETITPWNFEEVVDKGASAQSFIERMTNFDKNLPNEKVLPKHSLLYEYFTVYNELTKVKYVTEGMRKPAFLSGEQKKAIVDLLFKTNRKVTVKQLKEDYFKKIECFDSVEISGVEDRFNASLGTYHDLLKIIKDKDFLDNEENEDILEDIVLTLTLFEDREMIEERLKTYAHLFDDKVMKQLKRRRYTGWGRLSRKLINGIRDKQSGKTILDFLKSDGFANRNFMQLIHDDSLTFKEDIQKAQVSGQGDSLHEHIANLAGSPAIKKGILQTVKVVDELVKVMGRHKPENIVIEMARENQTTQKGQKNSRERMKRIEEGIKELGSQILKEHPVENTQLQNEKLYLYYLQNGRDMYVDQELDINRLSDYDVDHIVPQSFLKDDSIDNKVLTRSDKARGKSDNVPSEEVVKKMKNYWRQLLNAKLITQRKFDNLTKAERGGLSELDKAGFIKRQLVETRQITKHVAQILDSRMNTKYDENDKLIREVKVITLKSKLVSDFRKDFQFYKVREINNYHHAHDAYLNAVVGTALIKKYPKLESEFVYGDYKVYDVRKMIAKSEQEIGKATAKYFFYSNIMNFFKTEITLANGEIRKRPLIETNGETGEIVWDKGRDFATVRKVLSMPQVNIVKKTEVQTGGFSKESILPKRNSDKLIARKKDWDPKKYGGFDSPTVAYSVLVVAKVEKGKSKKLKSVKELLGITIMERSSFEKNPIDFLEAKGYKEVKKDLIIKLPKYSLFELENGRKRMLASAGELQKGNELALPSKYVNFLYLASHYEKLKGSPEDNEQKQLFVEQHKHYLDEIIEQISEFSKRVILADANLDKVLSAYNKHRDKPIREQAENIIHLFTLTNLGAPAAFKYFDTTIDRKRYTSTKEVLDATLIHQSITGLYETRIDLSQLGGDGGGGGGSGGGGSGGGGSGGGGSGGGGSGGTVSLQDEHRLFDIPVTTSLPDVWLQDFPQAWAETGGLGRAKCQAPIIIDLKPTAVPVSIKQYPMSLEAHMGIRQHIIKFLELGVLRPCRSPWNTPLLPVKKPGTQDYRPVQDLREINKRTVDIHPTVPNPYNLLSTLKPDYSWYTVLDLKDAFFCLPLAPQSQELFAFEWKDPERGISGQLTWTRLPQGFKNSPTLFNEALHRDLTDFRTQHPEVTLLQYVDDLLLAAPTKKACTQGTRHLLQELGEKGYRASAKKAQICQTKVTYLGYILSEGKRWLTPGRIETVARIPPPRNPREVREFLGKAGFCRLFIPGFAELAAPLYALTKPSTPFTWQTEHQLAFEALKKALLSAPALGLPDTSKPFTLFLDERQGIAKGVLTQKLGPWKRPVAYLSKKLDPVAAGWPPCLRIMAATAMLVKDSAKLTLGQPLTVITPHTLEAIVRQPPDRWITNARLTHYQALLLDTDRVQFGPPVTLNPATLLPVPENQPSPHDCRQVLAETHGTREDLKDQELPDADHTWYTDGSSYLDSGTRRAGAAVVDGHNTIWAQSLPPGTSAQKAELIALTKALELSKGKKANIYTDSRYAFATAHTHGSIYERRGWLTSEGKEIKNKAEIIALLKALFLPQEVAIIHCPGHQKGQDPVAVGNRQADRVARQAAMAEVLTLATEPDNTSHITAGKRTADGSEFEKRTADGSEFESPKKKAKVE

SEQ ID NO: 1945 - protein, 2096 aa, synthetic construct
MPAAKRVKLDGGDKKYSIGLDIGTNSVGWAVITDEYKVPSKKFKVLGNTDRHSIKKNLIGALLFDSGETAEATRLKRTARRRYTRRKNRICYLQEIFSNEMAKVDDSFFHRLEESFLVEEDKKHERHPIFGNIVDEVAYHEKYPTIYHLRKKLVDSTDKADLRLIYLALAHMIKFRGHFLIEGDLNPDNSDVDKLFIQLVQTYNQLFEENPINASGVDAKAILSARLSKSRRLENLIAQLPGEKKNGLFGNLIALSLGLTPNFKSNFDLAEDAKLQLSKDTYDDDLDNLLAQIGDQYADLFLAAKNLSDAILLSDILRVNTEITKAPLSASMIKRYDEHHQDLTLLKALVRQQLPEKYKEIFFDQSKNGYAGYIDGGASQEEFYKFIKPILEKMDGTEELLVKLNREDLLRKQRTFDNGSIPHQIHLGELHAILRRQEDFYPFLKDNREKIEKILTFRIPYYVGPLARGNSRFAWMTRKSEETITPWNFEEVVDKGASAQSFIERMTNFDKNLPNEKVLPKHSLLYEYFTVYNELTKVKYVTEGMRKPAFLSGEQKKAIVDLLFKTNRKVTVKQLKEDYFKKIECFDSVEISGVEDRFNASLGTYHDLLKIIKDKDFLDNEENEDILEDIVLTLTLFEDREMIEERLKTYAHLFDDKVMKQLKRRRYTGWGRLSRKLINGIRDKQSGKTILDFLKSDGFANRNFMQLIHDDSLTFKEDIQKAQVSGQGDSLHEHIANLAGSPAIKKGILQTVKVVDELVKVMGRHKPENIVIEMARENQTTQKGQKNSRERMKRIEEGIKELGSQILKEHPVENTQLQNEKLYLYYLQNGRDMYVDQELDINRLSDYDVDHIVPQSFLKDDSIDNKVLTRSDKARGKSDNVPSEEVVKKMKNYWRQLLNAKLITQRKFDNLTKAERGGLSELDKAGFIKRQLVETRQITKHVAQILDSRMNTKYDENDKLIREVKVITLKSKLVSDFRKDFQFYKVREINNYHHAHDAYLNAVVGTALIKKYPKLESEFVYGDYKVYDVRKMIAKSEQEIGKATAKYFFYSNIMNFFKTEITLANGEIRKRPLIETNGETGEIVWDKGRDFATVRKVLSMPQVNIVKKTEVQTGGFSKESILPKRNSDKLIARKKDWDPKKYGGFDSPTVAYSVLVVAKVEKGKSKKLKSVKELLGITIMERSSFEKNPIDFLEAKGYKEVKKDLIIKLPKYSLFELENGRKRMLASAGELQKGNELALPSKYVNFLYLASHYEKLKGSPEDNEQKQLFVEQHKHYLDEIIEQISEFSKRVILADANLDKVLSAYNKHRDKPIREQAENIIHLFTLTNLGAPAAFKYFDTTIDRKRYTSTKEVLDATLIHQSITGLYETRIDLSQLGGDGGPAPAPGGTVSLQDEHRLFDIPVTTSLPDVWLQDFPQAWAETGGLGRAKCQAPIIIDLKPTAVPVSIKQYPMSLEAHMGIRQHIIKFLELGVLRPCRSPWNTPLLPVKKPGTQDYRPVQDLREINKRTVDIHPTVPNPYNLLSTLKPDYSWYTVLDLKDAFFCLPLAPQSQELFAFEWKDPERGISGQLTWTRLPQGFKNSPTLFNEALHRDLTDFRTQHPEVTLLQYVDDLLLAAPTKKACTQGTRHLLQELGEKGYRASAKKAQICQTKVTYLGYILSEGKRWLTPGRIETVARIPPPRNPREVREFLGKAGFCRLFIPGFAELAAPLYALTKPSTPFTWQTEHQLAFEALKKALLSAPALGLPDTSKPFTLFLDERQGIAKGVLTQKLGPWKRPVAYLSKKLDPVAAGWPPCLRIMAATAMLVKDSAKLTLGQPLTVITPHTLEAIVRQPPDRWITNARLTHYQALLLDTDRVQFGPPVTLNPATLLPVPENQPSPHDCRQVLAETHGTREDLKDQELPDADHTWYTDGSSYLDSGTRRAGAAVVDGHNTIWAQSLPPGTSAQKAELIALTKALELSKGKKANIYTDSRYAFATAHTHGSIYERRGWLTSEGKEIKNKAEIIALLKALFLPQEVAIIHCPGHQKGQDPVAVGNRQADRVARQAAMAEVLTLATEPDNTSHITAGKRTADGSEFEKRTADGSEFESPKKKAKVE

SEQ ID NO: 1946 - protein, 2116 aa, synthetic construct
MPAAKRVKLDGGDKKYSIGLDIGTNSVGWAVITDEYKVPSKKFKVLGNTDRHSIKKNLIGALLFDSGETAEATRLKRTARRRYTRRKNRICYLQEIFSNEMAKVDDSFFHRLEESFLVEEDKKHERHPIFGNIVDEVAYHEKYPTIYHLRKKLVDSTDKADLRLIYLALAHMIKFRGHFLIEGDLNPDNSDVDKLFIQLVQTYNQLFEENPINASGVDAKAILSARLSKSRRLENLIAQLPGEKKNGLFGNLIALSLGLTPNFKSNFDLAEDAKLQLSKDTYDDDLDNLLAQIGDQYADLFLAAKNLSDAILLSDILRVNTEITKAPLSASMIKRYDEHHQDLTLLKALVRQQLPEKYKEIFFDQSKNGYAGYIDGGASQEEFYKFIKPILEKMDGTEELLVKLNREDLLRKQRTFDNGSIPHQIHLGELHAILRRQEDFYPFLKDNREKIEKILTFRIPYYVGPLARGNSRFAWMTRKSEETITPWNFEEVVDKGASAQSFIERMTNFDKNLPNEKVLPKHSLLYEYFTVYNELTKVKYVTEGMRKPAFLSGEQKKAIVDLLFKTNRKVTVKQLKEDYFKKIECFDSVEISGVEDRFNASLGTYHDLLKIIKDKDFLDNEENEDILEDIVLTLTLFEDREMIEERLKTYAHLFDDKVMKQLKRRRYTGWGRLSRKLINGIRDKQSGKTILDFLKSDGFANRNFMQLIHDDSLTFKEDIQKAQVSGQGDSLHEHIANLAGSPAIKKGILQTVKVVDELVKVMGRHKPENIVIEMARENQTTQKGQKNSRERMKRIEEGIKELGSQILKEHPVENTQLQNEKLYLYYLQNGRDMYVDQELDINRLSDYDVDHIVPQSFLKDDSIDNKVLTRSDKARGKSDNVPSEEVVKKMKNYWRQLLNAKLITQRKFDNLTKAERGGLSELDKAGFIKRQLVETRQITKHVAQILDSRMNTKYDENDKLIREVKVITLKSKLVSDFRKDFQFYKVREINNYHHAHDAYLNAVVGTALIKKYPKLESEFVYGDYKVYDVRKMIAKSEQEIGKATAKYFFYSNIMNFFKTEITLANGEIRKRPLIETNGETGEIVWDKGRDFATVRKVLSMPQVNIVKKTEVQTGGFSKESILPKRNSDKLIARKKDWDPKKYGGFDSPTVAYSVLVVAKVEKGKSKKLKSVKELLGITIMERSSFEKNPIDFLEAKGYKEVKKDLIIKLPKYSLFELENGRKRMLASAGELQKGNELALPSKYVNFLYLASHYEKLKGSPEDNEQKQLFVEQHKHYLDEIIEQISEFSKRVILADANLDKVLSAYNKHRDKPIREQAENIIHLFTLTNLGAPAAFKYFDTTIDRKRYTSTKEVLDATLIHQSITGLYETRIDLSQLGGDGGEAAAKEAAAKEAAAKEAAAKEAAAKGGTVSLQDEHRLFDIPVTTSLPDVWLQDFPQAWAETGGLGRAKCQAPIIIDLKPTAVPVSIKQYPMSLEAHMGIRQHIIKFLELGVLRPCRSPWNTPLLPVKKPGTQDYRPVQDLREINKRTVDIHPTVPNPYNLLSTLKPDYSWYTVLDLKDAFFCLPLAPQSQELFAFEWKDPERGISGQLTWTRLPQGFKNSPTLFNEALHRDLTDFRTQHPEVTLLQYVDDLLLAAPTKKACTQGTRHLLQELGEKGYRASAKKAQICQTKVTYLGYILSEGKRWLTPGRIETVARIPPPRNPREVREFLGKAGFCRLFIPGFAELAAPLYALTKPSTPFTWQTEHQLAFEALKKALLSAPALGLPDTSKPFTLFLDERQGIAKGVLTQKLGPWKRPVAYLSKKLDPVAAGWPPCLRIMAATAMLVKDSAKLTLGQPLTVITPHTLEAIVRQPPDRWITNARLTHYQALLLDTDRVQFGPPVTLNPATLLPVPENQPSPHDCRQVLAETHGTREDLKDQELPDADHTWYTDGSSYLDSGTRRAGAAVVDGHNTIWAQSLPPGTSAQKAELIALTKALELSKGKKANIYTDSRYAFATAHTHGSIYERRGWLTSEGKEIKNKAEIIALLKALFLPQEVAIIHCPGHQKGQDPVAVGNRQADRVARQAAMAEVLTLATEPDNTSHITAGKRTADGSEFEKRTADGSEFESPKKKAKVE

SEQ ID NO: 1947 - protein, 2106 aa, synthetic construct
MPAAKRVKLDGGDKKYSIGLDIGTNSVGWAVITDEYKVPSKKFKVLGNTDRHSIKKNLIGALLFDSGETAEATRLKRTARRRYTRRKNRICYLQEIFSNEMAKVDDSFFHRLEESFLVEEDKKHERHPIFGNIVDEVAYHEKYPTIYHLRKKLVDSTDKADLRLIYLALAHMIKFRGHFLIEGDLNPDNSDVDKLFIQLVQTYNQLFEENPINASGVDAKAILSARLSKSRRLENLIAQLPGEKKNGLFGNLIALSLGLTPNFKSNFDLAEDAKLQLSKDTYDDDLDNLLAQIGDQYADLFLAAKNLSDAILLSDILRVNTEITKAPLSASMIKRYDEHHQDLTLLKALVRQQLPEKYKEIFFDQSKNGYAGYIDGGASQEEFYKFIKPILEKMDGTEELLVKLNREDLLRKQRTFDNGSIPHQIHLGELHAILRRQEDFYPFLKDNREKIEKILTFRIPYYVGPLARGNSRFAWMTRKSEETITPWNFEEVVDKGASAQSFIERMTNFDKNLPNEKVLPKHSLLYEYFTVYNELTKVKYVTEGMRKPAFLSGEQKKAIVDLLFKTNRKVTVKQLKEDYFKKIECFDSVEISGVEDRFNASLGTYHDLLKIIKDKDFLDNEENEDILEDIVLTLTLFEDREMIEERLKTYAHLFDDKVMKQLKRRRYTGWGRLSRKLINGIRDKQSGKTILDFLKSDGFANRNFMQLIHDDSLTFKEDIQKAQVSGQGDSLHEHIANLAGSPAIKKGILQTVKVVDELVKVMGRHKPENIVIEMARENQTTQKGQKNSRERMKRIEEGIKELGSQILKEHPVENTQLQNEKLYLYYLQNGRDMYVDQELDINRLSDYDVDHIVPQSFLKDDSIDNKVLTRSDKARGKSDNVPSEEVVKKMKNYWRQLLNAKLITQRKFDNLTKAERGGLSELDKAGFIKRQLVETRQITKHVAQILDSRMNTKYDENDKLIREVKVITLKSKLVSDFRKDFQFYKVREINNYHHAHDAYLNAVVGTALIKKYPKLESEFVYGDYKVYDVRKMIAKSEQEIGKATAKYFFYSNIMNFFKTEITLANGEIRKRPLIETNGETGEIVWDKGRDFATVRKVLSMPQVNIVKKTEVQTGGFSKESILPKRNSDKLIARKKDWDPKKYGGFDSPTVAYSVLVVAKVEKGKSKKLKSVKELLGITIMERSSFEKNPIDFLEAKGYKEVKKDLIIKLPKYSLFELENGRKRMLASAGELQKGNELALPSKYVNFLYLASHYEKLKGSPEDNEQKQLFVEQHKHYLDEIIEQISEFSKRVILADANLDKVLSAYNKHRDKPIREQAENIIHLFTLTNLGAPAAFKYFDTTIDRKRYTSTKEVLDATLIHQSITGLYETRIDLSQLGGDGGEAAAKGGGGSEAAAKGGTVSLQDEHRLFDIPVTTSLPDVWLQDFPQAWAETGGLGRAKCQAPIIIDLKPTAVPVSIKQYPMSLEAHMGIRQHIIKFLELGVLRPCRSPWNTPLLPVKKPGTQDYRPVQDLREINKRTVDIHPTVPNPYNLLSTLKPDYSWYTVLDLKDAFFCLPLAPQSQELFAFEWKDPERGISGQLTWTRLPQGFKNSPTLFNEALHRDLTDFRTQHPEVTLLQYVDDLLLAAPTKKACTQGTRHLLQELGEKGYRASAKKAQICQTKVTYLGYILSEGKRWLTPGRIETVARIPPPRNPREVREFLGKAGFCRLFIPGFAELAAPLYALTKPSTPFTWQTEHQLAFEALKKALLSAPALGLPDTSKPFTLFLDERQGIAKGVLTQKLGPWKRPVAYLSKKLDPVAAGWPPCLRIMAATAMLVKDSAKLTLGQPLTVITPHTLEAIVRQPPDRWITNARLTHYQALLLDTDRVQFGPPVTLNPATLLPVPENQPSPHDCRQVLAETHGTREDLKDQELPDADHTWYTDGSSYLDSGTRRAGAAVVDGHNTIWAQSLPPGTSAQKAELIALTKALELSKGKKANIYTDSRYAFATAHTHGSIYERRGWLTSEGKEIKNKAEIIALLKALFLPQEVAIIHCPGHQKGQDPVAVGNRQADRVARQAAMAEVLTLATEPDNTSHITAGKRTADGSEFEKRTADGSEFESPKKKAKVE

SEQ ID NO: 1948 - protein, 2106 aa, synthetic construct
MPAAKRVKLDGGDKKYSIGLDIGTNSVGWAVITDEYKVPSKKFKVLGNTDRHSIKKNLIGALLFDSGETAEATRLKRTARRRYTRRKNRICYLQEIFSNEMAKVDDSFFHRLEESFLVEEDKKHERHPIFGNIVDEVAYHEKYPTIYHLRKKLVDSTDKADLRLIYLALAHMIKFRGHFLIEGDLNPDNSDVDKLFIQLVQTYNQLFEENPINASGVDAKAILSARLSKSRRLENLIAQLPGEKKNGLFGNLIALSLGLTPNFKSNFDLAEDAKLQLSKDTYDDDLDNLLAQIGDQYADLFLAAKNLSDAILLSDILRVNTEITKAPLSASMIKRYDEHHQDLTLLKALVRQQLPEKYKEIFFDQSKNGYAGYIDGGASQEEFYKFIKPILEKMDGTEELLVKLNREDLLRKQRTFDNGSIPHQIHLGELHAILRRQEDFYPFLKDNREKIEKILTFRIPYYVGPLARGNSRFAWMTRKSEETITPWNFEEVVDKGASAQSFIERMTNFDKNLPNEKVLPKHSLLYEYFTVYNELTKVKYVTEGMRKPAFLSGEQKKAIVDLLFKTNRKVTVKQLKEDYFKKIECFDSVEISGVEDRFNASLGTYHDLLKIIKDKDFLDNEENEDILEDIVLTLTLFEDREMIEERLKTYAHLFDDKVMKQLKRRRYTGWGRLSRKLINGIRDKQSGKTILDFLKSDGFANRNFMQLIHDDSLTFKEDIQKAQVSGQGDSLHEHIANLAGSPAIKKGILQTVKVVDELVKVMGRHKPENIVIEMARENQTTQKGQKNSRERMKRIEEGIKELGSQILKEHPVENTQLQNEKLYLYYLQNGRDMYVDQELDINRLSDYDVDHIVPQSFLKDDSIDNKVLTRSDKARGKSDNVPSEEVVKKMKNYWRQLLNAKLITQRKFDNLTKAERGGLSELDKAGFIKRQLVETRQITKHVAQILDSRMNTKYDENDKLIREVKVITLKSKLVSDFRKDFQFYKVREINNYHHAHDAYLNAVVGTALIKKYPKLESEFVYGDYKVYDVRKMIAKSEQEIGKATAKYFFYSNIMNFFKTEITLANGEIRKRPLIETNGETGEIVWDKGRDFATVRKVLSMPQVNIVKKTEVQTGGFSKESILPKRNSDKLIARKKDWDPKKYGGFDSPTVAYSVLVVAKVEKGKSKKLKSVKELLGITIMERSSFEKNPIDFLEAKGYKEVKKDLIIKLPKYSLFELENGRKRMLASAGELQKGNELALPSKYVNFLYLASHYEKLKGSPEDNEQKQLFVEQHKHYLDEIIEQISEFSKRVILADANLDKVLSAYNKHRDKPIREQAENIIHLFTLTNLGAPAAFKYFDTTIDRKRYTSTKEVLDATLIHQSITGLYETRIDLSQLGGDGGGSSGSSGSSGSSGSSGGTVSLQDEHRLFDIPVTTSLPDVWLQDFPQAWAETGGLGRAKCQAPIIIDLKPTAVPVSIKQYPMSLEAHMGIRQHIIKFLELGVLRPCRSPWNTPLLPVKKPGTQDYRPVQDLREINKRTVDIHPTVPNPYNLLSTLKPDYSWYTVLDLKDAFFCLPLAPQSQELFAFEWKDPERGISGQLTWTRLPQGFKNSPTLFNEALHRDLTDFRTQHPEVTLLQYVDDLLLAAPTKKACTQGTRHLLQELGEKGYRASAKKAQICQTKVTYLGYILSEGKRWLTPGRIETVARIPPPRNPREVREFLGKAGFCRLFIPGFAELAAPLYALTKPSTPFTWQTEHQLAFEALKKALLSAPALGLPDTSKPFTLFLDERQGIAKGVLTQKLGPWKRPVAYLSKKLDPVAAGWPPCLRIMAATAMLVKDSAKLTLGQPLTVITPHTLEAIVRQPPDRWITNARLTHYQALLLDTDRVQFGPPVTLNPATLLPVPENQPSPHDCRQVLAETHGTREDLKDQELPDADHTWYTDGSSYLDSGTRRAGAAVVDGHNTIWAQSLPPGTSAQKAELIALTKALELSKGKKANIYTDSRYAFATAHTHGSIYERRGWLTSEGKEIKNKAEIIALLKALFLPQEVAIIHCPGHQKGQDPVAVGNRQADRVARQAAMAEVLTLATEPDNTSHITAGKRTADGSEFEKRTADGSEFESPKKKAKVE

SEQ ID NO: 1949 - protein, 2106 aa, synthetic construct
MPAAKRVKLDGGDKKYSIGLDIGTNSVGWAVITDEYKVPSKKFKVLGNTDRHSIKKNLIGALLFDSGETAEATRLKRTARRRYTRRKNRICYLQEIFSNEMAKVDDSFFHRLEESFLVEEDKKHERHPIFGNIVDEVAYHEKYPTIYHLRKKLVDSTDKADLRLIYLALAHMIKFRGHFLIEGDLNPDNSDVDKLFIQLVQTYNQLFEENPINASGVDAKAILSARLSKSRRLENLIAQLPGEKKNGLFGNLIALSLGLTPNFKSNFDLAEDAKLQLSKDTYDDDLDNLLAQIGDQYADLFLAAKNLSDAILLSDILRVNTEITKAPLSASMIKRYDEHHQDLTLLKALVRQQLPEKYKEIFFDQSKNGYAGYIDGGASQEEFYKFIKPILEKMDGTEELLVKLNREDLLRKQRTFDNGSIPHQIHLGELHAILRRQEDFYPFLKDNREKIEKILTFRIPYYVGPLARGNSRFAWMTRKSEETITPWNFEEVVDKGASAQSFIERMTNFDKNLPNEKVLPKHSLLYEYFTVYNELTKVKYVTEGMRKPAFLSGEQKKAIVDLLFKTNRKVTVKQLKEDYFKKIECFDSVEISGVEDRFNASLGTYHDLLKIIKDKDFLDNEENEDILEDIVLTLTLFEDREMIEERLKTYAHLFDDKVMKQLKRRRYTGWGRLSRKLINGIRDKQSGKTILDFLKSDGFANRNFMQLIHDDSLTFKEDIQKAQVSGQGDSLHEHIANLAGSPAIKKGILQTVKVVDELVKVMGRHKPENIVIEMARENQTTQKGQKNSRERMKRIEEGIKELGSQILKEHPVENTQLQNEKLYLYYLQNGRDMYVDQELDINRLSDYDVDHIVPQSFLKDDSIDNKVLTRSDKARGKSDNVPSEEVVKKMKNYWRQLLNAKLITQRKFDNLTKAERGGLSELDKAGFIKRQLVETRQITKHVAQILDSRMNTKYDENDKLIREVKVITLKSKLVSDFRKDFQFYKVREINNYHHAHDAYLNAVVGTALIKKYPKLESEFVYGDYKVYDVRKMIAKSEQEIGKATAKYFFYSNIMNFFKTEITLANGEIRKRPLIETNGETGEIVWDKGRDFATVRKVLSMPQVNIVKKTEVQTGGFSKESILPKRNSDKLIARKKDWDPKKYGGFDSPTVAYSVLVVAKVEKGKSKKLKSVKELLGITIMERSSFEKNPIDFLEAKGYKEVKKDLIIKLPKYSLFELENGRKRMLASAGELQKGNELALPSKYVNFLYLASHYEKLKGSPEDNEQKQLFVEQHKHYLDEIIEQISEFSKRVILADANLDKVLSAYNKHRDKPIREQAENIIHLFTLTNLGAPAAFKYFDTTIDRKRYTSTKEVLDATLIHQSITGLYETRIDLSQLGGDGGGGGGSEAAAKGGGGSGGTVSLQDEHRLFDIPVTTSLPDVWLQDFPQAWAETGGLGRAKCQAPIIIDLKPTAVPVSIKQYPMSLEAHMGIRQHIIKFLELGVLRPCRSPWNTPLLPVKKPGTQDYRPVQDLREINKRTVDIHPTVPNPYNLLSTLKPDYSWYTVLDLKDAFFCLPLAPQSQELFAFEWKDPERGISGQLTWTRLPQGFKNSPTLFNEALHRDLTDFRTQHPEVTLLQYVDDLLLAAPTKKACTQGTRHLLQELGEKGYRASAKKAQICQTKVTYLGYILSEGKRWLTPGRIETVARIPPPRNPREVREFLGKAGFCRLFIPGFAELAAPLYALTKPSTPFTWQTEHQLAFEALKKALLSAPALGLPDTSKPFTLFLDERQGIAKGVLTQKLGPWKRPVAYLSKKLDPVAAGWPPCLRIMAATAMLVKDSAKLTLGQPLTVITPHTLEAIVRQPPDRWITNARLTHYQALLLDTDRVQFGPPVTLNPATLLPVPENQPSPHDCRQVLAETHGTREDLKDQELPDADHTWYTDGSSYLDSGTRRAGAAVVDGHNTIWAQSLPPGTSAQKAELIALTKALELSKGKKANIYTDSRYAFATAHTHGSIYERRGWLTSEGKEIKNKAEIIALLKALFLPQEVAIIHCPGHQKGQDPVAVGNRQADRVARQAAMAEVLTLATEPDNTSHITAGKRTADGSEFEKRTADGSEFESPKKKAKVE

SEQ ID NO: 1950 - protein, 2097 aa, synthetic construct
MPAAKRVKLDGGDKKYSIGLDIGTNSVGWAVITDEYKVPSKKFKVLGNTDRHSIKKNLIGALLFDSGETAEATRLKRTARRRYTRRKNRICYLQEIFSNEMAKVDDSFFHRLEESFLVEEDKKHERHPIFGNIVDEVAYHEKYPTIYHLRKKLVDSTDKADLRLIYLALAHMIKFRGHFLIEGDLNPDNSDVDKLFIQLVQTYNQLFEENPINASGVDAKAILSARLSKSRRLENLIAQLPGEKKNGLFGNLIALSLGLTPNFKSNFDLAEDAKLQLSKDTYDDDLDNLLAQIGDQYADLFLAAKNLSDAILLSDILRVNTEITKAPLSASMIKRYDEHHQDLTLLKALVRQQLPEKYKEIFFDQSKNGYAGYIDGGASQEEFYKFIKPILEKMDGTEELLVKLNREDLLRKQRTFDNGSIPHQIHLGELHAILRRQEDFYPFLKDNREKIEKILTFRIPYYVGPLARGNSRFAWMTRKSEETITPWNFEEVVDKGASAQSFIERMTNFDKNLPNEKVLPKHSLLYEYFTVYNELTKVKYVTEGMRKPAFLSGEQKKAIVDLLFKTNRKVTVKQLKEDYFKKIECFDSVEISGVEDRFNASLGTYHDLLKIIKDKDFLDNEENEDILEDIVLTLTLFEDREMIEERLKTYAHLFDDKVMKQLKRRRYTGWGRLSRKLINGIRDKQSGKTILDFLKSDGFANRNFMQLIHDDSLTFKEDIQKAQVSGQGDSLHEHIANLAGSPAIKKGILQTVKVVDELVKVMGRHKPENIVIEMARENQTTQKGQKNSRERMKRIEEGIKELGSQILKEHPVENTQLQNEKLYLYYLQNGRDMYVDQELDINRLSDYDVDHIVPQSFLKDDSIDNKVLTRSDKARGKSDNVPSEEVVKKMKNYWRQLLNAKLITQRKFDNLTKAERGGLSELDKAGFIKRQLVETRQITKHVAQILDSRMNTKYDENDKLIREVKVITLKSKLVSDFRKDFQFYKVREINNYHHAHDAYLNAVVGTALIKKYPKLESEFVYGDYKVYDVRKMIAKSEQEIGKATAKYFFYSNIMNFFKTEITLANGEIRKRPLIETNGETGEIVWDKGRDFATVRKVLSMPQVNIVKKTEVQTGGFSKESILPKRNSDKLIARKKDWDPKKYGGFDSPTVAYSVLVVAKVEKGKSKKLKSVKELLGITIMERSSFEKNPIDFLEAKGYKEVKKDLIIKLPKYSLFELENGRKRMLASAGELQKGNELALPSKYVNFLYLASHYEKLKGSPEDNEQKQLFVEQHKHYLDEIIEQISEFSKRVILADANLDKVLSAYNKHRDKPIREQAENIIHLFTLTNLGAPAAFKYFDTTIDRKRYTSTKEVLDATLIHQSITGLYETRIDLSQLGGDGGGGGGSSGGTVSLQDEHRLFDIPVTTSLPDVWLQDFPQAWAETGGLGRAKCQAPIIIDLKPTAVPVSIKQYPMSLEAHMGIRQHIIKFLELGVLRPCRSPWNTPLLPVKKPGTQDYRPVQDLREINKRTVDIHPTVPNPYNLLSTLKPDYSWYTVLDLKDAFFCLPLAPQSQELFAFEWKDPERGISGQLTWTRLPQGFKNSPTLFNEALHRDLTDFRTQHPEVTLLQYVDDLLLAAPTKKACTQGTRHLLQELGEKGYRASAKKAQICQTKVTYLGYILSEGKRWLTPGRIETVARIPPPRNPREVREFLGKAGFCRLFIPGFAELAAPLYALTKPSTPFTWQTEHQLAFEALKKALLSAPALGLPDTSKPFTLFLDERQGIAKGVLTQKLGPWKRPVAYLSKKLDPVAAGWPPCLRIMAATAMLVKDSAKLTLGQPLTVITPHTLEAIVRQPPDRWITNARLTHYQALLLDTDRVQFGPPVTLNPATLLPVPENQPSPHDCRQVLAETHGTREDLKDQELPDADHTWYTDGSSYLDSGTRRAGAAVVDGHNTIWAQSLPPGTSAQKAELIALTKALELSKGKKANIYTDSRYAFATAHTHGSIYERRGWLTSEGKEIKNKAEIIALLKALFLPQEVAIIHCPGHQKGQDPVAVGNRQADRVARQAAMAEVLTLATEPDNTSHITAGKRTADGSEFEKRTADGSEFESPKKKAKVE

SEQ ID NO: 1951 - protein, 2102 aa, synthetic construct
MPAAKRVKLDGGDKKYSIGLDIGTNSVGWAVITDEYKVPSKKFKVLGNTDRHSIKKNLIGALLFDSGETAEATRLKRTARRRYTRRKNRICYLQEIFSNEMAKVDDSFFHRLEESFLVEEDKKHERHPIFGNIVDEVAYHEKYPTIYHLRKKLVDSTDKADLRLIYLALAHMIKFRGHFLIEGDLNPDNSDVDKLFIQLVQTYNQLFEENPINASGVDAKAILSARLSKSRRLENLIAQLPGEKKNGLFGNLIALSLGLTPNFKSNFDLAEDAKLQLSKDTYDDDLDNLLAQIGDQYADLFLAAKNLSDAILLSDILRVNTEITKAPLSASMIKRYDEHHQDLTLLKALVRQQLPEKYKEIFFDQSKNGYAGYIDGGASQEEFYKFIKPILEKMDGTEELLVKLNREDLLRKQRTFDNGSIPHQIHLGELHAILRRQEDFYPFLKDNREKIEKILTFRIPYYVGPLARGNSRFAWMTRKSEETITPWNFEEVVDKGASAQSFIERMTNFDKNLPNEKVLPKHSLLYEYFTVYNELTKVKYVTEGMRKPAFLSGEQKKAIVDLLFKTNRKVTVKQLKEDYFKKIECFDSVEISGVEDRFNASLGTYHDLLKIIKDKDFLDNEENEDILEDIVLTLTLFEDREMIEERLKTYAHLFDDKVMKQLKRRRYTGWGRLSRKLINGIRDKQSGKTILDFLKSDGFANRNFMQLIHDDSLTFKEDIQKAQVSGQGDSLHEHIANLAGSPAIKKGILQTVKVVDELVKVMGRHKPENIVIEMARENQTTQKGQKNSRERMKRIEEGIKELGSQILKEHPVENTQLQNEKLYLYYLQNGRDMYVDQELDINRLSDYDVDHIVPQSFLKDDSIDNKVLTRSDKARGKSDNVPSEEVVKKMKNYWRQLLNAKLITQRKFDNLTKAERGGLSELDKAGFIKRQLVETRQITKHVAQILDSRMNTKYDENDKLIREVKVITLKSKLVSDFRKDFQFYKVREINNYHHAHDAYLNAVVGTALIKKYPKLESEFVYGDYKVYDVRKMIAKSEQEIGKATAKYFFYSNIMNFFKTEITLANGEIRKRPLIETNGETGEIVWDKGRDFATVRKVLSMPQVNIVKKTEVQTGGFSKESILPKRNSDKLIARKKDWDPKKYGGFDSPTVAYSVLVVAKVEKGKSKKLKSVKELLGITIMERSSFEKNPIDFLEAKGYKEVKKDLIIKLPKYSLFELENGRKRMLASAGELQKGNELALPSKYVNFLYLASHYEKLKGSPEDNEQKQLFVEQHKHYLDEIIEQISEFSKRVILADANLDKVLSAYNKHRDKPIREQAENIIHLFTLTNLGAPAAFKYFDTTIDRKRYTSTKEVLDATLIHQSITGLYETRIDLSQLGGDGGGGSGSSEAAAKGGTVSLQDEHRLFDIPVTTSLPDVWLQDFPQAWAETGGLGRAKCQAPIIIDLKPTAVPVSIKQYPMSLEAHMGIRQHIIKFLELGVLRPCRSPWNTPLLPVKKPGTQDYRPVQDLREINKRTVDIHPTVPNPYNLLSTLKPDYSWYTVLDLKDAFFCLPLAPQSQELFAFEWKDPERGISGQLTWTRLPQGFKNSPTLFNEALHRDLTDFRTQHPEVTLLQYVDDLLLAAPTKKACTQGTRHLLQELGEKGYRASAKKAQICQTKVTYLGYILSEGKRWLTPGRIETVARIPPPRNPREVREFLGKAGFCRLFIPGFAELAAPLYALTKPSTPFTWQTEHQLAFEALKKALLSAPALGLPDTSKPFTLFLDERQGIAKGVLTQKLGPWKRPVAYLSKKLDPVAAGWPPCLRIMAATAMLVKDSAKLTLGQPLTVITPHTLEAIVRQPPDRWITNARLTHYQALLLDTDRVQFGPPVTLNPATLLPVPENQPSPHDCRQVLAETHGTREDLKDQELPDADHTWYTDGSSYLDSGTRRAGAAVVDGHNTIWAQSLPPGTSAQKAELIALTKALELSKGKKANIYTDSRYAFATAHTHGSIYERRGWLTSEGKEIKNKAEIIALLKALFLPQEVAIIHCPGHQKGQDPVAVGNRQADRVARQAAMAEVLTLATEPDNTSHITAGKRTADGSEFEKRTADGSEFESPKKKAKVE

SEQ ID NO: 1952 - protein, 2102 aa, synthetic construct
MPAAKRVKLDGGDKKYSIGLDIGTNSVGWAVITDEYKVPSKKFKVLGNTDRHSIKKNLIGALLFDSGETAEATRLKRTARRRYTRRKNRICYLQEIFSNEMAKVDDSFFHRLEESFLVEEDKKHERHPIFGNIVDEVAYHEKYPTIYHLRKKLVDSTDKADLRLIYLALAHMIKFRGHFLIEGDLNPDNSDVDKLFIQLVQTYNQLFEENPINASGVDAKAILSARLSKSRRLENLIAQLPGEKKNGLFGNLIALSLGLTPNFKSNFDLAEDAKLQLSKDTYDDDLDNLLAQIGDQYADLFLAAKNLSDAILLSDILRVNTEITKAPLSASMIKRYDEHHQDLTLLKALVRQQLPEKYKEIFFDQSKNGYAGYIDGGASQEEFYKFIKPILEKMDGTEELLVKLNREDLLRKQRTFDNGSIPHQIHLGELHAILRRQEDFYPFLKDNREKIEKILTFRIPYYVGPLARGNSRFAWMTRKSEETITPWNFEEVVDKGASAQSFIERMTNFDKNLPNEKVLPKHSLLYEYFTVYNELTKVKYVTEGMRKPAFLSGEQKKAIVDLLFKTNRKVTVKQLKEDYFKKIECFDSVEISGVEDRFNASLGTYHDLLKIIKDKDFLDNEENEDILEDIVLTLTLFEDREMIEERLKTYAHLFDDKVMKQLKRRRYTGWGRLSRKLINGIRDKQSGKTILDFLKSDGFANRNFMQLIHDDSLTFKEDIQKAQVSGQGDSLHEHIANLAGSPAIKKGILQTVKVVDELVKVMGRHKPENIVIEMARENQTTQKGQKNSRERMKRIEEGIKELGSQILKEHPVENTQLQNEKLYLYYLQNGRDMYVDQELDINRLSDYDVDHIVPQSFLKDDSIDNKVLTRSDKARGKSDNVPSEEVVKKMKNYWRQLLNAKLITQRKFDNLTKAERGGLSELDKAGFIKRQLVETRQITKHVAQILDSRMNTKYDENDKLIREVKVITLKSKLVSDFRKDFQFYKVREINNYHHAHDAYLNAVVGTALIKKYPKLESEFVYGDYKVYDVRKMIAKSEQEIGKATAKYFFYSNIMNFFKTEITLANGEIRKRPLIETNGETGEIVWDKGRDFATVRKVLSMPQVNIVKKTEVQTGGFSKESILPKRNSDKLIARKKDWDPKKYGGFDSPTVAYSVLVVAKVEKGKSKKLKSVKELLGITIMERSSFEKNPIDFLEAKGYKEVKKDLIIKLPKYSLFELENGRKRMLASAGELQKGNELALPSKYVNFLYLASHYEKLKGSPEDNEQKQLFVEQHKHYLDEIIEQISEFSKRVILADANLDKVLSAYNKHRDKPIREQAENIIHLFTLTNLGAPAAFKYFDTTIDRKRYTSTKEVLDATLIHQSITGLYETRIDLSQLGGDGGGSSGGGEAAAKGGTVSLQDEHRLFDIPVTTSLPDVWLQDFPQAWAETGGLGRAKCQAPIIIDLKPTAVPVSIKQYPMSLEAHMGIRQHIIKFLELGVLRPCRSPWNTPLLPVKKPGTQDYRPVQDLREINKRTVDIHPTVPNPYNLLSTLKPDYSWYTVLDLKDAFFCLPLAPQSQELFAFEWKDPERGISGQLTWTRLPQGFKNSPTLFNEALHRDLTDFRTQHPEVTLLQYVDDLLLAAPTKKACTQGTRHLLQELGEKGYRASAKKAQICQTKVTYLGYILSEGKRWLTPGRIETVARIPPPRNPREVREFLGKAGFCRLFIPGFAELAAPLYALTKPSTPFTWQTEHQLAFEALKKALLSAPALGLPDTSKPFTLFLDERQGIAKGVLTQKLGPWKRPVAYLSKKLDPVAAGWPPCLRIMAATAMLVKDSAKLTLGQPLTVITPHTLEAIVRQPPDRWITNARLTHYQALLLDTDRVQFGPPVTLNPATLLPVPENQPSPHDCRQVLAETHGTREDLKDQELPDADHTWYTDGSSYLDSGTRRAGAAVVDGHNTIWAQSLPPGTSAQKAELIALTKALELSKGKKANIYTDSRYAFATAHTHGSIYERRGWLTSEGKEIKNKAEIIALLKALFLPQEVAIIHCPGHQKGQDPVAVGNRQADRVARQAAMAEVLTLATEPDNTSHITAGKRTADGSEFEKRTADGSEFESPKKKAKVE

SEQ ID NO: 1953 - protein, 2098 aa, synthetic construct
MPAAKRVKLDGGDKKYSIGLDIGTNSVGWAVITDEYKVPSKKFKVLGNTDRHSIKKNLIGALLFDSGETAEATRLKRTARRRYTRRKNRICYLQEIFSNEMAKVDDSFFHRLEESFLVEEDKKHERHPIFGNIVDEVAYHEKYPTIYHLRKKLVDSTDKADLRLIYLALAHMIKFRGHFLIEGDLNPDNSDVDKLFIQLVQTYNQLFEENPINASGVDAKAILSARLSKSRRLENLIAQLPGEKKNGLFGNLIALSLGLTPNFKSNFDLAEDAKLQLSKDTYDDDLDNLLAQIGDQYADLFLAAKNLSDAILLSDILRVNTEITKAPLSASMIKRYDEHHQDLTLLKALVRQQLPEKYKEIFFDQSKNGYAGYIDGGASQEEFYKFIKPILEKMDGTEELLVKLNREDLLRKQRTFDNGSIPHQIHLGELHAILRRQEDFYPFLKDNREKIEKILTFRIPYYVGPLARGNSRFAWMTRKSEETITPWNFEEVVDKGASAQSFIERMTNFDKNLPNEKVLPKHSLLYEYFTVYNELTKVKYVTEGMRKPAFLSGEQKKAIVDLLFKTNRKVTVKQLKEDYFKKIECFDSVEISGVEDRFNASLGTYHDLLKIIKDKDFLDNEENEDILEDIVLTLTLFEDREMIEERLKTYAHLFDDKVMKQLKRRRYTGWGRLSRKLINGIRDKQSGKTILDFLKSDGFANRNFMQLIHDDSLTFKEDIQKAQVSGQGDSLHEHIANLAGSPAIKKGILQTVKVVDELVKVMGRHKPENIVIEMARENQTTQKGQKNSRERMKRIEEGIKELGSQILKEHPVENTQLQNEKLYLYYLQNGRDMYVDQELDINRLSDYDVDHIVPQSFLKDDSIDNKVLTRSDKARGKSDNVPSEEVVKKMKNYWRQLLNAKLITQRKFDNLTKAERGGLSELDKAGFIKRQLVETRQITKHVAQILDSRMNTKYDENDKLIREVKVITLKSKLVSDFRKDFQFYKVREINNYHHAHDAYLNAVVGTALIKKYPKLESEFVYGDYKVYDVRKMIAKSEQEIGKATAKYFFYSNIMNFFKTEITLANGEIRKRPLIETNGETGEIVWDKGRDFATVRKVLSMPQVNIVKKTEVQTGGFSKESILPKRNSDKLIARKKDWDPKKYGGFDSPTVAYSVLVVAKVEKGKSKKLKSVKELLGITIMERSSFEKNPIDFLEAKGYKEVKKDLIIKLPKYSLFELENGRKRMLASAGELQKGNELALPSKYVNFLYLASHYEKLKGSPEDNEQKQLFVEQHKHYLDEIIEQISEFSKRVILADANLDKVLSAYNKHRDKPIREQAENIIHLFTLTNLGAPAAFKYFDTTIDRKRYTSTKEVLDATLIHQSITGLYETRIDLSQLGGDGGPAPAPAPGGTVSLQDEHRLFDIPVTTSLPDVWLQDFPQAWAETGGLGRAKCQAPIIIDLKPTAVPVSIKQYPMSLEAHMGIRQHIIKFLELGVLRPCRSPWNTPLLPVKKPGTQDYRPVQDLREINKRTVDIHPTVPNPYNLLSTLKPDYSWYTVLDLKDAFFCLPLAPQSQELFAFEWKDPERGISGQLTWTRLPQGFKNSPTLFNEALHRDLTDFRTQHPEVTLLQYVDDLLLAAPTKKACTQGTRHLLQELGEKGYRASAKKAQICQTKVTYLGYILSEGKRWLTPGRIETVARIPPPRNPREVREFLGKAGFCRLFIPGFAELAAPLYALTKPSTPFTWQTEHQLAFEALKKALLSAPALGLPDTSKPFTLFLDERQGIAKGVLTQKLGPWKRPVAYLSKKLDPVAAGWPPCLRIMAATAMLVKDSAKLTLGQPLTVITPHTLEAIVRQPPDRWITNARLTHYQALLLDTDRVQFGPPVTLNPATLLPVPENQPSPHDCRQVLAETHGTREDLKDQELPDADHTWYTDGSSYLDSGTRRAGAAVVDGHNTIWAQSLPPGTSAQKAELIALTKALELSKGKKANIYTDSRYAFATAHTHGSIYERRGWLTSEGKEIKNKAEIIALLKALFLPQEVAIIHCPGHQKGQDPVAVGNRQADRVARQAAMAEVLTLATEPDNTSHITAGKRTADGSEFEKRTADGSEFESPKKKAKVE

SEQ ID NO: 1954 - protein, 2102 aa, synthetic construct
MPAAKRVKLDGGDKKYSIGLDIGTNSVGWAVITDEYKVPSKKFKVLGNTDRHSIKKNLIGALLFDSGETAEATRLKRTARRRYTRRKNRICYLQEIFSNEMAKVDDSFFHRLEESFLVEEDKKHERHPIFGNIVDEVAYHEKYPTIYHLRKKLVDSTDKADLRLIYLALAHMIKFRGHFLIEGDLNPDNSDVDKLFIQLVQTYNQLFEENPINASGVDAKAILSARLSKSRRLENLIAQLPGEKKNGLFGNLIALSLGLTPNFKSNFDLAEDAKLQLSKDTYDDDLDNLLAQIGDQYADLFLAAKNLSDAILLSDILRVNTEITKAPLSASMIKRYDEHHQDLTLLKALVRQQLPEKYKEIFFDQSKNGYAGYIDGGASQEEFYKFIKPILEKMDGTEELLVKLNREDLLRKQRTFDNGSIPHQIHLGELHAILRRQEDFYPFLKDNREKIEKILTFRIPYYVGPLARGNSRFAWMTRKSEETITPWNFEEVVDKGASAQSFIERMTNFDKNLPNEKVLPKHSLLYEYFTVYNELTKVKYVTEGMRKPAFLSGEQKKAIVDLLFKTNRKVTVKQLKEDYFKKIECFDSVEISGVEDRFNASLGTYHDLLKIIKDKDFLDNEENEDILEDIVLTLTLFEDREMIEERLKTYAHLFDDKVMKQLKRRRYTGWGRLSRKLINGIRDKQSGKTILDFLKSDGFANRNFMQLIHDDSLTFKEDIQKAQVSGQGDSLHEHIANLAGSPAIKKGILQTVKVVDELVKVMGRHKPENIVIEMARENQTTQKGQKNSRERMKRIEEGIKELGSQILKEHPVENTQLQNEKLYLYYLQNGRDMYVDQELDINRLSDYDVDHIVPQSFLKDDSIDNKVLTRSDKARGKSDNVPSEEVVKKMKNYWRQLLNAKLITQRKFDNLTKAERGGLSELDKAGFIKRQLVETRQITKHVAQILDSRMNTKYDENDKLIREVKVITLKSKLVSDFRKDFQFYKVREINNYHHAHDAYLNAVVGTALIKKYPKLESEFVYGDYKVYDVRKMIAKSEQEIGKATAKYFFYSNIMNFFKTEITLANGEIRKRPLIETNGETGEIVWDKGRDFATVRKVLSMPQVNIVKKTEVQTGGFSKESILPKRNSDKLIARKKDWDPKKYGGFDSPTVAYSVLVVAKVEKGKSKKLKSVKELLGITIMERSSFEKNPIDFLEAKGYKEVKKDLIIKLPKYSLFELENGRKRMLASAGELQKGNELALPSKYVNFLYLASHYEKLKGSPEDNEQKQLFVEQHKHYLDEIIEQISEFSKRVILADANLDKVLSAYNKHRDKPIREQAENIIHLFTLTNLGAPAAFKYFDTTIDRKRYTSTKEVLDATLIHQSITGLYETRIDLSQLGGDGGGGSPAPEAAAKGGTVSLQDEHRLFDIPVTTSLPDVWLQDFPQAWAETGGLGRAKCQAPIIIDLKPTAVPVSIKQYPMSLEAHMGIRQHIIKFLELGVLRPCRSPWNTPLLPVKKPGTQDYRPVQDLREINKRTVDIHPTVPNPYNLLSTLKPDYSWYTVLDLKDAFFCLPLAPQSQELFAFEWKDPERGISGQLTWTRLPQGFKNSPTLFNEALHRDLTDFRTQHPEVTLLQYVDDLLLAAPTKKACTQGTRHLLQELGEKGYRASAKKAQICQTKVTYLGYILSEGKRWLTPGRIETVARIPPPRNPREVREFLGKAGFCRLFIPGFAELAAPLYALTKPSTPFTWQTEHQLAFEALKKALLSAPALGLPDTSKPFTLFLDERQGIAKGVLTQKLGPWKRPVAYLSKKLDPVAAGWPPCLRIMAATAMLVKDSAKLTLGQPLTVITPHTLEAIVRQPPDRWITNARLTHYQALLLDTDRVQFGPPVTLNPATLLPVPENQPSPHDCRQVLAETHGTREDLKDQELPDADHTWYTDGSSYLDSGTRRAGAAVVDGHNTIWAQSLPPGTSAQKAELIALTKALELSKGKKANIYTDSRYAFATAHTHGSIYERRGWLTSEGKEIKNKAEIIALLKALFLPQEVAIIHCPGHQKGQDPVAVGNRQADRVARQAAMAEVLTLATEPDNTSHITAGKRTADGSEFEKRTADGSEFESPKKKAKVE

SEQ ID NO: 1955 - protein, 2103 aa, synthetic construct
MPAAKRVKLDGGDKKYSIGLDIGTNSVGWAVITDEYKVPSKKFKVLGNTDRHSIKKNLIGALLFDSGETAEATRLKRTARRRYTRRKNRICYLQEIFSNEMAKVDDSFFHRLEESFLVEEDKKHERHPIFGNIVDEVAYHEKYPTIYHLRKKLVDSTDKADLRLIYLALAHMIKFRGHFLIEGDLNPDNSDVDKLFIQLVQTYNQLFEENPINASGVDAKAILSARLSKSRRLENLIAQLPGEKKNGLFGNLIALSLGLTPNFKSNFDLAEDAKLQLSKDTYDDDLDNLLAQIGDQYADLFLAAKNLSDAILLSDILRVNTEITKAPLSASMIKRYDEHHQDLTLLKALVRQQLPEKYKEIFFDQSKNGYAGYIDGGASQEEFYKFIKPILEKMDGTEELLVKLNREDLLRKQRTFDNGSIPHQIHLGELHAILRRQEDFYPFLKDNREKIEKILTFRIPYYVGPLARGNSRFAWMTRKSEETITPWNFEEVVDKGASAQSFIERMTNFDKNLPNEKVLPKHSLLYEYFTVYNELTKVKYVTEGMRKPAFLSGEQKKAIVDLLFKTNRKVTVKQLKEDYFKKIECFDSVEISGVEDRFNASLGTYHDLLKIIKDKDFLDNEENEDILEDIVLTLTLFEDREMIEERLKTYAHLFDDKVMKQLKRRRYTGWGRLSRKLINGIRDKQSGKTILDFLKSDGFANRNFMQLIHDDSLTFKEDIQKAQVSGQGDSLHEHIANLAGSPAIKKGILQTVKVVDELVKVMGRHKPENIVIEMARENQTTQKGQKNSRERMKRIEEGIKELGSQILKEHPVENTQLQNEKLYLYYLQNGRDMYVDQELDINRLSDYDVDHIVPQSFLKDDSIDNKVLTRSDKARGKSDNVPSEEVVKKMKNYWRQLLNAKLITQRKFDNLTKAERGGLSELDKAGFIKRQLVETRQITKHVAQILDSRMNTKYDENDKLIREVKVITLKSKLVSDFRKDFQFYKVREINNYHHAHDAYLNAVVGTALIKKYPKLESEFVYGDYKVYDVRKMIAKSEQEIGKATAKYFFYSNIMNFFKTEITLANGEIRKRPLIETNGETGEIVWDKGRDFATVRKVLSMPQVNIVKKTEVQTGGFSKESILPKRNSDKLIARKKDWDPKKYGGFDSPTVAYSVLVVAKVEKGKSKKLKSVKELLGITIMERSSFEKNPIDFLEAKGYKEVKKDLIIKLPKYSLFELENGRKRMLASAGELQKGNELALPSKYVNFLYLASHYEKLKGSPEDNEQKQLFVEQHKHYLDEIIEQISEFSKRVILADANLDKVLSAYNKHRDKPIREQAENIIHLFTLTNLGAPAAFKYFDTTIDRKRYTSTKEVLDATLIHQSITGLYETRIDLSQLGGDGGGGSGGSGGSGGSGGTVSLQDEHRLFDIPVTTSLPDVWLQDFPQAWAETGGLGRAKCQAPIIIDLKPTAVPVSIKQYPMSLEAHMGIRQHIIKFLELGVLRPCRSPWNTPLLPVKKPGTQDYRPVQDLREINKRTVDIHPTVPNPYNLLSTLKPDYSWYTVLDLKDAFFCLPLAPQSQELFAFEWKDPERGISGQLTWTRLPQGFKNSPTLFNEALHRDLTDFRTQHPEVTLLQYVDDLLLAAPTKKACTQGTRHLLQELGEKGYRASAKKAQICQTKVTYLGYILSEGKRWLTPGRIETVARIPPPRNPREVREFLGKAGFCRLFIPGFAELAAPLYALTKPSTPFTWQTEHQLAFEALKKALLSAPALGLPDTSKPFTLFLDERQGIAKGVLTQKLGPWKRPVAYLSKKLDPVAAGWPPCLRIMAATAMLVKDSAKLTLGQPLTVITPHTLEAIVRQPPDRWITNARLTHYQALLLDTDRVQFGPPVTLNPATLLPVPENQPSPHDCRQVLAETHGTREDLKDQELPDADHTWYTDGSSYLDSGTRRAGAAVVDGHNTIWAQSLPPGTSAQKAELIALTKALELSKGKKANIYTDSRYAFATAHTHGSIYERRGWLTSEGKEIKNKAEIIALLKALFLPQEVAIIHCPGHQKGQDPVAVGNRQADRVARQAAMAEVLTLATEPDNTSHITAGKRTADGSEFEKRTADGSEFESPKKKAKVE

SEQ ID NO: 1956 - protein, 2097 aa, synthetic construct
MPAAKRVKLDGGDKKYSIGLDIGTNSVGWAVITDEYKVPSKKFKVLGNTDRHSIKKNLIGALLFDSGETAEATRLKRTARRRYTRRKNRICYLQEIFSNEMAKVDDSFFHRLEESFLVEEDKKHERHPIFGNIVDEVAYHEKYPTIYHLRKKLVDSTDKADLRLIYLALAHMIKFRGHFLIEGDLNPDNSDVDKLFIQLVQTYNQLFEENPINASGVDAKAILSARLSKSRRLENLIAQLPGEKKNGLFGNLIALSLGLTPNFKSNFDLAEDAKLQLSKDTYDDDLDNLLAQIGDQYADLFLAAKNLSDAILLSDILRVNTEITKAPLSASMIKRYDEHHQDLTLLKALVRQQLPEKYKEIFFDQSKNGYAGYIDGGASQEEFYKFIKPILEKMDGTEELLVKLNREDLLRKQRTFDNGSIPHQIHLGELHAILRRQEDFYPFLKDNREKIEKILTFRIPYYVGPLARGNSRFAWMTRKSEETITPWNFEEVVDKGASAQSFIERMTNFDKNLPNEKVLPKHSLLYEYFTVYNELTKVKYVTEGMRKPAFLSGEQKKAIVDLLFKTNRKVTVKQLKEDYFKKIECFDSVEISGVEDRFNASLGTYHDLLKIIKDKDFLDNEENEDILEDIVLTLTLFEDREMIEERLKTYAHLFDDKVMKQLKRRRYTGWGRLSRKLINGIRDKQSGKTILDFLKSDGFANRNFMQLIHDDSLTFKEDIQKAQVSGQGDSLHEHIANLAGSPAIKKGILQTVKVVDELVKVMGRHKPENIVIEMARENQTTQKGQKNSRERMKRIEEGIKELGSQILKEHPVENTQLQNEKLYLYYLQNGRDMYVDQELDINRLSDYDVDHIVPQSFLKDDSIDNKVLTRSDKARGKSDNVPSEEVVKKMKNYWRQLLNAKLITQRKFDNLTKAERGGLSELDKAGFIKRQLVETRQITKHVAQILDSRMNTKYDENDKLIREVKVITLKSKLVSDFRKDFQFYKVREINNYHHAHDAYLNAVVGTALIKKYPKLESEFVYGDYKVYDVRKMIAKSEQEIGKATAKYFFYSNIMNFFKTEITLANGEIRKRPLIETNGETGEIVWDKGRDFATVRKVLSMPQVNIVKKTEVQTGGFSKESILPKRNSDKLIARKKDWDPKKYGGFDSPTVAYSVLVVAKVEKGKSKKLKSVKELLGITIMERSSFEKNPIDFLEAKGYKEVKKDLIIKLPKYSLFELENGRKRMLASAGELQKGNELALPSKYVNFLYLASHYEKLKGSPEDNEQKQLFVEQHKHYLDEIIEQISEFSKRVILADANLDKVLSAYNKHRDKPIREQAENIIHLFTLTNLGAPAAFKYFDTTIDRKRYTSTKEVLDATLIHQSITGLYETRIDLSQLGGDGGGGGGGGGGTVSLQDEHRLFDIPVTTSLPDVWLQDFPQAWAETGGLGRAKCQAPIIIDLKPTAVPVSIKQYPMSLEAHMGIRQHIIKFLELGVLRPCRSPWNTPLLPVKKPGTQDYRPVQDLREINKRTVDIHPTVPNPYNLLSTLKPDYSWYTVLDLKDAFFCLPLAPQSQELFAFEWKDPERGISGQLTWTRLPQGFKNSPTLFNEALHRDLTDFRTQHPEVTLLQYVDDLLLAAPTKKACTQGTRHLLQELGEKGYRASAKKAQICQTKVTYLGYILSEGKRWLTPGRIETVARIPPPRNPREVREFLGKAGFCRLFIPGFAELAAPLYALTKPSTPFTWQTEHQLAFEALKKALLSAPALGLPDTSKPFTLFLDERQGIAKGVLTQKLGPWKRPVAYLSKKLDPVAAGWPPCLRIMAATAMLVKDSAKLTLGQPLTVITPHTLEAIVRQPPDRWITNARLTHYQALLLDTDRVQFGPPVTLNPATLLPVPENQPSPHDCRQVLAETHGTREDLKDQELPDADHTWYTDGSSYLDSGTRRAGAAVVDGHNTIWAQSLPPGTSAQKAELIALTKALELSKGKKANIYTDSRYAFATAHTHGSIYERRGWLTSEGKEIKNKAEIIALLKALFLPQEVAIIHCPGHQKGQDPVAVGNRQADRVARQAAMAEVLTLATEPDNTSHITAGKRTADGSEFEKRTADGSEFESPKKKAKVE

SEQ ID NO: 1957 - protein, 2109 aa, synthetic construct
MPAAKRVKLDGGDKKYSIGLDIGTNSVGWAVITDEYKVPSKKFKVLGNTDRHSIKKNLIGALLFDSGETAEATRLKRTARRRYTRRKNRICYLQEIFSNEMAKVDDSFFHRLEESFLVEEDKKHERHPIFGNIVDEVAYHEKYPTIYHLRKKLVDSTDKADLRLIYLALAHMIKFRGHFLIEGDLNPDNSDVDKLFIQLVQTYNQLFEENPINASGVDAKAILSARLSKSRRLENLIAQLPGEKKNGLFGNLIALSLGLTPNFKSNFDLAEDAKLQLSKDTYDDDLDNLLAQIGDQYADLFLAAKNLSDAILLSDILRVNTEITKAPLSASMIKRYDEHHQDLTLLKALVRQQLPEKYKEIFFDQSKNGYAGYIDGGASQEEFYKFIKPILEKMDGTEELLVKLNREDLLRKQRTFDNGSIPHQIHLGELHAILRRQEDFYPFLKDNREKIEKILTFRIPYYVGPLARGNSRFAWMTRKSEETITPWNFEEVVDKGASAQSFIERMTNFDKNLPNEKVLPKHSLLYEYFTVYNELTKVKYVTEGMRKPAFLSGEQKKAIVDLLFKTNRKVTVKQLKEDYFKKIECFDSVEISGVEDRFNASLGTYHDLLKIIKDKDFLDNEENEDILEDIVLTLTLFEDREMIEERLKTYAHLFDDKVMKQLKRRRYTGWGRLSRKLINGIRDKQSGKTILDFLKSDGFANRNFMQLIHDDSLTFKEDIQKAQVSGQGDSLHEHIANLAGSPAIKKGILQTVKVVDELVKVMGRHKPENIVIEMARENQTTQKGQKNSRERMKRIEEGIKELGSQILKEHPVENTQLQNEKLYLYYLQNGRDMYVDQELDINRLSDYDVDHIVPQSFLKDDSIDNKVLTRSDKARGKSDNVPSEEVVKKMKNYWRQLLNAKLITQRKFDNLTKAERGGLSELDKAGFIKRQLVETRQITKHVAQILDSRMNTKYDENDKLIREVKVITLKSKLVSDFRKDFQFYKVREINNYHHAHDAYLNAVVGTALIKKYPKLESEFVYGDYKVYDVRKMIAKSEQEIGKATAKYFFYSNIMNFFKTEITLANGEIRKRPLIETNGETGEIVWDKGRDFATVRKVLSMPQVNIVKKTEVQTGGFSKESILPKRNSDKLIARKKDWDPKKYGGFDSPTVAYSVLVVAKVEKGKSKKLKSVKELLGITIMERSSFEKNPIDFLEAKGYKEVKKDLIIKLPKYSLFELENGRKRMLASAGELQKGNELALPSKYVNFLYLASHYEKLKGSPEDNEQKQLFVEQHKHYLDEIIEQISEFSKRVILADANLDKVLSAYNKHRDKPIREQAENIIHLFTLTNLGAPAAFKYFDTTIDRKRYTSTKEVLDATLIHQSITGLYETRIDLSQLGGDGGGGSGGSGGSGGSGGSGGSGGTVSLQDEHRLFDIPVTTSLPDVWLQDFPQAWAETGGLGRAKCQAPIIIDLKPTAVPVSIKQYPMSLEAHMGIRQHIIKFLELGVLRPCRSPWNTPLLPVKKPGTQDYRPVQDLREINKRTVDIHPTVPNPYNLLSTLKPDYSWYTVLDLKDAFFCLPLAPQSQELFAFEWKDPERGISGQLTWTRLPQGFKNSPTLFNEALHRDLTDFRTQHPEVTLLQYVDDLLLAAPTKKACTQGTRHLLQELGEKGYRASAKKAQICQTKVTYLGYILSEGKRWLTPGRIETVARIPPPRNPREVREFLGKAGFCRLFIPGFAELAAPLYALTKPSTPFTWQTEHQLAFEALKKALLSAPALGLPDTSKPFTLFLDERQGIAKGVLTQKLGPWKRPVAYLSKKLDPVAAGWPPCLRIMAATAMLVKDSAKLTLGQPLTVITPHTLEAIVRQPPDRWITNARLTHYQALLLDTDRVQFGPPVTLNPATLLPVPENQPSPHDCRQVLAETHGTREDLKDQELPDADHTWYTDGSSYLDSGTRRAGAAVVDGHNTIWAQSLPPGTSAQKAELIALTKALELSKGKKANIYTDSRYAFATAHTHGSIYERRGWLTSEGKEIKNKAEIIALLKALFLPQEVAIIHCPGHQKGQDPVAVGNRQADRVARQAAMAEVLTLATEPDNTSHITAGKRTADGSEFEKRTADGSEFESPKKKAKVE

SEQ ID NO: 1958 - protein, 2100 aa, synthetic construct
MPAAKRVKLDGGDKKYSIGLDIGTNSVGWAVITDEYKVPSKKFKVLGNTDRHSIKKNLIGALLFDSGETAEATRLKRTARRRYTRRKNRICYLQEIFSNEMAKVDDSFFHRLEESFLVEEDKKHERHPIFGNIVDEVAYHEKYPTIYHLRKKLVDSTDKADLRLIYLALAHMIKFRGHFLIEGDLNPDNSDVDKLFIQLVQTYNQLFEENPINASGVDAKAILSARLSKSRRLENLIAQLPGEKKNGLFGNLIALSLGLTPNFKSNFDLAEDAKLQLSKDTYDDDLDNLLAQIGDQYADLFLAAKNLSDAILLSDILRVNTEITKAPLSASMIKRYDEHHQDLTLLKALVRQQLPEKYKEIFFDQSKNGYAGYIDGGASQEEFYKFIKPILEKMDGTEELLVKLNREDLLRKQRTFDNGSIPHQIHLGELHAILRRQEDFYPFLKDNREKIEKILTFRIPYYVGPLARGNSRFAWMTRKSEETITPWNFEEVVDKGASAQSFIERMTNFDKNLPNEKVLPKHSLLYEYFTVYNELTKVKYVTEGMRKPAFLSGEQKKAIVDLLFKTNRKVTVKQLKEDYFKKIECFDSVEISGVEDRFNASLGTYHDLLKIIKDKDFLDNEENEDILEDIVLTLTLFEDREMIEERLKTYAHLFDDKVMKQLKRRRYTGWGRLSRKLINGIRDKQSGKTILDFLKSDGFANRNFMQLIHDDSLTFKEDIQKAQVSGQGDSLHEHIANLAGSPAIKKGILQTVKVVDELVKVMGRHKPENIVIEMARENQTTQKGQKNSRERMKRIEEGIKELGSQILKEHPVENTQLQNEKLYLYYLQNGRDMYVDQELDINRLSDYDVDHIVPQSFLKDDSIDNKVLTRSDKARGKSDNVPSEEVVKKMKNYWRQLLNAKLITQRKFDNLTKAERGGLSELDKAGFIKRQLVETRQITKHVAQILDSRMNTKYDENDKLIREVKVITLKSKLVSDFRKDFQFYKVREINNYHHAHDAYLNAVVGTALIKKYPKLESEFVYGDYKVYDVRKMIAKSEQEIGKATAKYFFYSNIMNFFKTEITLANGEIRKRPLIETNGETGEIVWDKGRDFATVRKVLSMPQVNIVKKTEVQTGGFSKESILPKRNSDKLIARKKDWDPKKYGGFDSPTVAYSVLVVAKVEKGKSKKLKSVKELLGITIMERSSFEKNPIDFLEAKGYKEVKKDLIIKLPKYSLFELENGRKRMLASAGELQKGNELALPSKYVNFLYLASHYEKLKGSPEDNEQKQLFVEQHKHYLDEIIEQISEFSKRVILADANLDKVLSAYNKHRDKPIREQAENIIHLFTLTNLGAPAAFKYFDTTIDRKRYTSTKEVLDATLIHQSITGLYETRIDLSQLGGDGGGGSGSSPAPGGTVSLQDEHRLFDIPVTTSLPDVWLQDFPQAWAETGGLGRAKCQAPIIIDLKPTAVPVSIKQYPMSLEAHMGIRQHIIKFLELGVLRPCRSPWNTPLLPVKKPGTQDYRPVQDLREINKRTVDIHPTVPNPYNLLSTLKPDYSWYTVLDLKDAFFCLPLAPQSQELFAFEWKDPERGISGQLTWTRLPQGFKNSPTLFNEALHRDLTDFRTQHPEVTLLQYVDDLLLAAPTKKACTQGTRHLLQELGEKGYRASAKKAQICQTKVTYLGYILSEGKRWLTPGRIETVARIPPPRNPREVREFLGKAGFCRLFIPGFAELAAPLYALTKPSTPFTWQTEHQLAFEALKKALLSAPALGLPDTSKPFTLFLDERQGIAKGVLTQKLGPWKRPVAYLSKKLDPVAAGWPPCLRIMAATAMLVKDSAKLTLGQPLTVITPHTLEAIVRQPPDRWITNARLTHYQALLLDTDRVQFGPPVTLNPATLLPVPENQPSPHDCRQVLAETHGTREDLKDQELPDADHTWYTDGSSYLDSGTRRAGAAVVDGHNTIWAQSLPPGTSAQKAELIALTKALELSKGKKANIYTDSRYAFATAHTHGSIYERRGWLTSEGKEIKNKAEIIALLKALFLPQEVAIIHCPGHQKGQDPVAVGNRQADRVARQAAMAEVLTLATEPDNTSHITAGKRTADGSEFEKRTADGSEFESPKKKAKVE

SEQ ID NO: 1959 - protein, 2102 aa, synthetic construct
MPAAKRVKLDGGDKKYSIGLDIGTNSVGWAVITDEYKVPSKKFKVLGNTDRHSIKKNLIGALLFDSGETAEATRLKRTARRRYTRRKNRICYLQEIFSNEMAKVDDSFFHRLEESFLVEEDKKHERHPIFGNIVDEVAYHEKYPTIYHLRKKLVDSTDKADLRLIYLALAHMIKFRGHFLIEGDLNPDNSDVDKLFIQLVQTYNQLFEENPINASGVDAKAILSARLSKSRRLENLIAQLPGEKKNGLFGNLIALSLGLTPNFKSNFDLAEDAKLQLSKDTYDDDLDNLLAQIGDQYADLFLAAKNLSDAILLSDILRVNTEITKAPLSASMIKRYDEHHQDLTLLKALVRQQLPEKYKEIFFDQSKNGYAGYIDGGASQEEFYKFIKPILEKMDGTEELLVKLNREDLLRKQRTFDNGSIPHQIHLGELHAILRRQEDFYPFLKDNREKIEKILTFRIPYYVGPLARGNSRFAWMTRKSEETITPWNFEEVVDKGASAQSFIERMTNFDKNLPNEKVLPKHSLLYEYFTVYNELTKVKYVTEGMRKPAFLSGEQKKAIVDLLFKTNRKVTVKQLKEDYFKKIECFDSVEISGVEDRFNASLGTYHDLLKIIKDKDFLDNEENEDILEDIVLTLTLFEDREMIEERLKTYAHLFDDKVMKQLKRRRYTGWGRLSRKLINGIRDKQSGKTILDFLKSDGFANRNFMQLIHDDSLTFKEDIQKAQVSGQGDSLHEHIANLAGSPAIKKGILQTVKVVDELVKVMGRHKPENIVIEMARENQTTQKGQKNSRERMKRIEEGIKELGSQILKEHPVENTQLQNEKLYLYYLQNGRDMYVDQELDINRLSDYDVDHIVPQSFLKDDSIDNKVLTRSDKARGKSDNVPSEEVVKKMKNYWRQLLNAKLITQRKFDNLTKAERGGLSELDKAGFIKRQLVETRQITKHVAQILDSRMNTKYDENDKLIREVKVITLKSKLVSDFRKDFQFYKVREINNYHHAHDAYLNAVVGTALIKKYPKLESEFVYGDYKVYDVRKMIAKSEQEIGKATAKYFFYSNIMNFFKTEITLANGEIRKRPLIETNGETGEIVWDKGRDFATVRKVLSMPQVNIVKKTEVQTGGFSKESILPKRNSDKLIARKKDWDPKKYGGFDSPTVAYSVLVVAKVEKGKSKKLKSVKELLGITIMERSSFEKNPIDFLEAKGYKEVKKDLIIKLPKYSLFELENGRKRMLASAGELQKGNELALPSKYVNFLYLASHYEKLKGSPEDNEQKQLFVEQHKHYLDEIIEQISEFSKRVILADANLDKVLSAYNKHRDKPIREQAENIIHLFTLTNLGAPAAFKYFDTTIDRKRYTSTKEVLDATLIHQSITGLYETRIDLSQLGGDGGGSSEAAAKGGSGGTVSLQDEHRLFDIPVTTSLPDVWLQDFPQAWAETGGLGRAKCQAPIIIDLKPTAVPVSIKQYPMSLEAHMGIRQHIIKFLELGVLRPCRSPWNTPLLPVKKPGTQDYRPVQDLREINKRTVDIHPTVPNPYNLLSTLKPDYSWYTVLDLKDAFFCLPLAPQSQELFAFEWKDPERGISGQLTWTRLPQGFKNSPTLFNEALHRDLTDFRTQHPEVTLLQYVDDLLLAAPTKKACTQGTRHLLQELGEKGYRASAKKAQICQTKVTYLGYILSEGKRWLTPGRIETVARIPPPRNPREVREFLGKAGFCRLFIPGFAELAAPLYALTKPSTPFTWQTEHQLAFEALKKALLSAPALGLPDTSKPFTLFLDERQGIAKGVLTQKLGPWKRPVAYLSKKLDPVAAGWPPCLRIMAATAMLVKDSAKLTLGQPLTVITPHTLEAIVRQPPDRWITNARLTHYQALLLDTDRVQFGPPVTLNPATLLPVPENQPSPHDCRQVLAETHGTREDLKDQELPDADHTWYTDGSSYLDSGTRRAGAAVVDGHNTIWAQSLPPGTSAQKAELIALTKALELSKGKKANIYTDSRYAFATAHTHGSIYERRGWLTSEGKEIKNKAEIIALLKALFLPQEVAIIHCPGHQKGQDPVAVGNRQADRVARQAAMAEVLTLATEPDNTSHITAGKRTADGSEFEKRTADGSEFESPKKKAKVE

SEQ ID NO: 1960 - protein, 2099 aa, synthetic construct
MPAAKRVKLDGGDKKYSIGLDIGTNSVGWAVITDEYKVPSKKFKVLGNTDRHSIKKNLIGALLFDSGETAEATRLKRTARRRYTRRKNRICYLQEIFSNEMAKVDDSFFHRLEESFLVEEDKKHERHPIFGNIVDEVAYHEKYPTIYHLRKKLVDSTDKADLRLIYLALAHMIKFRGHFLIEGDLNPDNSDVDKLFIQLVQTYNQLFEENPINASGVDAKAILSARLSKSRRLENLIAQLPGEKKNGLFGNLIALSLGLTPNFKSNFDLAEDAKLQLSKDTYDDDLDNLLAQIGDQYADLFLAAKNLSDAILLSDILRVNTEITKAPLSASMIKRYDEHHQDLTLLKALVRQQLPEKYKEIFFDQSKNGYAGYIDGGASQEEFYKFIKPILEKMDGTEELLVKLNREDLLRKQRTFDNGSIPHQIHLGELHAILRRQEDFYPFLKDNREKIEKILTFRIPYYVGPLARGNSRFAWMTRKSEETITPWNFEEVVDKGASAQSFIERMTNFDKNLPNEKVLPKHSLLYEYFTVYNELTKVKYVTEGMRKPAFLSGEQKKAIVDLLFKTNRKVTVKQLKEDYFKKIECFDSVEISGVEDRFNASLGTYHDLLKIIKDKDFLDNEENEDILEDIVLTLTLFEDREMIEERLKTYAHLFDDKVMKQLKRRRYTGWGRLSRKLINGIRDKQSGKTILDFLKSDGFANRNFMQLIHDDSLTFKEDIQKAQVSGQGDSLHEHIANLAGSPAIKKGILQTVKVVDELVKVMGRHKPENIVIEMARENQTTQKGQKNSRERMKRIEEGIKELGSQILKEHPVENTQLQNEKLYLYYLQNGRDMYVDQELDINRLSDYDVDHIVPQSFLKDDSIDNKVLTRSDKARGKSDNVPSEEVVKKMKNYWRQLLNAKLITQRKFDNLTKAERGGLSELDKAGFIKRQLVETRQITKHVAQILDSRMNTKYDENDKLIREVKVITLKSKLVSDFRKDFQFYKVREINNYHHAHDAYLNAVVGTALIKKYPKLESEFVYGDYKVYDVRKMIAKSEQEIGKATAKYFFYSNIMNFFKTEITLANGEIRKRPLIETNGETGEIVWDKGRDFATVRKVLSMPQVNIVKKTEVQTGGFSKESILPKRNSDKLIARKKDWDPKKYGGFDSPTVAYSVLVVAKVEKGKSKKLKSVKELLGITIMERSSFEKNPIDFLEAKGYKEVKKDLIIKLPKYSLFELENGRKRMLASAGELQKGNELALPSKYVNFLYLASHYEKLKGSPEDNEQKQLFVEQHKHYLDEIIEQISEFSKRVILADANLDKVLSAYNKHRDKPIREQAENIIHLFTLTNLGAPAAFKYFDTTIDRKRYTSTKEVLDATLIHQSITGLYETRIDLSQLGGDGGEAAAKPAPGGTVSLQDEHRLFDIPVTTSLPDVWLQDFPQAWAETGGLGRAKCQAPIIIDLKPTAVPVSIKQYPMSLEAHMGIRQHIIKFLELGVLRPCRSPWNTPLLPVKKPGTQDYRPVQDLREINKRTVDIHPTVPNPYNLLSTLKPDYSWYTVLDLKDAFFCLPLAPQSQELFAFEWKDPERGISGQLTWTRLPQGFKNSPTLFNEALHRDLTDFRTQHPEVTLLQYVDDLLLAAPTKKACTQGTRHLLQELGEKGYRASAKKAQICQTKVTYLGYILSEGKRWLTPGRIETVARIPPPRNPREVREFLGKAGFCRLFIPGFAELAAPLYALTKPSTPFTWQTEHQLAFEALKKALLSAPALGLPDTSKPFTLFLDERQGIAKGVLTQKLGPWKRPVAYLSKKLDPVAAGWPPCLRIMAATAMLVKDSAKLTLGQPLTVITPHTLEAIVRQPPDRWITNARLTHYQALLLDTDRVQFGPPVTLNPATLLPVPENQPSPHDCRQVLAETHGTREDLKDQELPDADHTWYTDGSSYLDSGTRRAGAAVVDGHNTIWAQSLPPGTSAQKAELIALTKALELSKGKKANIYTDSRYAFATAHTHGSIYERRGWLTSEGKEIKNKAEIIALLKALFLPQEVAIIHCPGHQKGQDPVAVGNRQADRVARQAAMAEVLTLATEPDNTSHITAGKRTADGSEFEKRTADGSEFESPKKKAKVE

SEQ ID NO: 1961 - protein, 2100 aa, synthetic construct
MPAAKRVKLDGGDKKYSIGLDIGTNSVGWAVITDEYKVPSKKFKVLGNTDRHSIKKNLIGALLFDSGETAEATRLKRTARRRYTRRKNRICYLQEIFSNEMAKVDDSFFHRLEESFLVEEDKKHERHPIFGNIVDEVAYHEKYPTIYHLRKKLVDSTDKADLRLIYLALAHMIKFRGHFLIEGDLNPDNSDVDKLFIQLVQTYNQLFEENPINASGVDAKAILSARLSKSRRLENLIAQLPGEKKNGLFGNLIALSLGLTPNFKSNFDLAEDAKLQLSKDTYDDDLDNLLAQIGDQYADLFLAAKNLSDAILLSDILRVNTEITKAPLSASMIKRYDEHHQDLTLLKALVRQQLPEKYKEIFFDQSKNGYAGYIDGGASQEEFYKFIKPILEKMDGTEELLVKLNREDLLRKQRTFDNGSIPHQIHLGELHAILRRQEDFYPFLKDNREKIEKILTFRIPYYVGPLARGNSRFAWMTRKSEETITPWNFEEVVDKGASAQSFIERMTNFDKNLPNEKVLPKHSLLYEYFTVYNELTKVKYVTEGMRKPAFLSGEQKKAIVDLLFKTNRKVTVKQLKEDYFKKIECFDSVEISGVEDRFNASLGTYHDLLKIIKDKDFLDNEENEDILEDIVLTLTLFEDREMIEERLKTYAHLFDDKVMKQLKRRRYTGWGRLSRKLINGIRDKQSGKTILDFLKSDGFANRNFMQLIHDDSLTFKEDIQKAQVSGQGDSLHEHIANLAGSPAIKKGILQTVKVVDELVKVMGRHKPENIVIEMARENQTTQKGQKNSRERMKRIEEGIKELGSQILKEHPVENTQLQNEKLYLYYLQNGRDMYVDQELDINRLSDYDVDHIVPQSFLKDDSIDNKVLTRSDKARGKSDNVPSEEVVKKMKNYWRQLLNAKLITQRKFDNLTKAERGGLSELDKAGFIKRQLVETRQITKHVAQILDSRMNTKYDENDKLIREVKVITLKSKLVSDFRKDFQFYKVREINNYHHAHDAYLNAVVGTALIKKYPKLESEFVYGDYKVYDVRKMIAKSEQEIGKATAKYFFYSNIMNFFKTEITLANGEIRKRPLIETNGETGEIVWDKGRDFATVRKVLSMPQVNIVKKTEVQTGGFSKESILPKRNSDKLIARKKDWDPKKYGGFDSPTVAYSVLVVAKVEKGKSKKLKSVKELLGITIMERSSFEKNPIDFLEAKGYKEVKKDLIIKLPKYSLFELENGRKRMLASAGELQKGNELALPSKYVNFLYLASHYEKLKGSPEDNEQKQLFVEQHKHYLDEIIEQISEFSKRVILADANLDKVLSAYNKHRDKPIREQAENIIHLFTLTNLGAPAAFKYFDTTIDRKRYTSTKEVLDATLIHQSITGLYETRIDLSQLGGDGGPAPGSSGGSGGTVSLQDEHRLFDIPVTTSLPDVWLQDFPQAWAETGGLGRAKCQAPIIIDLKPTAVPVSIKQYPMSLEAHMGIRQHIIKFLELGVLRPCRSPWNTPLLPVKKPGTQDYRPVQDLREINKRTVDIHPTVPNPYNLLSTLKPDYSWYTVLDLKDAFFCLPLAPQSQELFAFEWKDPERGISGQLTWTRLPQGFKNSPTLFNEALHRDLTDFRTQHPEVTLLQYVDDLLLAAPTKKACTQGTRHLLQELGEKGYRASAKKAQICQTKVTYLGYILSEGKRWLTPGRIETVARIPPPRNPREVREFLGKAGFCRLFIPGFAELAAPLYALTKPSTPFTWQTEHQLAFEALKKALLSAPALGLPDTSKPFTLFLDERQGIAKGVLTQKLGPWKRPVAYLSKKLDPVAAGWPPCLRIMAATAMLVKDSAKLTLGQPLTVITPHTLEAIVRQPPDRWITNARLTHYQALLLDTDRVQFGPPVTLNPATLLPVPENQPSPHDCRQVLAETHGTREDLKDQELPDADHTWYTDGSSYLDSGTRRAGAAVVDGHNTIWAQSLPPGTSAQKAELIALTKALELSKGKKANIYTDSRYAFATAHTHGSIYERRGWLTSEGKEIKNKAEIIALLKALFLPQEVAIIHCPGHQKGQDPVAVGNRQADRVARQAAMAEVLTLATEPDNTSHITAGKRTADGSEFEKRTADGSEFESPKKKAKVE

SEQ ID NO: 1962 - protein, 2100 aa, synthetic construct
MPAAKRVKLDGGDKKYSIGLDIGTNSVGWAVITDEYKVPSKKFKVLGNTDRHSIKKNLIGALLFDSGETAEATRLKRTARRRYTRRKNRICYLQEIFSNEMAKVDDSFFHRLEESFLVEEDKKHERHPIFGNIVDEVAYHEKYPTIYHLRKKLVDSTDKADLRLIYLALAHMIKFRGHFLIEGDLNPDNSDVDKLFIQLVQTYNQLFEENPINASGVDAKAILSARLSKSRRLENLIAQLPGEKKNGLFGNLIALSLGLTPNFKSNFDLAEDAKLQLSKDTYDDDLDNLLAQIGDQYADLFLAAKNLSDAILLSDILRVNTEITKAPLSASMIKRYDEHHQDLTLLKALVRQQLPEKYKEIFFDQSKNGYAGYIDGGASQEEFYKFIKPILEKMDGTEELLVKLNREDLLRKQRTFDNGSIPHQIHLGELHAILRRQEDFYPFLKDNREKIEKILTFRIPYYVGPLARGNSRFAWMTRKSEETITPWNFEEVVDKGASAQSFIERMTNFDKNLPNEKVLPKHSLLYEYFTVYNELTKVKYVTEGMRKPAFLSGEQKKAIVDLLFKTNRKVTVKQLKEDYFKKIECFDSVEISGVEDRFNASLGTYHDLLKIIKDKDFLDNEENEDILEDIVLTLTLFEDREMIEERLKTYAHLFDDKVMKQLKRRRYTGWGRLSRKLINGIRDKQSGKTILDFLKSDGFANRNFMQLIHDDSLTFKEDIQKAQVSGQGDSLHEHIANLAGSPAIKKGILQTVKVVDELVKVMGRHKPENIVIEMARENQTTQKGQKNSRERMKRIEEGIKELGSQILKEHPVENTQLQNEKLYLYYLQNGRDMYVDQELDINRLSDYDVDHIVPQSFLKDDSIDNKVLTRSDKARGKSDNVPSEEVVKKMKNYWRQLLNAKLITQRKFDNLTKAERGGLSELDKAGFIKRQLVETRQITKHVAQILDSRMNTKYDENDKLIREVKVITLKSKLVSDFRKDFQFYKVREINNYHHAHDAYLNAVVGTALIKKYPKLESEFVYGDYKVYDVRKMIAKSEQEIGKATAKYFFYSNIMNFFKTEITLANGEIRKRPLIETNGETGEIVWDKGRDFATVRKVLSMPQVNIVKKTEVQTGGFSKESILPKRNSDKLIARKKDWDPKKYGGFDSPTVAYSVLVVAKVEKGKSKKLKSVKELLGITIMERSSFEKNPIDFLEAKGYKEVKKDLIIKLPKYSLFELENGRKRMLASAGELQKGNELALPSKYVNFLYLASHYEKLKGSPEDNEQKQLFVEQHKHYLDEIIEQISEFSKRVILADANLDKVLSAYNKHRDKPIREQAENIIHLFTLTNLGAPAAFKYFDTTIDRKRYTSTKEVLDATLIHQSITGLYETRIDLSQLGGDGGGSSPAPGGGGGTVSLQDEHRLFDIPVTTSLPDVWLQDFPQAWAETGGLGRAKCQAPIIIDLKPTAVPVSIKQYPMSLEAHMGIRQHIIKFLELGVLRPCRSPWNTPLLPVKKPGTQDYRPVQDLREINKRTVDIHPTVPNPYNLLSTLKPDYSWYTVLDLKDAFFCLPLAPQSQELFAFEWKDPERGISGQLTWTRLPQGFKNSPTLFNEALHRDLTDFRTQHPEVTLLQYVDDLLLAAPTKKACTQGTRHLLQELGEKGYRASAKKAQICQTKVTYLGYILSEGKRWLTPGRIETVARIPPPRNPREVREFLGKAGFCRLFIPGFAELAAPLYALTKPSTPFTWQTEHQLAFEALKKALLSAPALGLPDTSKPFTLFLDERQGIAKGVLTQKLGPWKRPVAYLSKKLDPVAAGWPPCLRIMAATAMLVKDSAKLTLGQPLTVITPHTLEAIVRQPPDRWITNARLTHYQALLLDTDRVQFGPPVTLNPATLLPVPENQPSPHDCRQVLAETHGTREDLKDQELPDADHTWYTDGSSYLDSGTRRAGAAVVDGHNTIWAQSLPPGTSAQKAELIALTKALELSKGKKANIYTDSRYAFATAHTHGSIYERRGWLTSEGKEIKNKAEIIALLKALFLPQEVAIIHCPGHQKGQDPVAVGNRQADRVARQAAMAEVLTLATEPDNTSHITAGKRTADGSEFEKRTADGSEFESPKKKAKVE

SEQ ID NO: 1963 - protein, 2101 aa, synthetic construct
MPAAKRVKLDGGDKKYSIGLDIGTNSVGWAVITDEYKVPSKKFKVLGNTDRHSIKKNLIGALLFDSGETAEATRLKRTARRRYTRRKNRICYLQEIFSNEMAKVDDSFFHRLEESFLVEEDKKHERHPIFGNIVDEVAYHEKYPTIYHLRKKLVDSTDKADLRLIYLALAHMIKFRGHFLIEGDLNPDNSDVDKLFIQLVQTYNQLFEENPINASGVDAKAILSARLSKSRRLENLIAQLPGEKKNGLFGNLIALSLGLTPNFKSNFDLAEDAKLQLSKDTYDDDLDNLLAQIGDQYADLFLAAKNLSDAILLSDILRVNTEITKAPLSASMIKRYDEHHQDLTLLKALVRQQLPEKYKEIFFDQSKNGYAGYIDGGASQEEFYKFIKPILEKMDGTEELLVKLNREDLLRKQRTFDNGSIPHQIHLGELHAILRRQEDFYPFLKDNREKIEKILTFRIPYYVGPLARGNSRFAWMTRKSEETITPWNFEEVVDKGASAQSFIERMTNFDKNLPNEKVLPKHSLLYEYFTVYNELTKVKYVTEGMRKPAFLSGEQKKAIVDLLFKTNRKVTVKQLKEDYFKKIECFDSVEISGVEDRFNASLGTYHDLLKIIKDKDFLDNEENEDILEDIVLTLTLFEDREMIEERLKTYAHLFDDKVMKQLKRRRYTGWGRLSRKLINGIRDKQSGKTILDFLKSDGFANRNFMQLIHDDSLTFKEDIQKAQVSGQGDSLHEHIANLAGSPAIKKGILQTVKVVDELVKVMGRHKPENIVIEMARENQTTQKGQKNSRERMKRIEEGIKELGSQILKEHPVENTQLQNEKLYLYYLQNGRDMYVDQELDINRLSDYDVDHIVPQSFLKDDSIDNKVLTRSDKARGKSDNVPSEEVVKKMKNYWRQLLNAKLITQRKFDNLTKAERGGLSELDKAGFIKRQLVETRQITKHVAQILDSRMNTKYDENDKLIREVKVITLKSKLVSDFRKDFQFYKVREINNYHHAHDAYLNAVVGTALIKKYPKLESEFVYGDYKVYDVRKMIAKSEQEIGKATAKYFFYSNIMNFFKTEITLANGEIRKRPLIETNGETGEIVWDKGRDFATVRKVLSMPQVNIVKKTEVQTGGFSKESILPKRNSDKLIARKKDWDPKKYGGFDSPTVAYSVLVVAKVEKGKSKKLKSVKELLGITIMERSSFEKNPIDFLEAKGYKEVKKDLIIKLPKYSLFELENGRKRMLASAGELQKGNELALPSKYVNFLYLASHYEKLKGSPEDNEQKQLFVEQHKHYLDEIIEQISEFSKRVILADANLDKVLSAYNKHRDKPIREQAENIIHLFTLTNLGAPAAFKYFDTTIDRKRYTSTKEVLDATLIHQSITGLYETRIDLSQLGGDGGEAAAKEAAAKGGTVSLQDEHRLFDIPVTTSLPDVWLQDFPQAWAETGGLGRAKCQAPIIIDLKPTAVPVSIKQYPMSLEAHMGIRQHIIKFLELGVLRPCRSPWNTPLLPVKKPGTQDYRPVQDLREINKRTVDIHPTVPNPYNLLSTLKPDYSWYTVLDLKDAFFCLPLAPQSQELFAFEWKDPERGISGQLTWTRLPQGFKNSPTLFNEALHRDLTDFRTQHPEVTLLQYVDDLLLAAPTKKACTQGTRHLLQELGEKGYRASAKKAQICQTKVTYLGYILSEGKRWLTPGRIETVARIPPPRNPREVREFLGKAGFCRLFIPGFAELAAPLYALTKPSTPFTWQTEHQLAFEALKKALLSAPALGLPDTSKPFTLFLDERQGIAKGVLTQKLGPWKRPVAYLSKKLDPVAAGWPPCLRIMAATAMLVKDSAKLTLGQPLTVITPHTLEAIVRQPPDRWITNARLTHYQALLLDTDRVQFGPPVTLNPATLLPVPENQPSPHDCRQVLAETHGTREDLKDQELPDADHTWYTDGSSYLDSGTRRAGAAVVDGHNTIWAQSLPPGTSAQKAELIALTKALELSKGKKANIYTDSRYAFATAHTHGSIYERRGWLTSEGKEIKNKAEIIALLKALFLPQEVAIIHCPGHQKGQDPVAVGNRQADRVARQAAMAEVLTLATEPDNTSHITAGKRTADGSEFEKRTADGSEFESPKKKAKVE

SEQ ID NO: 1964 - protein, 2100 aa, synthetic construct
MPAAKRVKLDGGDKKYSIGLDIGTNSVGWAVITDEYKVPSKKFKVLGNTDRHSIKKNLIGALLFDSGETAEATRLKRTARRRYTRRKNRICYLQEIFSNEMAKVDDSFFHRLEESFLVEEDKKHERHPIFGNIVDEVAYHEKYPTIYHLRKKLVDSTDKADLRLIYLALAHMIKFRGHFLIEGDLNPDNSDVDKLFIQLVQTYNQLFEENPINASGVDAKAILSARLSKSRRLENLIAQLPGEKKNGLFGNLIALSLGLTPNFKSNFDLAEDAKLQLSKDTYDDDLDNLLAQIGDQYADLFLAAKNLSDAILLSDILRVNTEITKAPLSASMIKRYDEHHQDLTLLKALVRQQLPEKYKEIFFDQSKNGYAGYIDGGASQEEFYKFIKPILEKMDGTEELLVKLNREDLLRKQRTFDNGSIPHQIHLGELHAILRRQEDFYPFLKDNREKIEKILTFRIPYYVGPLARGNSRFAWMTRKSEETITPWNFEEVVDKGASAQSFIERMTNFDKNLPNEKVLPKHSLLYEYFTVYNELTKVKYVTEGMRKPAFLSGEQKKAIVDLLFKTNRKVTVKQLKEDYFKKIECFDSVEISGVEDRFNASLGTYHDLLKIIKDKDFLDNEENEDILEDIVLTLTLFEDREMIEERLKTYAHLFDDKVMKQLKRRRYTGWGRLSRKLINGIRDKQSGKTILDFLKSDGFANRNFMQLIHDDSLTFKEDIQKAQVSGQGDSLHEHIANLAGSPAIKKGILQTVKVVDELVKVMGRHKPENIVIEMARENQTTQKGQKNSRERMKRIEEGIKELGSQILKEHPVENTQLQNEKLYLYYLQNGRDMYVDQELDINRLSDYDVDHIVPQSFLKDDSIDNKVLTRSDKARGKSDNVPSEEVVKKMKNYWRQLLNAKLITQRKFDNLTKAERGGLSELDKAGFIKRQLVETRQITKHVAQILDSRMNTKYDENDKLIREVKVITLKSKLVSDFRKDFQFYKVREINNYHHAHDAYLNAVVGTALIKKYPKLESEFVYGDYKVYDVRKMIAKSEQEIGKATAKYFFYSNIMNFFKTEITLANGEIRKRPLIETNGETGEIVWDKGRDFATVRKVLSMPQVNIVKKTEVQTGGFSKESILPKRNSDKLIARKKDWDPKKYGGFDSPTVAYSVLVVAKVEKGKSKKLKSVKELLGITIMERSSFEKNPIDFLEAKGYKEVKKDLIIKLPKYSLFELENGRKRMLASAGELQKGNELALPSKYVNFLYLASHYEKLKGSPEDNEQKQLFVEQHKHYLDEIIEQISEFSKRVILADANLDKVLSAYNKHRDKPIREQAENIIHLFTLTNLGAPAAFKYFDTTIDRKRYTSTKEVLDATLIHQSITGLYETRIDLSQLGGDGGGGSPAPGSSGGTVSLQDEHRLFDIPVTTSLPDVWLQDFPQAWAETGGLGRAKCQAPIIIDLKPTAVPVSIKQYPMSLEAHMGIRQHIIKFLELGVLRPCRSPWNTPLLPVKKPGTQDYRPVQDLREINKRTVDIHPTVPNPYNLLSTLKPDYSWYTVLDLKDAFFCLPLAPQSQELFAFEWKDPERGISGQLTWTRLPQGFKNSPTLFNEALHRDLTDFRTQHPEVTLLQYVDDLLLAAPTKKACTQGTRHLLQELGEKGYRASAKKAQICQTKVTYLGYILSEGKRWLTPGRIETVARIPPPRNPREVREFLGKAGFCRLFIPGFAELAAPLYALTKPSTPFTWQTEHQLAFEALKKALLSAPALGLPDTSKPFTLFLDERQGIAKGVLTQKLGPWKRPVAYLSKKLDPVAAGWPPCLRIMAATAMLVKDSAKLTLGQPLTVITPHTLEAIVRQPPDRWITNARLTHYQALLLDTDRVQFGPPVTLNPATLLPVPENQPSPHDCRQVLAETHGTREDLKDQELPDADHTWYTDGSSYLDSGTRRAGAAVVDGHNTIWAQSLPPGTSAQKAELIALTKALELSKGKKANIYTDSRYAFATAHTHGSIYERRGWLTSEGKEIKNKAEIIALLKALFLPQEVAIIHCPGHQKGQDPVAVGNRQADRVARQAAMAEVLTLATEPDNTSHITAGKRTADGSEFEKRTADGSEFESPKKKAKVE

SEQ ID NO: 1965 - protein, 2099 aa, synthetic construct
MPAAKRVKLDGGDKKYSIGLDIGTNSVGWAVITDEYKVPSKKFKVLGNTDRHSIKKNLIGALLFDSGETAEATRLKRTARRRYTRRKNRICYLQEIFSNEMAKVDDSFFHRLEESFLVEEDKKHERHPIFGNIVDEVAYHEKYPTIYHLRKKLVDSTDKADLRLIYLALAHMIKFRGHFLIEGDLNPDNSDVDKLFIQLVQTYNQLFEENPINASGVDAKAILSARLSKSRRLENLIAQLPGEKKNGLFGNLIALSLGLTPNFKSNFDLAEDAKLQLSKDTYDDDLDNLLAQIGDQYADLFLAAKNLSDAILLSDILRVNTEITKAPLSASMIKRYDEHHQDLTLLKALVRQQLPEKYKEIFFDQSKNGYAGYIDGGASQEEFYKFIKPILEKMDGTEELLVKLNREDLLRKQRTFDNGSIPHQIHLGELHAILRRQEDFYPFLKDNREKIEKILTFRIPYYVGPLARGNSRFAWMTRKSEETITPWNFEEVVDKGASAQSFIERMTNFDKNLPNEKVLPKHSLLYEYFTVYNELTKVKYVTEGMRKPAFLSGEQKKAIVDLLFKTNRKVTVKQLKEDYFKKIECFDSVEISGVEDRFNASLGTYHDLLKIIKDKDFLDNEENEDILEDIVLTLTLFEDREMIEERLKTYAHLFDDKVMKQLKRRRYTGWGRLSRKLINGIRDKQSGKTILDFLKSDGFANRNFMQLIHDDSLTFKEDIQKAQVSGQGDSLHEHIANLAGSPAIKKGILQTVKVVDELVKVMGRHKPENIVIEMARENQTTQKGQKNSRERMKRIEEGIKELGSQILKEHPVENTQLQNEKLYLYYLQNGRDMYVDQELDINRLSDYDVDHIVPQSFLKDDSIDNKVLTRSDKARGKSDNVPSEEVVKKMKNYWRQLLNAKLITQRKFDNLTKAERGGLSELDKAGFIKRQLVETRQITKHVAQILDSRMNTKYDENDKLIREVKVITLKSKLVSDFRKDFQFYKVREINNYHHAHDAYLNAVVGTALIKKYPKLESEFVYGDYKVYDVRKMIAKSEQEIGKATAKYFFYSNIMNFFKTEITLANGEIRKRPLIETNGETGEIVWDKGRDFATVRKVLSMPQVNIVKKTEVQTGGFSKESILPKRNSDKLIARKKDWDPKKYGGFDSPTVAYSVLVVAKVEKGKSKKLKSVKELLGITIMERSSFEKNPIDFLEAKGYKEVKKDLIIKLPKYSLFELENGRKRMLASAGELQKGNELALPSKYVNFLYLASHYEKLKGSPEDNEQKQLFVEQHKHYLDEIIEQISEFSKRVILADANLDKVLSAYNKHRDKPIREQAENIIHLFTLTNLGAPAAFKYFDTTIDRKRYTSTKEVLDATLIHQSITGLYETRIDLSQLGGDGGGSSEAAAKGGTVSLQDEHRLFDIPVTTSLPDVWLQDFPQAWAETGGLGRAKCQAPIIIDLKPTAVPVSIKQYPMSLEAHMGIRQHIIKFLELGVLRPCRSPWNTPLLPVKKPGTQDYRPVQDLREINKRTVDIHPTVPNPYNLLSTLKPDYSWYTVLDLKDAFFCLPLAPQSQELFAFEWKDPERGISGQLTWTRLPQGFKNSPTLFNEALHRDLTDFRTQHPEVTLLQYVDDLLLAAPTKKACTQGTRHLLQELGEKGYRASAKKAQICQTKVTYLGYILSEGKRWLTPGRIETVARIPPPRNPREVREFLGKAGFCRLFIPGFAELAAPLYALTKPSTPFTWQTEHQLAFEALKKALLSAPALGLPDTSKPFTLFLDERQGIAKGVLTQKLGPWKRPVAYLSKKLDPVAAGWPPCLRIMAATAMLVKDSAKLTLGQPLTVITPHTLEAIVRQPPDRWITNARLTHYQALLLDTDRVQFGPPVTLNPATLLPVPENQPSPHDCRQVLAETHGTREDLKDQELPDADHTWYTDGSSYLDSGTRRAGAAVVDGHNTIWAQSLPPGTSAQKAELIALTKALELSKGKKANIYTDSRYAFATAHTHGSIYERRGWLTSEGKEIKNKAEIIALLKALFLPQEVAIIHCPGHQKGQDPVAVGNRQADRVARQAAMAEVLTLATEPDNTSHITAGKRTADGSEFEKRTADGSEFESPKKKAKVE

SEQ ID NO: 1966 - protein, 2111 aa, synthetic construct
MPAAKRVKLDGGDKKYSIGLDIGTNSVGWAVITDEYKVPSKKFKVLGNTDRHSIKKNLIGALLFDSGETAEATRLKRTARRRYTRRKNRICYLQEIFSNEMAKVDDSFFHRLEESFLVEEDKKHERHPIFGNIVDEVAYHEKYPTIYHLRKKLVDSTDKADLRLIYLALAHMIKFRGHFLIEGDLNPDNSDVDKLFIQLVQTYNQLFEENPINASGVDAKAILSARLSKSRRLENLIAQLPGEKKNGLFGNLIALSLGLTPNFKSNFDLAEDAKLQLSKDTYDDDLDNLLAQIGDQYADLFLAAKNLSDAILLSDILRVNTEITKAPLSASMIKRYDEHHQDLTLLKALVRQQLPEKYKEIFFDQSKNGYAGYIDGGASQEEFYKFIKPILEKMDGTEELLVKLNREDLLRKQRTFDNGSIPHQIHLGELHAILRRQEDFYPFLKDNREKIEKILTFRIPYYVGPLARGNSRFAWMTRKSEETITPWNFEEVVDKGASAQSFIERMTNFDKNLPNEKVLPKHSLLYEYFTVYNELTKVKYVTEGMRKPAFLSGEQKKAIVDLLFKTNRKVTVKQLKEDYFKKIECFDSVEISGVEDRFNASLGTYHDLLKIIKDKDFLDNEENEDILEDIVLTLTLFEDREMIEERLKTYAHLFDDKVMKQLKRRRYTGWGRLSRKLINGIRDKQSGKTILDFLKSDGFANRNFMQLIHDDSLTFKEDIQKAQVSGQGDSLHEHIANLAGSPAIKKGILQTVKVVDELVKVMGRHKPENIVIEMARENQTTQKGQKNSRERMKRIEEGIKELGSQILKEHPVENTQLQNEKLYLYYLQNGRDMYVDQELDINRLSDYDVDHIVPQSFLKDDSIDNKVLTRSDKARGKSDNVPSEEVVKKMKNYWRQLLNAKLITQRKFDNLTKAERGGLSELDKAGFIKRQLVETRQITKHVAQILDSRMNTKYDENDKLIREVKVITLKSKLVSDFRKDFQFYKVREINNYHHAHDAYLNAVVGTALIKKYPKLESEFVYGDYKVYDVRKMIAKSEQEIGKATAKYFFYSNIMNFFKTEITLANGEIRKRPLIETNGETGEIVWDKGRDFATVRKVLSMPQVNIVKKTEVQTGGFSKESILPKRNSDKLIARKKDWDPKKYGGFDSPTVAYSVLVVAKVEKGKSKKLKSVKELLGITIMERSSFEKNPIDFLEAKGYKEVKKDLIIKLPKYSLFELENGRKRMLASAGELQKGNELALPSKYVNFLYLASHYEKLKGSPEDNEQKQLFVEQHKHYLDEIIEQISEFSKRVILADANLDKVLSAYNKHRDKPIREQAENIIHLFTLTNLGAPAAFKYFDTTIDRKRYTSTKEVLDATLIHQSITGLYETRIDLSQLGGDGGGGGGSGGGGSGGGGSGGGGSGGTVSLQDEHRLFDIPVTTSLPDVWLQDFPQAWAETGGLGRAKCQAPIIIDLKPTAVPVSIKQYPMSLEAHMGIRQHIIKFLELGVLRPCRSPWNTPLLPVKKPGTQDYRPVQDLREINKRTVDIHPTVPNPYNLLSTLKPDYSWYTVLDLKDAFFCLPLAPQSQELFAFEWKDPERGISGQLTWTRLPQGFKNSPTLFNEALHRDLTDFRTQHPEVTLLQYVDDLLLAAPTKKACTQGTRHLLQELGEKGYRASAKKAQICQTKVTYLGYILSEGKRWLTPGRIETVARIPPPRNPREVREFLGKAGFCRLFIPGFAELAAPLYALTKPSTPFTWQTEHQLAFEALKKALLSAPALGLPDTSKPFTLFLDERQGIAKGVLTQKLGPWKRPVAYLSKKLDPVAAGWPPCLRIMAATAMLVKDSAKLTLGQPLTVITPHTLEAIVRQPPDRWITNARLTHYQALLLDTDRVQFGPPVTLNPATLLPVPENQPSPHDCRQVLAETHGTREDLKDQELPDADHTWYTDGSSYLDSGTRRAGAAVVDGHNTIWAQSLPPGTSAQKAELIALTKALELSKGKKANIYTDSRYAFATAHTHGSIYERRGWLTSEGKEIKNKAEIIALLKALFLPQEVAIIHCPGHQKGQDPVAVGNRQADRVARQAAMAEVLTLATEPDNTSHITAGKRTADGSEFEKRTADGSEFESPKKKAKVE

SEQ ID NO: 1967 - protein, 2137 aa, synthetic construct
MPAAKRVKLDGGDKKYSIGLDIGTNSVGWAVITDEYKVPSKKFKVLGNTDRHSIKKNLIGALLFDSGETAEATRLKRTARRRYTRRKNRICYLQEIFSNEMAKVDDSFFHRLEESFLVEEDKKHERHPIFGNIVDEVAYHEKYPTIYHLRKKLVDSTDKADLRLIYLALAHMIKFRGHFLIEGDLNPDNSDVDKLFIQLVQTYNQLFEENPINASGVDAKAILSARLSKSRRLENLIAQLPGEKKNGLFGNLIALSLGLTPNFKSNFDLAEDAKLQLSKDTYDDDLDNLLAQIGDQYADLFLAAKNLSDAILLSDILRVNTEITKAPLSASMIKRYDEHHQDLTLLKALVRQQLPEKYKEIFFDQSKNGYAGYIDGGASQEEFYKFIKPILEKMDGTEELLVKLNREDLLRKQRTFDNGSIPHQIHLGELHAILRRQEDFYPFLKDNREKIEKILTFRIPYYVGPLARGNSRFAWMTRKSEETITPWNFEEVVDKGASAQSFIERMTNFDKNLPNEKVLPKHSLLYEYFTVYNELTKVKYVTEGMRKPAFLSGEQKKAIVDLLFKTNRKVTVKQLKEDYFKKIECFDSVEISGVEDRFNASLGTYHDLLKIIKDKDFLDNEENEDILEDIVLTLTLFEDREMIEERLKTYAHLFDDKVMKQLKRRRYTGWGRLSRKLINGIRDKQSGKTILDFLKSDGFANRNFMQLIHDDSLTFKEDIQKAQVSGQGDSLHEHIANLAGSPAIKKGILQTVKVVDELVKVMGRHKPENIVIEMARENQTTQKGQKNSRERMKRIEEGIKELGSQILKEHPVENTQLQNEKLYLYYLQNGRDMYVDQELDINRLSDYDVDHIVPQSFLKDDSIDNKVLTRSDKARGKSDNVPSEEVVKKMKNYWRQLLNAKLITQRKFDNLTKAERGGLSELDKAGFIKRQLVETRQITKHVAQILDSRMNTKYDENDKLIREVKVITLKSKLVSDFRKDFQFYKVREINNYHHAHDAYLNAVVGTALIKKYPKLESEFVYGDYKVYDVRKMIAKSEQEIGKATAKYFFYSNIMNFFKTEITLANGEIRKRPLIETNGETGEIVWDKGRDFATVRKVLSMPQVNIVKKTEVQTGGFSKESILPKRNSDKLIARKKDWDPKKYGGFDSPTVAYSVLVVAKVEKGKSKKLKSVKELLGITIMERSSFEKNPIDFLEAKGYKEVKKDLIIKLPKYSLFELENGRKRMLASAGELQKGNELALPSKYVNFLYLASHYEKLKGSPEDNEQKQLFVEQHKHYLDEIIEQISEFSKRVILADANLDKVLSAYNKHRDKPIREQAENIIHLFTLTNLGAPAAFKYFDTTIDRKRYTSTKEVLDATLIHQSITGLYETRIDLSQLGGDGGAEAAAKEAAAKEAAAKEAAAKALEAEAAAKEAAAKEAAAKEAAAKAGGTVSLQDEHRLFDIPVTTSLPDVWLQDFPQAWAETGGLGRAKCQAPIIIDLKPTAVPVSIKQYPMSLEAHMGIRQHIIKFLELGVLRPCRSPWNTPLLPVKKPGTQDYRPVQDLREINKRTVDIHPTVPNPYNLLSTLKPDYSWYTVLDLKDAFFCLPLAPQSQELFAFEWKDPERGISGQLTWTRLPQGFKNSPTLFNEALHRDLTDFRTQHPEVTLLQYVDDLLLAAPTKKACTQGTRHLLQELGEKGYRASAKKAQICQTKVTYLGYILSEGKRWLTPGRIETVARIPPPRNPREVREFLGKAGFCRLFIPGFAELAAPLYALTKPSTPFTWQTEHQLAFEALKKALLSAPALGLPDTSKPFTLFLDERQGIAKGVLTQKLGPWKRPVAYLSKKLDPVAAGWPPCLRIMAATAMLVKDSAKLTLGQPLTVITPHTLEAIVRQPPDRWITNARLTHYQALLLDTDRVQFGPPVTLNPATLLPVPENQPSPHDCRQVLAETHGTREDLKDQELPDADHTWYTDGSSYLDSGTRRAGAAVVDGHNTIWAQSLPPGTSAQKAELIALTKALELSKGKKANIYTDSRYAFATAHTHGSIYERRGWLTSEGKEIKNKAEIIALLKALFLPQEVAIIHCPGHQKGQDPVAVGNRQADRVARQAAMAEVLTLATEPDNTSHITAGKRTADGSEFEKRTADGSEFESPKKKAKVE

SEQ ID NO: 1968 - protein, 2102 aa, synthetic construct
MPAAKRVKLDGGDKKYSIGLDIGTNSVGWAVITDEYKVPSKKFKVLGNTDRHSIKKNLIGALLFDSGETAEATRLKRTARRRYTRRKNRICYLQEIFSNEMAKVDDSFFHRLEESFLVEEDKKHERHPIFGNIVDEVAYHEKYPTIYHLRKKLVDSTDKADLRLIYLALAHMIKFRGHFLIEGDLNPDNSDVDKLFIQLVQTYNQLFEENPINASGVDAKAILSARLSKSRRLENLIAQLPGEKKNGLFGNLIALSLGLTPNFKSNFDLAEDAKLQLSKDTYDDDLDNLLAQIGDQYADLFLAAKNLSDAILLSDILRVNTEITKAPLSASMIKRYDEHHQDLTLLKALVRQQLPEKYKEIFFDQSKNGYAGYIDGGASQEEFYKFIKPILEKMDGTEELLVKLNREDLLRKQRTFDNGSIPHQIHLGELHAILRRQEDFYPFLKDNREKIEKILTFRIPYYVGPLARGNSRFAWMTRKSEETITPWNFEEVVDKGASAQSFIERMTNFDKNLPNEKVLPKHSLLYEYFTVYNELTKVKYVTEGMRKPAFLSGEQKKAIVDLLFKTNRKVTVKQLKEDYFKKIECFDSVEISGVEDRFNASLGTYHDLLKIIKDKDFLDNEENEDILEDIVLTLTLFEDREMIEERLKTYAHLFDDKVMKQLKRRRYTGWGRLSRKLINGIRDKQSGKTILDFLKSDGFANRNFMQLIHDDSLTFKEDIQKAQVSGQGDSLHEHIANLAGSPAIKKGILQTVKVVDELVKVMGRHKPENIVIEMARENQTTQKGQKNSRERMKRIEEGIKELGSQILKEHPVENTQLQNEKLYLYYLQNGRDMYVDQELDINRLSDYDVDHIVPQSFLKDDSIDNKVLTRSDKARGKSDNVPSEEVVKKMKNYWRQLLNAKLITQRKFDNLTKAERGGLSELDKAGFIKRQLVETRQITKHVAQILDSRMNTKYDENDKLIREVKVITLKSKLVSDFRKDFQFYKVREINNYHHAHDAYLNAVVGTALIKKYPKLESEFVYGDYKVYDVRKMIAKSEQEIGKATAKYFFYSNIMNFFKTEITLANGEIRKRPLIETNGETGEIVWDKGRDFATVRKVLSMPQVNIVKKTEVQTGGFSKESILPKRNSDKLIARKKDWDPKKYGGFDSPTVAYSVLVVAKVEKGKSKKLKSVKELLGITIMERSSFEKNPIDFLEAKGYKEVKKDLIIKLPKYSLFELENGRKRMLASAGELQKGNELALPSKYVNFLYLASHYEKLKGSPEDNEQKQLFVEQHKHYLDEIIEQISEFSKRVILADANLDKVLSAYNKHRDKPIREQAENIIHLFTLTNLGAPAAFKYFDTTIDRKRYTSTKEVLDATLIHQSITGLYETRIDLSQLGGDGGPAPGSSEAAAKGGTVSLQDEHRLFDIPVTTSLPDVWLQDFPQAWAETGGLGRAKCQAPIIIDLKPTAVPVSIKQYPMSLEAHMGIRQHIIKFLELGVLRPCRSPWNTPLLPVKKPGTQDYRPVQDLREINKRTVDIHPTVPNPYNLLSTLKPDYSWYTVLDLKDAFFCLPLAPQSQELFAFEWKDPERGISGQLTWTRLPQGFKNSPTLFNEALHRDLTDFRTQHPEVTLLQYVDDLLLAAPTKKACTQGTRHLLQELGEKGYRASAKKAQICQTKVTYLGYILSEGKRWLTPGRIETVARIPPPRNPREVREFLGKAGFCRLFIPGFAELAAPLYALTKPSTPFTWQTEHQLAFEALKKALLSAPALGLPDTSKPFTLFLDERQGIAKGVLTQKLGPWKRPVAYLSKKLDPVAAGWPPCLRIMAATAMLVKDSAKLTLGQPLTVITPHTLEAIVRQPPDRWITNARLTHYQALLLDTDRVQFGPPVTLNPATLLPVPENQPSPHDCRQVLAETHGTREDLKDQELPDADHTWYTDGSSYLDSGTRRAGAAVVDGHNTIWAQSLPPGTSAQKAELIALTKALELSKGKKANIYTDSRYAFATAHTHGSIYERRGWLTSEGKEIKNKAEIIALLKALFLPQEVAIIHCPGHQKGQDPVAVGNRQADRVARQAAMAEVLTLATEPDNTSHITAGKRTADGSEFEKRTADGSEFESPKKKAKVE

SEQ ID NO: 1969 - protein, 2102 aa, synthetic construct
MPAAKRVKLDGGDKKYSIGLDIGTNSVGWAVITDEYKVPSKKFKVLGNTDRHSIKKNLIGALLFDSGETAEATRLKRTARRRYTRRKNRICYLQEIFSNEMAKVDDSFFHRLEESFLVEEDKKHERHPIFGNIVDEVAYHEKYPTIYHLRKKLVDSTDKADLRLIYLALAHMIKFRGHFLIEGDLNPDNSDVDKLFIQLVQTYNQLFEENPINASGVDAKAILSARLSKSRRLENLIAQLPGEKKNGLFGNLIALSLGLTPNFKSNFDLAEDAKLQLSKDTYDDDLDNLLAQIGDQYADLFLAAKNLSDAILLSDILRVNTEITKAPLSASMIKRYDEHHQDLTLLKALVRQQLPEKYKEIFFDQSKNGYAGYIDGGASQEEFYKFIKPILEKMDGTEELLVKLNREDLLRKQRTFDNGSIPHQIHLGELHAILRRQEDFYPFLKDNREKIEKILTFRIPYYVGPLARGNSRFAWMTRKSEETITPWNFEEVVDKGASAQSFIERMTNFDKNLPNEKVLPKHSLLYEYFTVYNELTKVKYVTEGMRKPAFLSGEQKKAIVDLLFKTNRKVTVKQLKEDYFKKIECFDSVEISGVEDRFNASLGTYHDLLKIIKDKDFLDNEENEDILEDIVLTLTLFEDREMIEERLKTYAHLFDDKVMKQLKRRRYTGWGRLSRKLINGIRDKQSGKTILDFLKSDGFANRNFMQLIHDDSLTFKEDIQKAQVSGQGDSLHEHIANLAGSPAIKKGILQTVKVVDELVKVMGRHKPENIVIEMARENQTTQKGQKNSRERMKRIEEGIKELGSQILKEHPVENTQLQNEKLYLYYLQNGRDMYVDQELDINRLSDYDVDHIVPQSFLKDDSIDNKVLTRSDKARGKSDNVPSEEVVKKMKNYWRQLLNAKLITQRKFDNLTKAERGGLSELDKAGFIKRQLVETRQITKHVAQILDSRMNTKYDENDKLIREVKVITLKSKLVSDFRKDFQFYKVREINNYHHAHDAYLNAVVGTALIKKYPKLESEFVYGDYKVYDVRKMIAKSEQEIGKATAKYFFYSNIMNFFKTEITLANGEIRKRPLIETNGETGEIVWDKGRDFATVRKVLSMPQVNIVKKTEVQTGGFSKESILPKRNSDKLIARKKDWDPKKYGGFDSPTVAYSVLVVAKVEKGKSKKLKSVKELLGITIMERSSFEKNPIDFLEAKGYKEVKKDLIIKLPKYSLFELENGRKRMLASAGELQKGNELALPSKYVNFLYLASHYEKLKGSPEDNEQKQLFVEQHKHYLDEIIEQISEFSKRVILADANLDKVLSAYNKHRDKPIREQAENIIHLFTLTNLGAPAAFKYFDTTIDRKRYTSTKEVLDATLIHQSITGLYETRIDLSQLGGDGGGGGEAAAKPAPGGTVSLQDEHRLFDIPVTTSLPDVWLQDFPQAWAETGGLGRAKCQAPIIIDLKPTAVPVSIKQYPMSLEAHMGIRQHIIKFLELGVLRPCRSPWNTPLLPVKKPGTQDYRPVQDLREINKRTVDIHPTVPNPYNLLSTLKPDYSWYTVLDLKDAFFCLPLAPQSQELFAFEWKDPERGISGQLTWTRLPQGFKNSPTLFNEALHRDLTDFRTQHPEVTLLQYVDDLLLAAPTKKACTQGTRHLLQELGEKGYRASAKKAQICQTKVTYLGYILSEGKRWLTPGRIETVARIPPPRNPREVREFLGKAGFCRLFIPGFAELAAPLYALTKPSTPFTWQTEHQLAFEALKKALLSAPALGLPDTSKPFTLFLDERQGIAKGVLTQKLGPWKRPVAYLSKKLDPVAAGWPPCLRIMAATAMLVKDSAKLTLGQPLTVITPHTLEAIVRQPPDRWITNARLTHYQALLLDTDRVQFGPPVTLNPATLLPVPENQPSPHDCRQVLAETHGTREDLKDQELPDADHTWYTDGSSYLDSGTRRAGAAVVDGHNTIWAQSLPPGTSAQKAELIALTKALELSKGKKANIYTDSRYAFATAHTHGSIYERRGWLTSEGKEIKNKAEIIALLKALFLPQEVAIIHCPGHQKGQDPVAVGNRQADRVARQAAMAEVLTLATEPDNTSHITAGKRTADGSEFEKRTADGSEFESPKKKAKVE

SEQ ID NO: 1970 - protein, 2097 aa, synthetic construct
MPAAKRVKLDGGDKKYSIGLDIGTNSVGWAVITDEYKVPSKKFKVLGNTDRHSIKKNLIGALLFDSGETAEATRLKRTARRRYTRRKNRICYLQEIFSNEMAKVDDSFFHRLEESFLVEEDKKHERHPIFGNIVDEVAYHEKYPTIYHLRKKLVDSTDKADLRLIYLALAHMIKFRGHFLIEGDLNPDNSDVDKLFIQLVQTYNQLFEENPINASGVDAKAILSARLSKSRRLENLIAQLPGEKKNGLFGNLIALSLGLTPNFKSNFDLAEDAKLQLSKDTYDDDLDNLLAQIGDQYADLFLAAKNLSDAILLSDILRVNTEITKAPLSASMIKRYDEHHQDLTLLKALVRQQLPEKYKEIFFDQSKNGYAGYIDGGASQEEFYKFIKPILEKMDGTEELLVKLNREDLLRKQRTFDNGSIPHQIHLGELHAILRRQEDFYPFLKDNREKIEKILTFRIPYYVGPLARGNSRFAWMTRKSEETITPWNFEEVVDKGASAQSFIERMTNFDKNLPNEKVLPKHSLLYEYFTVYNELTKVKYVTEGMRKPAFLSGEQKKAIVDLLFKTNRKVTVKQLKEDYFKKIECFDSVEISGVEDRFNASLGTYHDLLKIIKDKDFLDNEENEDILEDIVLTLTLFEDREMIEERLKTYAHLFDDKVMKQLKRRRYTGWGRLSRKLINGIRDKQSGKTILDFLKSDGFANRNFMQLIHDDSLTFKEDIQKAQVSGQGDSLHEHIANLAGSPAIKKGILQTVKVVDELVKVMGRHKPENIVIEMARENQTTQKGQKNSRERMKRIEEGIKELGSQILKEHPVENTQLQNEKLYLYYLQNGRDMYVDQELDINRLSDYDVDHIVPQSFLKDDSIDNKVLTRSDKARGKSDNVPSEEVVKKMKNYWRQLLNAKLITQRKFDNLTKAERGGLSELDKAGFIKRQLVETRQITKHVAQILDSRMNTKYDENDKLIREVKVITLKSKLVSDFRKDFQFYKVREINNYHHAHDAYLNAVVGTALIKKYPKLESEFVYGDYKVYDVRKMIAKSEQEIGKATAKYFFYSNIMNFFKTEITLANGEIRKRPLIETNGETGEIVWDKGRDFATVRKVLSMPQVNIVKKTEVQTGGFSKESILPKRNSDKLIARKKDWDPKKYGGFDSPTVAYSVLVVAKVEKGKSKKLKSVKELLGITIMERSSFEKNPIDFLEAKGYKEVKKDLIIKLPKYSLFELENGRKRMLASAGELQKGNELALPSKYVNFLYLASHYEKLKGSPEDNEQKQLFVEQHKHYLDEIIEQISEFSKRVILADANLDKVLSAYNKHRDKPIREQAENIIHLFTLTNLGAPAAFKYFDTTIDRKRYTSTKEVLDATLIHQSITGLYETRIDLSQLGGDGGGSSGSSGGTVSLQDEHRLFDIPVTTSLPDVWLQDFPQAWAETGGLGRAKCQAPIIIDLKPTAVPVSIKQYPMSLEAHMGIRQHIIKFLELGVLRPCRSPWNTPLLPVKKPGTQDYRPVQDLREINKRTVDIHPTVPNPYNLLSTLKPDYSWYTVLDLKDAFFCLPLAPQSQELFAFEWKDPERGISGQLTWTRLPQGFKNSPTLFNEALHRDLTDFRTQHPEVTLLQYVDDLLLAAPTKKACTQGTRHLLQELGEKGYRASAKKAQICQTKVTYLGYILSEGKRWLTPGRIETVARIPPPRNPREVREFLGKAGFCRLFIPGFAELAAPLYALTKPSTPFTWQTEHQLAFEALKKALLSAPALGLPDTSKPFTLFLDERQGIAKGVLTQKLGPWKRPVAYLSKKLDPVAAGWPPCLRIMAATAMLVKDSAKLTLGQPLTVITPHTLEAIVRQPPDRWITNARLTHYQALLLDTDRVQFGPPVTLNPATLLPVPENQPSPHDCRQVLAETHGTREDLKDQELPDADHTWYTDGSSYLDSGTRRAGAAVVDGHNTIWAQSLPPGTSAQKAELIALTKALELSKGKKANIYTDSRYAFATAHTHGSIYERRGWLTSEGKEIKNKAEIIALLKALFLPQEVAIIHCPGHQKGQDPVAVGNRQADRVARQAAMAEVLTLATEPDNTSHITAGKRTADGSEFEKRTADGSEFESPKKKAKVE

SEQ ID NO: 1971 - protein, 2099 aa, synthetic construct
MPAAKRVKLDGGDKKYSIGLDIGTNSVGWAVITDEYKVPSKKFKVLGNTDRHSIKKNLIGALLFDSGETAEATRLKRTARRRYTRRKNRICYLQEIFSNEMAKVDDSFFHRLEESFLVEEDKKHERHPIFGNIVDEVAYHEKYPTIYHLRKKLVDSTDKADLRLIYLALAHMIKFRGHFLIEGDLNPDNSDVDKLFIQLVQTYNQLFEENPINASGVDAKAILSARLSKSRRLENLIAQLPGEKKNGLFGNLIALSLGLTPNFKSNFDLAEDAKLQLSKDTYDDDLDNLLAQIGDQYADLFLAAKNLSDAILLSDILRVNTEITKAPLSASMIKRYDEHHQDLTLLKALVRQQLPEKYKEIFFDQSKNGYAGYIDGGASQEEFYKFIKPILEKMDGTEELLVKLNREDLLRKQRTFDNGSIPHQIHLGELHAILRRQEDFYPFLKDNREKIEKILTFRIPYYVGPLARGNSRFAWMTRKSEETITPWNFEEVVDKGASAQSFIERMTNFDKNLPNEKVLPKHSLLYEYFTVYNELTKVKYVTEGMRKPAFLSGEQKKAIVDLLFKTNRKVTVKQLKEDYFKKIECFDSVEISGVEDRFNASLGTYHDLLKIIKDKDFLDNEENEDILEDIVLTLTLFEDREMIEERLKTYAHLFDDKVMKQLKRRRYTGWGRLSRKLINGIRDKQSGKTILDFLKSDGFANRNFMQLIHDDSLTFKEDIQKAQVSGQGDSLHEHIANLAGSPAIKKGILQTVKVVDELVKVMGRHKPENIVIEMARENQTTQKGQKNSRERMKRIEEGIKELGSQILKEHPVENTQLQNEKLYLYYLQNGRDMYVDQELDINRLSDYDVDHIVPQSFLKDDSIDNKVLTRSDKARGKSDNVPSEEVVKKMKNYWRQLLNAKLITQRKFDNLTKAERGGLSELDKAGFIKRQLVETRQITKHVAQILDSRMNTKYDENDKLIREVKVITLKSKLVSDFRKDFQFYKVREINNYHHAHDAYLNAVVGTALIKKYPKLESEFVYGDYKVYDVRKMIAKSEQEIGKATAKYFFYSNIMNFFKTEITLANGEIRKRPLIETNGETGEIVWDKGRDFATVRKVLSMPQVNIVKKTEVQTGGFSKESILPKRNSDKLIARKKDWDPKKYGGFDSPTVAYSVLVVAKVEKGKSKKLKSVKELLGITIMERSSFEKNPIDFLEAKGYKEVKKDLIIKLPKYSLFELENGRKRMLASAGELQKGNELALPSKYVNFLYLASHYEKLKGSPEDNEQKQLFVEQHKHYLDEIIEQISEFSKRVILADANLDKVLSAYNKHRDKPIREQAENIIHLFTLTNLGAPAAFKYFDTTIDRKRYTSTKEVLDATLIHQSITGLYETRIDLSQLGGDGGEAAAKGSSGGTVSLQDEHRLFDIPVTTSLPDVWLQDFPQAWAETGGLGRAKCQAPIIIDLKPTAVPVSIKQYPMSLEAHMGIRQHIIKFLELGVLRPCRSPWNTPLLPVKKPGTQDYRPVQDLREINKRTVDIHPTVPNPYNLLSTLKPDYSWYTVLDLKDAFFCLPLAPQSQELFAFEWKDPERGISGQLTWTRLPQGFKNSPTLFNEALHRDLTDFRTQHPEVTLLQYVDDLLLAAPTKKACTQGTRHLLQELGEKGYRASAKKAQICQTKVTYLGYILSEGKRWLTPGRIETVARIPPPRNPREVREFLGKAGFCRLFIPGFAELAAPLYALTKPSTPFTWQTEHQLAFEALKKALLSAPALGLPDTSKPFTLFLDERQGIAKGVLTQKLGPWKRPVAYLSKKLDPVAAGWPPCLRIMAATAMLVKDSAKLTLGQPLTVITPHTLEAIVRQPPDRWITNARLTHYQALLLDTDRVQFGPPVTLNPATLLPVPENQPSPHDCRQVLAETHGTREDLKDQELPDADHTWYTDGSSYLDSGTRRAGAAVVDGHNTIWAQSLPPGTSAQKAELIALTKALELSKGKKANIYTDSRYAFATAHTHGSIYERRGWLTSEGKEIKNKAEIIALLKALFLPQEVAIIHCPGHQKGQDPVAVGNRQADRVARQAAMAEVLTLATEPDNTSHITAGKRTADGSEFEKRTADGSEFESPKKKAKVE

SEQ ID NO: 1972 - protein, 2102 aa, synthetic construct
MPAAKRVKLDGGDKKYSIGLDIGTNSVGWAVITDEYKVPSKKFKVLGNTDRHSIKKNLIGALLFDSGETAEATRLKRTARRRYTRRKNRICYLQEIFSNEMAKVDDSFFHRLEESFLVEEDKKHERHPIFGNIVDEVAYHEKYPTIYHLRKKLVDSTDKADLRLIYLALAHMIKFRGHFLIEGDLNPDNSDVDKLFIQLVQTYNQLFEENPINASGVDAKAILSARLSKSRRLENLIAQLPGEKKNGLFGNLIALSLGLTPNFKSNFDLAEDAKLQLSKDTYDDDLDNLLAQIGDQYADLFLAAKNLSDAILLSDILRVNTEITKAPLSASMIKRYDEHHQDLTLLKALVRQQLPEKYKEIFFDQSKNGYAGYIDGGASQEEFYKFIKPILEKMDGTEELLVKLNREDLLRKQRTFDNGSIPHQIHLGELHAILRRQEDFYPFLKDNREKIEKILTFRIPYYVGPLARGNSRFAWMTRKSEETITPWNFEEVVDKGASAQSFIERMTNFDKNLPNEKVLPKHSLLYEYFTVYNELTKVKYVTEGMRKPAFLSGEQKKAIVDLLFKTNRKVTVKQLKEDYFKKIECFDSVEISGVEDRFNASLGTYHDLLKIIKDKDFLDNEENEDILEDIVLTLTLFEDREMIEERLKTYAHLFDDKVMKQLKRRRYTGWGRLSRKLINGIRDKQSGKTILDFLKSDGFANRNFMQLIHDDSLTFKEDIQKAQVSGQGDSLHEHIANLAGSPAIKKGILQTVKVVDELVKVMGRHKPENIVIEMARENQTTQKGQKNSRERMKRIEEGIKELGSQILKEHPVENTQLQNEKLYLYYLQNGRDMYVDQELDINRLSDYDVDHIVPQSFLKDDSIDNKVLTRSDKARGKSDNVPSEEVVKKMKNYWRQLLNAKLITQRKFDNLTKAERGGLSELDKAGFIKRQLVETRQITKHVAQILDSRMNTKYDENDKLIREVKVITLKSKLVSDFRKDFQFYKVREINNYHHAHDAYLNAVVGTALIKKYPKLESEFVYGDYKVYDVRKMIAKSEQEIGKATAKYFFYSNIMNFFKTEITLANGEIRKRPLIETNGETGEIVWDKGRDFATVRKVLSMPQVNIVKKTEVQTGGFSKESILPKRNSDKLIARKKDWDPKKYGGFDSPTVAYSVLVVAKVEKGKSKKLKSVKELLGITIMERSSFEKNPIDFLEAKGYKEVKKDLIIKLPKYSLFELENGRKRMLASAGELQKGNELALPSKYVNFLYLASHYEKLKGSPEDNEQKQLFVEQHKHYLDEIIEQISEFSKRVILADANLDKVLSAYNKHRDKPIREQAENIIHLFTLTNLGAPAAFKYFDTTIDRKRYTSTKEVLDATLIHQSITGLYETRIDLSQLGGDGGGSSEAAAKGGGGGTVSLQDEHRLFDIPVTTSLPDVWLQDFPQAWAETGGLGRAKCQAPIIIDLKPTAVPVSIKQYPMSLEAHMGIRQHIIKFLELGVLRPCRSPWNTPLLPVKKPGTQDYRPVQDLREINKRTVDIHPTVPNPYNLLSTLKPDYSWYTVLDLKDAFFCLPLAPQSQELFAFEWKDPERGISGQLTWTRLPQGFKNSPTLFNEALHRDLTDFRTQHPEVTLLQYVDDLLLAAPTKKACTQGTRHLLQELGEKGYRASAKKAQICQTKVTYLGYILSEGKRWLTPGRIETVARIPPPRNPREVREFLGKAGFCRLFIPGFAELAAPLYALTKPSTPFTWQTEHQLAFEALKKALLSAPALGLPDTSKPFTLFLDERQGIAKGVLTQKLGPWKRPVAYLSKKLDPVAAGWPPCLRIMAATAMLVKDSAKLTLGQPLTVITPHTLEAIVRQPPDRWITNARLTHYQALLLDTDRVQFGPPVTLNPATLLPVPENQPSPHDCRQVLAETHGTREDLKDQELPDADHTWYTDGSSYLDSGTRRAGAAVVDGHNTIWAQSLPPGTSAQKAELIALTKALELSKGKKANIYTDSRYAFATAHTHGSIYERRGWLTSEGKEIKNKAEIIALLKALFLPQEVAIIHCPGHQKGQDPVAVGNRQADRVARQAAMAEVLTLATEPDNTSHITAGKRTADGSEFEKRTADGSEFESPKKKAKVE

SEQ ID NO: 1973 - protein, 2102 aa, synthetic construct
MPAAKRVKLDGGDKKYSIGLDIGTNSVGWAVITDEYKVPSKKFKVLGNTDRHSIKKNLIGALLFDSGETAEATRLKRTARRRYTRRKNRICYLQEIFSNEMAKVDDSFFHRLEESFLVEEDKKHERHPIFGNIVDEVAYHEKYPTIYHLRKKLVDSTDKADLRLIYLALAHMIKFRGHFLIEGDLNPDNSDVDKLFIQLVQTYNQLFEENPINASGVDAKAILSARLSKSRRLENLIAQLPGEKKNGLFGNLIALSLGLTPNFKSNFDLAEDAKLQLSKDTYDDDLDNLLAQIGDQYADLFLAAKNLSDAILLSDILRVNTEITKAPLSASMIKRYDEHHQDLTLLKALVRQQLPEKYKEIFFDQSKNGYAGYIDGGASQEEFYKFIKPILEKMDGTEELLVKLNREDLLRKQRTFDNGSIPHQIHLGELHAILRRQEDFYPFLKDNREKIEKILTFRIPYYVGPLARGNSRFAWMTRKSEETITPWNFEEVVDKGASAQSFIERMTNFDKNLPNEKVLPKHSLLYEYFTVYNELTKVKYVTEGMRKPAFLSGEQKKAIVDLLFKTNRKVTVKQLKEDYFKKIECFDSVEISGVEDRFNASLGTYHDLLKIIKDKDFLDNEENEDILEDIVLTLTLFEDREMIEERLKTYAHLFDDKVMKQLKRRRYTGWGRLSRKLINGIRDKQSGKTILDFLKSDGFANRNFMQLIHDDSLTFKEDIQKAQVSGQGDSLHEHIANLAGSPAIKKGILQTVKVVDELVKVMGRHKPENIVIEMARENQTTQKGQKNSRERMKRIEEGIKELGSQILKEHPVENTQLQNEKLYLYYLQNGRDMYVDQELDINRLSDYDVDHIVPQSFLKDDSIDNKVLTRSDKARGKSDNVPSEEVVKKMKNYWRQLLNAKLITQRKFDNLTKAERGGLSELDKAGFIKRQLVETRQITKHVAQILDSRMNTKYDENDKLIREVKVITLKSKLVSDFRKDFQFYKVREINNYHHAHDAYLNAVVGTALIKKYPKLESEFVYGDYKVYDVRKMIAKSEQEIGKATAKYFFYSNIMNFFKTEITLANGEIRKRPLIETNGETGEIVWDKGRDFATVRKVLSMPQVNIVKKTEVQTGGFSKESILPKRNSDKLIARKKDWDPKKYGGFDSPTVAYSVLVVAKVEKGKSKKLKSVKELLGITIMERSSFEKNPIDFLEAKGYKEVKKDLIIKLPKYSLFELENGRKRMLASAGELQKGNELALPSKYVNFLYLASHYEKLKGSPEDNEQKQLFVEQHKHYLDEIIEQISEFSKRVILADANLDKVLSAYNKHRDKPIREQAENIIHLFTLTNLGAPAAFKYFDTTIDRKRYTSTKEVLDATLIHQSITGLYETRIDLSQLGGDGGPAPEAAAKGGGGGTVSLQDEHRLFDIPVTTSLPDVWLQDFPQAWAETGGLGRAKCQAPIIIDLKPTAVPVSIKQYPMSLEAHMGIRQHIIKFLELGVLRPCRSPWNTPLLPVKKPGTQDYRPVQDLREINKRTVDIHPTVPNPYNLLSTLKPDYSWYTVLDLKDAFFCLPLAPQSQELFAFEWKDPERGISGQLTWTRLPQGFKNSPTLFNEALHRDLTDFRTQHPEVTLLQYVDDLLLAAPTKKACTQGTRHLLQELGEKGYRASAKKAQICQTKVTYLGYILSEGKRWLTPGRIETVARIPPPRNPREVREFLGKAGFCRLFIPGFAELAAPLYALTKPSTPFTWQTEHQLAFEALKKALLSAPALGLPDTSKPFTLFLDERQGIAKGVLTQKLGPWKRPVAYLSKKLDPVAAGWPPCLRIMAATAMLVKDSAKLTLGQPLTVITPHTLEAIVRQPPDRWITNARLTHYQALLLDTDRVQFGPPVTLNPATLLPVPENQPSPHDCRQVLAETHGTREDLKDQELPDADHTWYTDGSSYLDSGTRRAGAAVVDGHNTIWAQSLPPGTSAQKAELIALTKALELSKGKKANIYTDSRYAFATAHTHGSIYERRGWLTSEGKEIKNKAEIIALLKALFLPQEVAIIHCPGHQKGQDPVAVGNRQADRVARQAAMAEVLTLATEPDNTSHITAGKRTADGSEFEKRTADGSEFESPKKKAKVE

SEQ ID NO: 1974 - protein, 2100 aa, synthetic construct
MPAAKRVKLDGGDKKYSIGLDIGTNSVGWAVITDEYKVPSKKFKVLGNTDRHSIKKNLIGALLFDSGETAEATRLKRTARRRYTRRKNRICYLQEIFSNEMAKVDDSFFHRLEESFLVEEDKKHERHPIFGNIVDEVAYHEKYPTIYHLRKKLVDSTDKADLRLIYLALAHMIKFRGHFLIEGDLNPDNSDVDKLFIQLVQTYNQLFEENPINASGVDAKAILSARLSKSRRLENLIAQLPGEKKNGLFGNLIALSLGLTPNFKSNFDLAEDAKLQLSKDTYDDDLDNLLAQIGDQYADLFLAAKNLSDAILLSDILRVNTEITKAPLSASMIKRYDEHHQDLTLLKALVRQQLPEKYKEIFFDQSKNGYAGYIDGGASQEEFYKFIKPILEKMDGTEELLVKLNREDLLRKQRTFDNGSIPHQIHLGELHAILRRQEDFYPFLKDNREKIEKILTFRIPYYVGPLARGNSRFAWMTRKSEETITPWNFEEVVDKGASAQSFIERMTNFDKNLPNEKVLPKHSLLYEYFTVYNELTKVKYVTEGMRKPAFLSGEQKKAIVDLLFKTNRKVTVKQLKEDYFKKIECFDSVEISGVEDRFNASLGTYHDLLKIIKDKDFLDNEENEDILEDIVLTLTLFEDREMIEERLKTYAHLFDDKVMKQLKRRRYTGWGRLSRKLINGIRDKQSGKTILDFLKSDGFANRNFMQLIHDDSLTFKEDIQKAQVSGQGDSLHEHIANLAGSPAIKKGILQTVKVVDELVKVMGRHKPENIVIEMARENQTTQKGQKNSRERMKRIEEGIKELGSQILKEHPVENTQLQNEKLYLYYLQNGRDMYVDQELDINRLSDYDVDHIVPQSFLKDDSIDNKVLTRSDKARGKSDNVPSEEVVKKMKNYWRQLLNAKLITQRKFDNLTKAERGGLSELDKAGFIKRQLVETRQITKHVAQILDSRMNTKYDENDKLIREVKVITLKSKLVSDFRKDFQFYKVREINNYHHAHDAYLNAVVGTALIKKYPKLESEFVYGDYKVYDVRKMIAKSEQEIGKATAKYFFYSNIMNFFKTEITLANGEIRKRPLIETNGETGEIVWDKGRDFATVRKVLSMPQVNIVKKTEVQTGGFSKESILPKRNSDKLIARKKDWDPKKYGGFDSPTVAYSVLVVAKVEKGKSKKLKSVKELLGITIMERSSFEKNPIDFLEAKGYKEVKKDLIIKLPKYSLFELENGRKRMLASAGELQKGNELALPSKYVNFLYLASHYEKLKGSPEDNEQKQLFVEQHKHYLDEIIEQISEFSKRVILADANLDKVLSAYNKHRDKPIREQAENIIHLFTLTNLGAPAAFKYFDTTIDRKRYTSTKEVLDATLIHQSITGLYETRIDLSQLGGDGGGGSGSSGGGGGTVSLQDEHRLFDIPVTTSLPDVWLQDFPQAWAETGGLGRAKCQAPIIIDLKPTAVPVSIKQYPMSLEAHMGIRQHIIKFLELGVLRPCRSPWNTPLLPVKKPGTQDYRPVQDLREINKRTVDIHPTVPNPYNLLSTLKPDYSWYTVLDLKDAFFCLPLAPQSQELFAFEWKDPERGISGQLTWTRLPQGFKNSPTLFNEALHRDLTDFRTQHPEVTLLQYVDDLLLAAPTKKACTQGTRHLLQELGEKGYRASAKKAQICQTKVTYLGYILSEGKRWLTPGRIETVARIPPPRNPREVREFLGKAGFCRLFIPGFAELAAPLYALTKPSTPFTWQTEHQLAFEALKKALLSAPALGLPDTSKPFTLFLDERQGIAKGVLTQKLGPWKRPVAYLSKKLDPVAAGWPPCLRIMAATAMLVKDSAKLTLGQPLTVITPHTLEAIVRQPPDRWITNARLTHYQALLLDTDRVQFGPPVTLNPATLLPVPENQPSPHDCRQVLAETHGTREDLKDQELPDADHTWYTDGSSYLDSGTRRAGAAVVDGHNTIWAQSLPPGTSAQKAELIALTKALELSKGKKANIYTDSRYAFATAHTHGSIYERRGWLTSEGKEIKNKAEIIALLKALFLPQEVAIIHCPGHQKGQDPVAVGNRQADRVARQAAMAEVLTLATEPDNTSHITAGKRTADGSEFEKRTADGSEFESPKKKAKVE

SEQ ID NO: 1975 - protein, 2102 aa, synthetic construct
MPAAKRVKLDGGDKKYSIGLDIGTNSVGWAVITDEYKVPSKKFKVLGNTDRHSIKKNLIGALLFDSGETAEATRLKRTARRRYTRRKNRICYLQEIFSNEMAKVDDSFFHRLEESFLVEEDKKHERHPIFGNIVDEVAYHEKYPTIYHLRKKLVDSTDKADLRLIYLALAHMIKFRGHFLIEGDLNPDNSDVDKLFIQLVQTYNQLFEENPINASGVDAKAILSARLSKSRRLENLIAQLPGEKKNGLFGNLIALSLGLTPNFKSNFDLAEDAKLQLSKDTYDDDLDNLLAQIGDQYADLFLAAKNLSDAILLSDILRVNTEITKAPLSASMIKRYDEHHQDLTLLKALVRQQLPEKYKEIFFDQSKNGYAGYIDGGASQEEFYKFIKPILEKMDGTEELLVKLNREDLLRKQRTFDNGSIPHQIHLGELHAILRRQEDFYPFLKDNREKIEKILTFRIPYYVGPLARGNSRFAWMTRKSEETITPWNFEEVVDKGASAQSFIERMTNFDKNLPNEKVLPKHSLLYEYFTVYNELTKVKYVTEGMRKPAFLSGEQKKAIVDLLFKTNRKVTVKQLKEDYFKKIECFDSVEISGVEDRFNASLGTYHDLLKIIKDKDFLDNEENEDILEDIVLTLTLFEDREMIEERLKTYAHLFDDKVMKQLKRRRYTGWGRLSRKLINGIRDKQSGKTILDFLKSDGFANRNFMQLIHDDSLTFKEDIQKAQVSGQGDSLHEHIANLAGSPAIKKGILQTVKVVDELVKVMGRHKPENIVIEMARENQTTQKGQKNSRERMKRIEEGIKELGSQILKEHPVENTQLQNEKLYLYYLQNGRDMYVDQELDINRLSDYDVDHIVPQSFLKDDSIDNKVLTRSDKARGKSDNVPSEEVVKKMKNYWRQLLNAKLITQRKFDNLTKAERGGLSELDKAGFIKRQLVETRQITKHVAQILDSRMNTKYDENDKLIREVKVITLKSKLVSDFRKDFQFYKVREINNYHHAHDAYLNAVVGTALIKKYPKLESEFVYGDYKVYDVRKMIAKSEQEIGKATAKYFFYSNIMNFFKTEITLANGEIRKRPLIETNGETGEIVWDKGRDFATVRKVLSMPQVNIVKKTEVQTGGFSKESILPKRNSDKLIARKKDWDPKKYGGFDSPTVAYSVLVVAKVEKGKSKKLKSVKELLGITIMERSSFEKNPIDFLEAKGYKEVKKDLIIKLPKYSLFELENGRKRMLASAGELQKGNELALPSKYVNFLYLASHYEKLKGSPEDNEQKQLFVEQHKHYLDEIIEQISEFSKRVILADANLDKVLSAYNKHRDKPIREQAENIIHLFTLTNLGAPAAFKYFDTTIDRKRYTSTKEVLDATLIHQSITGLYETRIDLSQLGGDGGGGGGSSEAAAKGGTVSLQDEHRLFDIPVTTSLPDVWLQDFPQAWAETGGLGRAKCQAPIIIDLKPTAVPVSIKQYPMSLEAHMGIRQHIIKFLELGVLRPCRSPWNTPLLPVKKPGTQDYRPVQDLREINKRTVDIHPTVPNPYNLLSTLKPDYSWYTVLDLKDAFFCLPLAPQSQELFAFEWKDPERGISGQLTWTRLPQGFKNSPTLFNEALHRDLTDFRTQHPEVTLLQYVDDLLLAAPTKKACTQGTRHLLQELGEKGYRASAKKAQICQTKVTYLGYILSEGKRWLTPGRIETVARIPPPRNPREVREFLGKAGFCRLFIPGFAELAAPLYALTKPSTPFTWQTEHQLAFEALKKALLSAPALGLPDTSKPFTLFLDERQGIAKGVLTQKLGPWKRPVAYLSKKLDPVAAGWPPCLRIMAATAMLVKDSAKLTLGQPLTVITPHTLEAIVRQPPDRWITNARLTHYQALLLDTDRVQFGPPVTLNPATLLPVPENQPSPHDCRQVLAETHGTREDLKDQELPDADHTWYTDGSSYLDSGTRRAGAAVVDGHNTIWAQSLPPGTSAQKAELIALTKALELSKGKKANIYTDSRYAFATAHTHGSIYERRGWLTSEGKEIKNKAEIIALLKALFLPQEVAIIHCPGHQKGQDPVAVGNRQADRVARQAAMAEVLTLATEPDNTSHITAGKRTADGSEFEKRTADGSEFESPKKKAKVE

SEQ ID NO: 1976 - protein, 2100 aa, synthetic construct
MPAAKRVKLDGGDKKYSIGLDIGTNSVGWAVITDEYKVPSKKFKVLGNTDRHSIKKNLIGALLFDSGETAEATRLKRTARRRYTRRKNRICYLQEIFSNEMAKVDDSFFHRLEESFLVEEDKKHERHPIFGNIVDEVAYHEKYPTIYHLRKKLVDSTDKADLRLIYLALAHMIKFRGHFLIEGDLNPDNSDVDKLFIQLVQTYNQLFEENPINASGVDAKAILSARLSKSRRLENLIAQLPGEKKNGLFGNLIALSLGLTPNFKSNFDLAEDAKLQLSKDTYDDDLDNLLAQIGDQYADLFLAAKNLSDAILLSDILRVNTEITKAPLSASMIKRYDEHHQDLTLLKALVRQQLPEKYKEIFFDQSKNGYAGYIDGGASQEEFYKFIKPILEKMDGTEELLVKLNREDLLRKQRTFDNGSIPHQIHLGELHAILRRQEDFYPFLKDNREKIEKILTFRIPYYVGPLARGNSRFAWMTRKSEETITPWNFEEVVDKGASAQSFIERMTNFDKNLPNEKVLPKHSLLYEYFTVYNELTKVKYVTEGMRKPAFLSGEQKKAIVDLLFKTNRKVTVKQLKEDYFKKIECFDSVEISGVEDRFNASLGTYHDLLKIIKDKDFLDNEENEDILEDIVLTLTLFEDREMIEERLKTYAHLFDDKVMKQLKRRRYTGWGRLSRKLINGIRDKQSGKTILDFLKSDGFANRNFMQLIHDDSLTFKEDIQKAQVSGQGDSLHEHIANLAGSPAIKKGILQTVKVVDELVKVMGRHKPENIVIEMARENQTTQKGQKNSRERMKRIEEGIKELGSQILKEHPVENTQLQNEKLYLYYLQNGRDMYVDQELDINRLSDYDVDHIVPQSFLKDDSIDNKVLTRSDKARGKSDNVPSEEVVKKMKNYWRQLLNAKLITQRKFDNLTKAERGGLSELDKAGFIKRQLVETRQITKHVAQILDSRMNTKYDENDKLIREVKVITLKSKLVSDFRKDFQFYKVREINNYHHAHDAYLNAVVGTALIKKYPKLESEFVYGDYKVYDVRKMIAKSEQEIGKATAKYFFYSNIMNFFKTEITLANGEIRKRPLIETNGETGEIVWDKGRDFATVRKVLSMPQVNIVKKTEVQTGGFSKESILPKRNSDKLIARKKDWDPKKYGGFDSPTVAYSVLVVAKVEKGKSKKLKSVKELLGITIMERSSFEKNPIDFLEAKGYKEVKKDLIIKLPKYSLFELENGRKRMLASAGELQKGNELALPSKYVNFLYLASHYEKLKGSPEDNEQKQLFVEQHKHYLDEIIEQISEFSKRVILADANLDKVLSAYNKHRDKPIREQAENIIHLFTLTNLGAPAAFKYFDTTIDRKRYTSTKEVLDATLIHQSITGLYETRIDLSQLGGDGGGGSPAPGGGGGTVSLQDEHRLFDIPVTTSLPDVWLQDFPQAWAETGGLGRAKCQAPIIIDLKPTAVPVSIKQYPMSLEAHMGIRQHIIKFLELGVLRPCRSPWNTPLLPVKKPGTQDYRPVQDLREINKRTVDIHPTVPNPYNLLSTLKPDYSWYTVLDLKDAFFCLPLAPQSQELFAFEWKDPERGISGQLTWTRLPQGFKNSPTLFNEALHRDLTDFRTQHPEVTLLQYVDDLLLAAPTKKACTQGTRHLLQELGEKGYRASAKKAQICQTKVTYLGYILSEGKRWLTPGRIETVARIPPPRNPREVREFLGKAGFCRLFIPGFAELAAPLYALTKPSTPFTWQTEHQLAFEALKKALLSAPALGLPDTSKPFTLFLDERQGIAKGVLTQKLGPWKRPVAYLSKKLDPVAAGWPPCLRIMAATAMLVKDSAKLTLGQPLTVITPHTLEAIVRQPPDRWITNARLTHYQALLLDTDRVQFGPPVTLNPATLLPVPENQPSPHDCRQVLAETHGTREDLKDQELPDADHTWYTDGSSYLDSGTRRAGAAVVDGHNTIWAQSLPPGTSAQKAELIALTKALELSKGKKANIYTDSRYAFATAHTHGSIYERRGWLTSEGKEIKNKAEIIALLKALFLPQEVAIIHCPGHQKGQDPVAVGNRQADRVARQAAMAEVLTLATEPDNTSHITAGKRTADGSEFEKRTADGSEFESPKKKAKVE

SEQ ID NO: 1977 - protein, 2102 aa, synthetic construct
MPAAKRVKLDGGDKKYSIGLDIGTNSVGWAVITDEYKVPSKKFKVLGNTDRHSIKKNLIGALLFDSGETAEATRLKRTARRRYTRRKNRICYLQEIFSNEMAKVDDSFFHRLEESFLVEEDKKHERHPIFGNIVDEVAYHEKYPTIYHLRKKLVDSTDKADLRLIYLALAHMIKFRGHFLIEGDLNPDNSDVDKLFIQLVQTYNQLFEENPINASGVDAKAILSARLSKSRRLENLIAQLPGEKKNGLFGNLIALSLGLTPNFKSNFDLAEDAKLQLSKDTYDDDLDNLLAQIGDQYADLFLAAKNLSDAILLSDILRVNTEITKAPLSASMIKRYDEHHQDLTLLKALVRQQLPEKYKEIFFDQSKNGYAGYIDGGASQEEFYKFIKPILEKMDGTEELLVKLNREDLLRKQRTFDNGSIPHQIHLGELHAILRRQEDFYPFLKDNREKIEKILTFRIPYYVGPLARGNSRFAWMTRKSEETITPWNFEEVVDKGASAQSFIERMTNFDKNLPNEKVLPKHSLLYEYFTVYNELTKVKYVTEGMRKPAFLSGEQKKAIVDLLFKTNRKVTVKQLKEDYFKKIECFDSVEISGVEDRFNASLGTYHDLLKIIKDKDFLDNEENEDILEDIVLTLTLFEDREMIEERLKTYAHLFDDKVMKQLKRRRYTGWGRLSRKLINGIRDKQSGKTILDFLKSDGFANRNFMQLIHDDSLTFKEDIQKAQVSGQGDSLHEHIANLAGSPAIKKGILQTVKVVDELVKVMGRHKPENIVIEMARENQTTQKGQKNSRERMKRIEEGIKELGSQILKEHPVENTQLQNEKLYLYYLQNGRDMYVDQELDINRLSDYDVDHIVPQSFLKDDSIDNKVLTRSDKARGKSDNVPSEEVVKKMKNYWRQLLNAKLITQRKFDNLTKAERGGLSELDKAGFIKRQLVETRQITKHVAQILDSRMNTKYDENDKLIREVKVITLKSKLVSDFRKDFQFYKVREINNYHHAHDAYLNAVVGTALIKKYPKLESEFVYGDYKVYDVRKMIAKSEQEIGKATAKYFFYSNIMNFFKTEITLANGEIRKRPLIETNGETGEIVWDKGRDFATVRKVLSMPQVNIVKKTEVQTGGFSKESILPKRNSDKLIARKKDWDPKKYGGFDSPTVAYSVLVVAKVEKGKSKKLKSVKELLGITIMERSSFEKNPIDFLEAKGYKEVKKDLIIKLPKYSLFELENGRKRMLASAGELQKGNELALPSKYVNFLYLASHYEKLKGSPEDNEQKQLFVEQHKHYLDEIIEQISEFSKRVILADANLDKVLSAYNKHRDKPIREQAENIIHLFTLTNLGAPAAFKYFDTTIDRKRYTSTKEVLDATLIHQSITGLYETRIDLSQLGGDGGPAPGGGEAAAKGGTVSLQDEHRLFDIPVTTSLPDVWLQDFPQAWAETGGLGRAKCQAPIIIDLKPTAVPVSIKQYPMSLEAHMGIRQHIIKFLELGVLRPCRSPWNTPLLPVKKPGTQDYRPVQDLREINKRTVDIHPTVPNPYNLLSTLKPDYSWYTVLDLKDAFFCLPLAPQSQELFAFEWKDPERGISGQLTWTRLPQGFKNSPTLFNEALHRDLTDFRTQHPEVTLLQYVDDLLLAAPTKKACTQGTRHLLQELGEKGYRASAKKAQICQTKVTYLGYILSEGKRWLTPGRIETVARIPPPRNPREVREFLGKAGFCRLFIPGFAELAAPLYALTKPSTPFTWQTEHQLAFEALKKALLSAPALGLPDTSKPFTLFLDERQGIAKGVLTQKLGPWKRPVAYLSKKLDPVAAGWPPCLRIMAATAMLVKDSAKLTLGQPLTVITPHTLEAIVRQPPDRWITNARLTHYQALLLDTDRVQFGPPVTLNPATLLPVPENQPSPHDCRQVLAETHGTREDLKDQELPDADHTWYTDGSSYLDSGTRRAGAAVVDGHNTIWAQSLPPGTSAQKAELIALTKALELSKGKKANIYTDSRYAFATAHTHGSIYERRGWLTSEGKEIKNKAEIIALLKALFLPQEVAIIHCPGHQKGQDPVAVGNRQADRVARQAAMAEVLTLATEPDNTSHITAGKRTADGSEFEKRTADGSEFESPKKKAKVE

SEQ ID NO: 1978 - protein, 2100 aa, synthetic construct
MPAAKRVKLDGGDKKYSIGLDIGTNSVGWAVITDEYKVPSKKFKVLGNTDRHSIKKNLIGALLFDSGETAEATRLKRTARRRYTRRKNRICYLQEIFSNEMAKVDDSFFHRLEESFLVEEDKKHERHPIFGNIVDEVAYHEKYPTIYHLRKKLVDSTDKADLRLIYLALAHMIKFRGHFLIEGDLNPDNSDVDKLFIQLVQTYNQLFEENPINASGVDAKAILSARLSKSRRLENLIAQLPGEKKNGLFGNLIALSLGLTPNFKSNFDLAEDAKLQLSKDTYDDDLDNLLAQIGDQYADLFLAAKNLSDAILLSDILRVNTEITKAPLSASMIKRYDEHHQDLTLLKALVRQQLPEKYKEIFFDQSKNGYAGYIDGGASQEEFYKFIKPILEKMDGTEELLVKLNREDLLRKQRTFDNGSIPHQIHLGELHAILRRQEDFYPFLKDNREKIEKILTFRIPYYVGPLARGNSRFAWMTRKSEETITPWNFEEVVDKGASAQSFIERMTNFDKNLPNEKVLPKHSLLYEYFTVYNELTKVKYVTEGMRKPAFLSGEQKKAIVDLLFKTNRKVTVKQLKEDYFKKIECFDSVEISGVEDRFNASLGTYHDLLKIIKDKDFLDNEENEDILEDIVLTLTLFEDREMIEERLKTYAHLFDDKVMKQLKRRRYTGWGRLSRKLINGIRDKQSGKTILDFLKSDGFANRNFMQLIHDDSLTFKEDIQKAQVSGQGDSLHEHIANLAGSPAIKKGILQTVKVVDELVKVMGRHKPENIVIEMARENQTTQKGQKNSRERMKRIEEGIKELGSQILKEHPVENTQLQNEKLYLYYLQNGRDMYVDQELDINRLSDYDVDHIVPQSFLKDDSIDNKVLTRSDKARGKSDNVPSEEVVKKMKNYWRQLLNAKLITQRKFDNLTKAERGGLSELDKAGFIKRQLVETRQITKHVAQILDSRMNTKYDENDKLIREVKVITLKSKLVSDFRKDFQFYKVREINNYHHAHDAYLNAVVGTALIKKYPKLESEFVYGDYKVYDVRKMIAKSEQEIGKATAKYFFYSNIMNFFKTEITLANGEIRKRPLIETNGETGEIVWDKGRDFATVRKVLSMPQVNIVKKTEVQTGGFSKESILPKRNSDKLIARKKDWDPKKYGGFDSPTVAYSVLVVAKVEKGKSKKLKSVKELLGITIMERSSFEKNPIDFLEAKGYKEVKKDLIIKLPKYSLFELENGRKRMLASAGELQKGNELALPSKYVNFLYLASHYEKLKGSPEDNEQKQLFVEQHKHYLDEIIEQISEFSKRVILADANLDKVLSAYNKHRDKPIREQAENIIHLFTLTNLGAPAAFKYFDTTIDRKRYTSTKEVLDATLIHQSITGLYETRIDLSQLGGDGGPAPAPAPAPGGTVSLQDEHRLFDIPVTTSLPDVWLQDFPQAWAETGGLGRAKCQAPIIIDLKPTAVPVSIKQYPMSLEAHMGIRQHIIKFLELGVLRPCRSPWNTPLLPVKKPGTQDYRPVQDLREINKRTVDIHPTVPNPYNLLSTLKPDYSWYTVLDLKDAFFCLPLAPQSQELFAFEWKDPERGISGQLTWTRLPQGFKNSPTLFNEALHRDLTDFRTQHPEVTLLQYVDDLLLAAPTKKACTQGTRHLLQELGEKGYRASAKKAQICQTKVTYLGYILSEGKRWLTPGRIETVARIPPPRNPREVREFLGKAGFCRLFIPGFAELAAPLYALTKPSTPFTWQTEHQLAFEALKKALLSAPALGLPDTSKPFTLFLDERQGIAKGVLTQKLGPWKRPVAYLSKKLDPVAAGWPPCLRIMAATAMLVKDSAKLTLGQPLTVITPHTLEAIVRQPPDRWITNARLTHYQALLLDTDRVQFGPPVTLNPATLLPVPENQPSPHDCRQVLAETHGTREDLKDQELPDADHTWYTDGSSYLDSGTRRAGAAVVDGHNTIWAQSLPPGTSAQKAELIALTKALELSKGKKANIYTDSRYAFATAHTHGSIYERRGWLTSEGKEIKNKAEIIALLKALFLPQEVAIIHCPGHQKGQDPVAVGNRQADRVARQAAMAEVLTLATEPDNTSHITAGKRTADGSEFEKRTADGSEFESPKKKAKVE

SEQ ID NO: 1979 - protein, 2099 aa, synthetic construct
MPAAKRVKLDGGDKKYSIGLDIGTNSVGWAVITDEYKVPSKKFKVLGNTDRHSIKKNLIGALLFDSGETAEATRLKRTARRRYTRRKNRICYLQEIFSNEMAKVDDSFFHRLEESFLVEEDKKHERHPIFGNIVDEVAYHEKYPTIYHLRKKLVDSTDKADLRLIYLALAHMIKFRGHFLIEGDLNPDNSDVDKLFIQLVQTYNQLFEENPINASGVDAKAILSARLSKSRRLENLIAQLPGEKKNGLFGNLIALSLGLTPNFKSNFDLAEDAKLQLSKDTYDDDLDNLLAQIGDQYADLFLAAKNLSDAILLSDILRVNTEITKAPLSASMIKRYDEHHQDLTLLKALVRQQLPEKYKEIFFDQSKNGYAGYIDGGASQEEFYKFIKPILEKMDGTEELLVKLNREDLLRKQRTFDNGSIPHQIHLGELHAILRRQEDFYPFLKDNREKIEKILTFRIPYYVGPLARGNSRFAWMTRKSEETITPWNFEEVVDKGASAQSFIERMTNFDKNLPNEKVLPKHSLLYEYFTVYNELTKVKYVTEGMRKPAFLSGEQKKAIVDLLFKTNRKVTVKQLKEDYFKKIECFDSVEISGVEDRFNASLGTYHDLLKIIKDKDFLDNEENEDILEDIVLTLTLFEDREMIEERLKTYAHLFDDKVMKQLKRRRYTGWGRLSRKLINGIRDKQSGKTILDFLKSDGFANRNFMQLIHDDSLTFKEDIQKAQVSGQGDSLHEHIANLAGSPAIKKGILQTVKVVDELVKVMGRHKPENIVIEMARENQTTQKGQKNSRERMKRIEEGIKELGSQILKEHPVENTQLQNEKLYLYYLQNGRDMYVDQELDINRLSDYDVDHIVPQSFLKDDSIDNKVLTRSDKARGKSDNVPSEEVVKKMKNYWRQLLNAKLITQRKFDNLTKAERGGLSELDKAGFIKRQLVETRQITKHVAQILDSRMNTKYDENDKLIREVKVITLKSKLVSDFRKDFQFYKVREINNYHHAHDAYLNAVVGTALIKKYPKLESEFVYGDYKVYDVRKMIAKSEQEIGKATAKYFFYSNIMNFFKTEITLANGEIRKRPLIETNGETGEIVWDKGRDFATVRKVLSMPQVNIVKKTEVQTGGFSKESILPKRNSDKLIARKKDWDPKKYGGFDSPTVAYSVLVVAKVEKGKSKKLKSVKELLGITIMERSSFEKNPIDFLEAKGYKEVKKDLIIKLPKYSLFELENGRKRMLASAGELQKGNELALPSKYVNFLYLASHYEKLKGSPEDNEQKQLFVEQHKHYLDEIIEQISEFSKRVILADANLDKVLSAYNKHRDKPIREQAENIIHLFTLTNLGAPAAFKYFDTTIDRKRYTSTKEVLDATLIHQSITGLYETRIDLSQLGGDGGGGGGGGGGGGTVSLQDEHRLFDIPVTTSLPDVWLQDFPQAWAETGGLGRAKCQAPIIIDLKPTAVPVSIKQYPMSLEAHMGIRQHIIKFLELGVLRPCRSPWNTPLLPVKKPGTQDYRPVQDLREINKRTVDIHPTVPNPYNLLSTLKPDYSWYTVLDLKDAFFCLPLAPQSQELFAFEWKDPERGISGQLTWTRLPQGFKNSPTLFNEALHRDLTDFRTQHPEVTLLQYVDDLLLAAPTKKACTQGTRHLLQELGEKGYRASAKKAQICQTKVTYLGYILSEGKRWLTPGRIETVARIPPPRNPREVREFLGKAGFCRLFIPGFAELAAPLYALTKPSTPFTWQTEHQLAFEALKKALLSAPALGLPDTSKPFTLFLDERQGIAKGVLTQKLGPWKRPVAYLSKKLDPVAAGWPPCLRIMAATAMLVKDSAKLTLGQPLTVITPHTLEAIVRQPPDRWITNARLTHYQALLLDTDRVQFGPPVTLNPATLLPVPENQPSPHDCRQVLAETHGTREDLKDQELPDADHTWYTDGSSYLDSGTRRAGAAVVDGHNTIWAQSLPPGTSAQKAELIALTKALELSKGKKANIYTDSRYAFATAHTHGSIYERRGWLTSEGKEIKNKAEIIALLKALFLPQEVAIIHCPGHQKGQDPVAVGNRQADRVARQAAMAEVLTLATEPDNTSHITAGKRTADGSEFEKRTADGSEFESPKKKAKVE

SEQ ID NO: 1980 - protein, 2107 aa, synthetic construct
MPAAKRVKLDGGDKKYSIGLDIGTNSVGWAVITDEYKVPSKKFKVLGNTDRHSIKKNLIGALLFDSGETAEATRLKRTARRRYTRRKNRICYLQEIFSNEMAKVDDSFFHRLEESFLVEEDKKHERHPIFGNIVDEVAYHEKYPTIYHLRKKLVDSTDKADLRLIYLALAHMIKFRGHFLIEGDLNPDNSDVDKLFIQLVQTYNQLFEENPINASGVDAKAILSARLSKSRRLENLIAQLPGEKKNGLFGNLIALSLGLTPNFKSNFDLAEDAKLQLSKDTYDDDLDNLLAQIGDQYADLFLAAKNLSDAILLSDILRVNTEITKAPLSASMIKRYDEHHQDLTLLKALVRQQLPEKYKEIFFDQSKNGYAGYIDGGASQEEFYKFIKPILEKMDGTEELLVKLNREDLLRKQRTFDNGSIPHQIHLGELHAILRRQEDFYPFLKDNREKIEKILTFRIPYYVGPLARGNSRFAWMTRKSEETITPWNFEEVVDKGASAQSFIERMTNFDKNLPNEKVLPKHSLLYEYFTVYNELTKVKYVTEGMRKPAFLSGEQKKAIVDLLFKTNRKVTVKQLKEDYFKKIECFDSVEISGVEDRFNASLGTYHDLLKIIKDKDFLDNEENEDILEDIVLTLTLFEDREMIEERLKTYAHLFDDKVMKQLKRRRYTGWGRLSRKLINGIRDKQSGKTILDFLKSDGFANRNFMQLIHDDSLTFKEDIQKAQVSGQGDSLHEHIANLAGSPAIKKGILQTVKVVDELVKVMGRHKPENIVIEMARENQTTQKGQKNSRERMKRIEEGIKELGSQILKEHPVENTQLQNEKLYLYYLQNGRDMYVDQELDINRLSDYDVDHIVPQSFLKDDSIDNKVLTRSDKARGKSDNVPSEEVVKKMKNYWRQLLNAKLITQRKFDNLTKAERGGLSELDKAGFIKRQLVETRQITKHVAQILDSRMNTKYDENDKLIREVKVITLKSKLVSDFRKDFQFYKVREINNYHHAHDAYLNAVVGTALIKKYPKLESEFVYGDYKVYDVRKMIAKSEQEIGKATAKYFFYSNIMNFFKTEITLANGEIRKRPLIETNGETGEIVWDKGRDFATVRKVLSMPQVNIVKKTEVQTGGFSKESILPKRNSDKLIARKKDWDPKKYGGFDSPTVAYSVLVVAKVEKGKSKKLKSVKELLGITIMERSSFEKNPIDFLEAKGYKEVKKDLIIKLPKYSLFELENGRKRMLASAGELQKGNELALPSKYVNFLYLASHYEKLKGSPEDNEQKQLFVEQHKHYLDEIIEQISEFSKRVILADANLDKVLSAYNKHRDKPIREQAENIIHLFTLTNLGAPAAFKYFDTTIDRKRYTSTKEVLDATLIHQSITGLYETRIDLSQLGGDGGSGSETPGTSESATPESGGTVSLQDEHRLFDIPVTTSLPDVWLQDFPQAWAETGGLGRAKCQAPIIIDLKPTAVPVSIKQYPMSLEAHMGIRQHIIKFLELGVLRPCRSPWNTPLLPVKKPGTQDYRPVQDLREINKRTVDIHPTVPNPYNLLSTLKPDYSWYTVLDLKDAFFCLPLAPQSQELFAFEWKDPERGISGQLTWTRLPQGFKNSPTLFNEALHRDLTDFRTQHPEVTLLQYVDDLLLAAPTKKACTQGTRHLLQELGEKGYRASAKKAQICQTKVTYLGYILSEGKRWLTPGRIETVARIPPPRNPREVREFLGKAGFCRLFIPGFAELAAPLYALTKPSTPFTWQTEHQLAFEALKKALLSAPALGLPDTSKPFTLFLDERQGIAKGVLTQKLGPWKRPVAYLSKKLDPVAAGWPPCLRIMAATAMLVKDSAKLTLGQPLTVITPHTLEAIVRQPPDRWITNARLTHYQALLLDTDRVQFGPPVTLNPATLLPVPENQPSPHDCRQVLAETHGTREDLKDQELPDADHTWYTDGSSYLDSGTRRAGAAVVDGHNTIWAQSLPPGTSAQKAELIALTKALELSKGKKANIYTDSRYAFATAHTHGSIYERRGWLTSEGKEIKNKAEIIALLKALFLPQEVAIIHCPGHQKGQDPVAVGNRQADRVARQAAMAEVLTLATEPDNTSHITAGKRTADGSEFEKRTADGSEFESPKKKAKVE

SEQ ID NO: 1981 - protein, 2102 aa, synthetic construct
MPAAKRVKLDGGDKKYSIGLDIGTNSVGWAVITDEYKVPSKKFKVLGNTDRHSIKKNLIGALLFDSGETAEATRLKRTARRRYTRRKNRICYLQEIFSNEMAKVDDSFFHRLEESFLVEEDKKHERHPIFGNIVDEVAYHEKYPTIYHLRKKLVDSTDKADLRLIYLALAHMIKFRGHFLIEGDLNPDNSDVDKLFIQLVQTYNQLFEENPINASGVDAKAILSARLSKSRRLENLIAQLPGEKKNGLFGNLIALSLGLTPNFKSNFDLAEDAKLQLSKDTYDDDLDNLLAQIGDQYADLFLAAKNLSDAILLSDILRVNTEITKAPLSASMIKRYDEHHQDLTLLKALVRQQLPEKYKEIFFDQSKNGYAGYIDGGASQEEFYKFIKPILEKMDGTEELLVKLNREDLLRKQRTFDNGSIPHQIHLGELHAILRRQEDFYPFLKDNREKIEKILTFRIPYYVGPLARGNSRFAWMTRKSEETITPWNFEEVVDKGASAQSFIERMTNFDKNLPNEKVLPKHSLLYEYFTVYNELTKVKYVTEGMRKPAFLSGEQKKAIVDLLFKTNRKVTVKQLKEDYFKKIECFDSVEISGVEDRFNASLGTYHDLLKIIKDKDFLDNEENEDILEDIVLTLTLFEDREMIEERLKTYAHLFDDKVMKQLKRRRYTGWGRLSRKLINGIRDKQSGKTILDFLKSDGFANRNFMQLIHDDSLTFKEDIQKAQVSGQGDSLHEHIANLAGSPAIKKGILQTVKVVDELVKVMGRHKPENIVIEMARENQTTQKGQKNSRERMKRIEEGIKELGSQILKEHPVENTQLQNEKLYLYYLQNGRDMYVDQELDINRLSDYDVDHIVPQSFLKDDSIDNKVLTRSDKARGKSDNVPSEEVVKKMKNYWRQLLNAKLITQRKFDNLTKAERGGLSELDKAGFIKRQLVETRQITKHVAQILDSRMNTKYDENDKLIREVKVITLKSKLVSDFRKDFQFYKVREINNYHHAHDAYLNAVVGTALIKKYPKLESEFVYGDYKVYDVRKMIAKSEQEIGKATAKYFFYSNIMNFFKTEITLANGEIRKRPLIETNGETGEIVWDKGRDFATVRKVLSMPQVNIVKKTEVQTGGFSKESILPKRNSDKLIARKKDWDPKKYGGFDSPTVAYSVLVVAKVEKGKSKKLKSVKELLGITIMERSSFEKNPIDFLEAKGYKEVKKDLIIKLPKYSLFELENGRKRMLASAGELQKGNELALPSKYVNFLYLASHYEKLKGSPEDNEQKQLFVEQHKHYLDEIIEQISEFSKRVILADANLDKVLSAYNKHRDKPIREQAENIIHLFTLTNLGAPAAFKYFDTTIDRKRYTSTKEVLDATLIHQSITGLYETRIDLSQLGGDGGGSSPAPEAAAKGGTVSLQDEHRLFDIPVTTSLPDVWLQDFPQAWAETGGLGRAKCQAPIIIDLKPTAVPVSIKQYPMSLEAHMGIRQHIIKFLELGVLRPCRSPWNTPLLPVKKPGTQDYRPVQDLREINKRTVDIHPTVPNPYNLLSTLKPDYSWYTVLDLKDAFFCLPLAPQSQELFAFEWKDPERGISGQLTWTRLPQGFKNSPTLFNEALHRDLTDFRTQHPEVTLLQYVDDLLLAAPTKKACTQGTRHLLQELGEKGYRASAKKAQICQTKVTYLGYILSEGKRWLTPGRIETVARIPPPRNPREVREFLGKAGFCRLFIPGFAELAAPLYALTKPSTPFTWQTEHQLAFEALKKALLSAPALGLPDTSKPFTLFLDERQGIAKGVLTQKLGPWKRPVAYLSKKLDPVAAGWPPCLRIMAATAMLVKDSAKLTLGQPLTVITPHTLEAIVRQPPDRWITNARLTHYQALLLDTDRVQFGPPVTLNPATLLPVPENQPSPHDCRQVLAETHGTREDLKDQELPDADHTWYTDGSSYLDSGTRRAGAAVVDGHNTIWAQSLPPGTSAQKAELIALTKALELSKGKKANIYTDSRYAFATAHTHGSIYERRGWLTSEGKEIKNKAEIIALLKALFLPQEVAIIHCPGHQKGQDPVAVGNRQADRVARQAAMAEVLTLATEPDNTSHITAGKRTADGSEFEKRTADGSEFESPKKKAKVE

SEQ ID NO: 1982 - protein, 2100 aa, synthetic construct
MPAAKRVKLDGGDKKYSIGLDIGTNSVGWAVITDEYKVPSKKFKVLGNTDRHSIKKNLIGALLFDSGETAEATRLKRTARRRYTRRKNRICYLQEIFSNEMAKVDDSFFHRLEESFLVEEDKKHERHPIFGNIVDEVAYHEKYPTIYHLRKKLVDSTDKADLRLIYLALAHMIKFRGHFLIEGDLNPDNSDVDKLFIQLVQTYNQLFEENPINASGVDAKAILSARLSKSRRLENLIAQLPGEKKNGLFGNLIALSLGLTPNFKSNFDLAEDAKLQLSKDTYDDDLDNLLAQIGDQYADLFLAAKNLSDAILLSDILRVNTEITKAPLSASMIKRYDEHHQDLTLLKALVRQQLPEKYKEIFFDQSKNGYAGYIDGGASQEEFYKFIKPILEKMDGTEELLVKLNREDLLRKQRTFDNGSIPHQIHLGELHAILRRQEDFYPFLKDNREKIEKILTFRIPYYVGPLARGNSRFAWMTRKSEETITPWNFEEVVDKGASAQSFIERMTNFDKNLPNEKVLPKHSLLYEYFTVYNELTKVKYVTEGMRKPAFLSGEQKKAIVDLLFKTNRKVTVKQLKEDYFKKIECFDSVEISGVEDRFNASLGTYHDLLKIIKDKDFLDNEENEDILEDIVLTLTLFEDREMIEERLKTYAHLFDDKVMKQLKRRRYTGWGRLSRKLINGIRDKQSGKTILDFLKSDGFANRNFMQLIHDDSLTFKEDIQKAQVSGQGDSLHEHIANLAGSPAIKKGILQTVKVVDELVKVMGRHKPENIVIEMARENQTTQKGQKNSRERMKRIEEGIKELGSQILKEHPVENTQLQNEKLYLYYLQNGRDMYVDQELDINRLSDYDVDHIVPQSFLKDDSIDNKVLTRSDKARGKSDNVPSEEVVKKMKNYWRQLLNAKLITQRKFDNLTKAERGGLSELDKAGFIKRQLVETRQITKHVAQILDSRMNTKYDENDKLIREVKVITLKSKLVSDFRKDFQFYKVREINNYHHAHDAYLNAVVGTALIKKYPKLESEFVYGDYKVYDVRKMIAKSEQEIGKATAKYFFYSNIMNFFKTEITLANGEIRKRPLIETNGETGEIVWDKGRDFATVRKVLSMPQVNIVKKTEVQTGGFSKESILPKRNSDKLIARKKDWDPKKYGGFDSPTVAYSVLVVAKVEKGKSKKLKSVKELLGITIMERSSFEKNPIDFLEAKGYKEVKKDLIIKLPKYSLFELENGRKRMLASAGELQKGNELALPSKYVNFLYLASHYEKLKGSPEDNEQKQLFVEQHKHYLDEIIEQISEFSKRVILADANLDKVLSAYNKHRDKPIREQAENIIHLFTLTNLGAPAAFKYFDTTIDRKRYTSTKEVLDATLIHQSITGLYETRIDLSQLGGDGGGSSGGGGGSGGTVSLQDEHRLFDIPVTTSLPDVWLQDFPQAWAETGGLGRAKCQAPIIIDLKPTAVPVSIKQYPMSLEAHMGIRQHIIKFLELGVLRPCRSPWNTPLLPVKKPGTQDYRPVQDLREINKRTVDIHPTVPNPYNLLSTLKPDYSWYTVLDLKDAFFCLPLAPQSQELFAFEWKDPERGISGQLTWTRLPQGFKNSPTLFNEALHRDLTDFRTQHPEVTLLQYVDDLLLAAPTKKACTQGTRHLLQELGEKGYRASAKKAQICQTKVTYLGYILSEGKRWLTPGRIETVARIPPPRNPREVREFLGKAGFCRLFIPGFAELAAPLYALTKPSTPFTWQTEHQLAFEALKKALLSAPALGLPDTSKPFTLFLDERQGIAKGVLTQKLGPWKRPVAYLSKKLDPVAAGWPPCLRIMAATAMLVKDSAKLTLGQPLTVITPHTLEAIVRQPPDRWITNARLTHYQALLLDTDRVQFGPPVTLNPATLLPVPENQPSPHDCRQVLAETHGTREDLKDQELPDADHTWYTDGSSYLDSGTRRAGAAVVDGHNTIWAQSLPPGTSAQKAELIALTKALELSKGKKANIYTDSRYAFATAHTHGSIYERRGWLTSEGKEIKNKAEIIALLKALFLPQEVAIIHCPGHQKGQDPVAVGNRQADRVARQAAMAEVLTLATEPDNTSHITAGKRTADGSEFEKRTADGSEFESPKKKAKVE

SEQ ID NO: 1983 - protein, 2097 aa, synthetic construct
MPAAKRVKLDGGDKKYSIGLDIGTNSVGWAVITDEYKVPSKKFKVLGNTDRHSIKKNLIGALLFDSGETAEATRLKRTARRRYTRRKNRICYLQEIFSNEMAKVDDSFFHRLEESFLVEEDKKHERHPIFGNIVDEVAYHEKYPTIYHLRKKLVDSTDKADLRLIYLALAHMIKFRGHFLIEGDLNPDNSDVDKLFIQLVQTYNQLFEENPINASGVDAKAILSARLSKSRRLENLIAQLPGEKKNGLFGNLIALSLGLTPNFKSNFDLAEDAKLQLSKDTYDDDLDNLLAQIGDQYADLFLAAKNLSDAILLSDILRVNTEITKAPLSASMIKRYDEHHQDLTLLKALVRQQLPEKYKEIFFDQSKNGYAGYIDGGASQEEFYKFIKPILEKMDGTEELLVKLNREDLLRKQRTFDNGSIPHQIHLGELHAILRRQEDFYPFLKDNREKIEKILTFRIPYYVGPLARGNSRFAWMTRKSEETITPWNFEEVVDKGASAQSFIERMTNFDKNLPNEKVLPKHSLLYEYFTVYNELTKVKYVTEGMRKPAFLSGEQKKAIVDLLFKTNRKVTVKQLKEDYFKKIECFDSVEISGVEDRFNASLGTYHDLLKIIKDKDFLDNEENEDILEDIVLTLTLFEDREMIEERLKTYAHLFDDKVMKQLKRRRYTGWGRLSRKLINGIRDKQSGKTILDFLKSDGFANRNFMQLIHDDSLTFKEDIQKAQVSGQGDSLHEHIANLAGSPAIKKGILQTVKVVDELVKVMGRHKPENIVIEMARENQTTQKGQKNSRERMKRIEEGIKELGSQILKEHPVENTQLQNEKLYLYYLQNGRDMYVDQELDINRLSDYDVDHIVPQSFLKDDSIDNKVLTRSDKARGKSDNVPSEEVVKKMKNYWRQLLNAKLITQRKFDNLTKAERGGLSELDKAGFIKRQLVETRQITKHVAQILDSRMNTKYDENDKLIREVKVITLKSKLVSDFRKDFQFYKVREINNYHHAHDAYLNAVVGTALIKKYPKLESEFVYGDYKVYDVRKMIAKSEQEIGKATAKYFFYSNIMNFFKTEITLANGEIRKRPLIETNGETGEIVWDKGRDFATVRKVLSMPQVNIVKKTEVQTGGFSKESILPKRNSDKLIARKKDWDPKKYGGFDSPTVAYSVLVVAKVEKGKSKKLKSVKELLGITIMERSSFEKNPIDFLEAKGYKEVKKDLIIKLPKYSLFELENGRKRMLASAGELQKGNELALPSKYVNFLYLASHYEKLKGSPEDNEQKQLFVEQHKHYLDEIIEQISEFSKRVILADANLDKVLSAYNKHRDKPIREQAENIIHLFTLTNLGAPAAFKYFDTTIDRKRYTSTKEVLDATLIHQSITGLYETRIDLSQLGGDGGPAPGGGGGTVSLQDEHRLFDIPVTTSLPDVWLQDFPQAWAETGGLGRAKCQAPIIIDLKPTAVPVSIKQYPMSLEAHMGIRQHIIKFLELGVLRPCRSPWNTPLLPVKKPGTQDYRPVQDLREINKRTVDIHPTVPNPYNLLSTLKPDYSWYTVLDLKDAFFCLPLAPQSQELFAFEWKDPERGISGQLTWTRLPQGFKNSPTLFNEALHRDLTDFRTQHPEVTLLQYVDDLLLAAPTKKACTQGTRHLLQELGEKGYRASAKKAQICQTKVTYLGYILSEGKRWLTPGRIETVARIPPPRNPREVREFLGKAGFCRLFIPGFAELAAPLYALTKPSTPFTWQTEHQLAFEALKKALLSAPALGLPDTSKPFTLFLDERQGIAKGVLTQKLGPWKRPVAYLSKKLDPVAAGWPPCLRIMAATAMLVKDSAKLTLGQPLTVITPHTLEAIVRQPPDRWITNARLTHYQALLLDTDRVQFGPPVTLNPATLLPVPENQPSPHDCRQVLAETHGTREDLKDQELPDADHTWYTDGSSYLDSGTRRAGAAVVDGHNTIWAQSLPPGTSAQKAELIALTKALELSKGKKANIYTDSRYAFATAHTHGSIYERRGWLTSEGKEIKNKAEIIALLKALFLPQEVAIIHCPGHQKGQDPVAVGNRQADRVARQAAMAEVLTLATEPDNTSHITAGKRTADGSEFEKRTADGSEFESPKKKAKVE

SEQ ID NO: 1984 - protein, 2102 aa, synthetic construct
MPAAKRVKLDGGDKKYSIGLDIGTNSVGWAVITDEYKVPSKKFKVLGNTDRHSIKKNLIGALLFDSGETAEATRLKRTARRRYTRRKNRICYLQEIFSNEMAKVDDSFFHRLEESFLVEEDKKHERHPIFGNIVDEVAYHEKYPTIYHLRKKLVDSTDKADLRLIYLALAHMIKFRGHFLIEGDLNPDNSDVDKLFIQLVQTYNQLFEENPINASGVDAKAILSARLSKSRRLENLIAQLPGEKKNGLFGNLIALSLGLTPNFKSNFDLAEDAKLQLSKDTYDDDLDNLLAQIGDQYADLFLAAKNLSDAILLSDILRVNTEITKAPLSASMIKRYDEHHQDLTLLKALVRQQLPEKYKEIFFDQSKNGYAGYIDGGASQEEFYKFIKPILEKMDGTEELLVKLNREDLLRKQRTFDNGSIPHQIHLGELHAILRRQEDFYPFLKDNREKIEKILTFRIPYYVGPLARGNSRFAWMTRKSEETITPWNFEEVVDKGASAQSFIERMTNFDKNLPNEKVLPKHSLLYEYFTVYNELTKVKYVTEGMRKPAFLSGEQKKAIVDLLFKTNRKVTVKQLKEDYFKKIECFDSVEISGVEDRFNASLGTYHDLLKIIKDKDFLDNEENEDILEDIVLTLTLFEDREMIEERLKTYAHLFDDKVMKQLKRRRYTGWGRLSRKLINGIRDKQSGKTILDFLKSDGFANRNFMQLIHDDSLTFKEDIQKAQVSGQGDSLHEHIANLAGSPAIKKGILQTVKVVDELVKVMGRHKPENIVIEMARENQTTQKGQKNSRERMKRIEEGIKELGSQILKEHPVENTQLQNEKLYLYYLQNGRDMYVDQELDINRLSDYDVDHIVPQSFLKDDSIDNKVLTRSDKARGKSDNVPSEEVVKKMKNYWRQLLNAKLITQRKFDNLTKAERGGLSELDKAGFIKRQLVETRQITKHVAQILDSRMNTKYDENDKLIREVKVITLKSKLVSDFRKDFQFYKVREINNYHHAHDAYLNAVVGTALIKKYPKLESEFVYGDYKVYDVRKMIAKSEQEIGKATAKYFFYSNIMNFFKTEITLANGEIRKRPLIETNGETGEIVWDKGRDFATVRKVLSMPQVNIVKKTEVQTGGFSKESILPKRNSDKLIARKKDWDPKKYGGFDSPTVAYSVLVVAKVEKGKSKKLKSVKELLGITIMERSSFEKNPIDFLEAKGYKEVKKDLIIKLPKYSLFELENGRKRMLASAGELQKGNELALPSKYVNFLYLASHYEKLKGSPEDNEQKQLFVEQHKHYLDEIIEQISEFSKRVILADANLDKVLSAYNKHRDKPIREQAENIIHLFTLTNLGAPAAFKYFDTTIDRKRYTSTKEVLDATLIHQSITGLYETRIDLSQLGGDGGGGSEAAAKGGGGGTVSLQDEHRLFDIPVTTSLPDVWLQDFPQAWAETGGLGRAKCQAPIIIDLKPTAVPVSIKQYPMSLEAHMGIRQHIIKFLELGVLRPCRSPWNTPLLPVKKPGTQDYRPVQDLREINKRTVDIHPTVPNPYNLLSTLKPDYSWYTVLDLKDAFFCLPLAPQSQELFAFEWKDPERGISGQLTWTRLPQGFKNSPTLFNEALHRDLTDFRTQHPEVTLLQYVDDLLLAAPTKKACTQGTRHLLQELGEKGYRASAKKAQICQTKVTYLGYILSEGKRWLTPGRIETVARIPPPRNPREVREFLGKAGFCRLFIPGFAELAAPLYALTKPSTPFTWQTEHQLAFEALKKALLSAPALGLPDTSKPFTLFLDERQGIAKGVLTQKLGPWKRPVAYLSKKLDPVAAGWPPCLRIMAATAMLVKDSAKLTLGQPLTVITPHTLEAIVRQPPDRWITNARLTHYQALLLDTDRVQFGPPVTLNPATLLPVPENQPSPHDCRQVLAETHGTREDLKDQELPDADHTWYTDGSSYLDSGTRRAGAAVVDGHNTIWAQSLPPGTSAQKAELIALTKALELSKGKKANIYTDSRYAFATAHTHGSIYERRGWLTSEGKEIKNKAEIIALLKALFLPQEVAIIHCPGHQKGQDPVAVGNRQADRVARQAAMAEVLTLATEPDNTSHITAGKRTADGSEFEKRTADGSEFESPKKKAKVE

SEQ ID NO: 1985 - protein, 2100 aa, synthetic construct
MPAAKRVKLDGGDKKYSIGLDIGTNSVGWAVITDEYKVPSKKFKVLGNTDRHSIKKNLIGALLFDSGETAEATRLKRTARRRYTRRKNRICYLQEIFSNEMAKVDDSFFHRLEESFLVEEDKKHERHPIFGNIVDEVAYHEKYPTIYHLRKKLVDSTDKADLRLIYLALAHMIKFRGHFLIEGDLNPDNSDVDKLFIQLVQTYNQLFEENPINASGVDAKAILSARLSKSRRLENLIAQLPGEKKNGLFGNLIALSLGLTPNFKSNFDLAEDAKLQLSKDTYDDDLDNLLAQIGDQYADLFLAAKNLSDAILLSDILRVNTEITKAPLSASMIKRYDEHHQDLTLLKALVRQQLPEKYKEIFFDQSKNGYAGYIDGGASQEEFYKFIKPILEKMDGTEELLVKLNREDLLRKQRTFDNGSIPHQIHLGELHAILRRQEDFYPFLKDNREKIEKILTFRIPYYVGPLARGNSRFAWMTRKSEETITPWNFEEVVDKGASAQSFIERMTNFDKNLPNEKVLPKHSLLYEYFTVYNELTKVKYVTEGMRKPAFLSGEQKKAIVDLLFKTNRKVTVKQLKEDYFKKIECFDSVEISGVEDRFNASLGTYHDLLKIIKDKDFLDNEENEDILEDIVLTLTLFEDREMIEERLKTYAHLFDDKVMKQLKRRRYTGWGRLSRKLINGIRDKQSGKTILDFLKSDGFANRNFMQLIHDDSLTFKEDIQKAQVSGQGDSLHEHIANLAGSPAIKKGILQTVKVVDELVKVMGRHKPENIVIEMARENQTTQKGQKNSRERMKRIEEGIKELGSQILKEHPVENTQLQNEKLYLYYLQNGRDMYVDQELDINRLSDYDVDHIVPQSFLKDDSIDNKVLTRSDKARGKSDNVPSEEVVKKMKNYWRQLLNAKLITQRKFDNLTKAERGGLSELDKAGFIKRQLVETRQITKHVAQILDSRMNTKYDENDKLIREVKVITLKSKLVSDFRKDFQFYKVREINNYHHAHDAYLNAVVGTALIKKYPKLESEFVYGDYKVYDVRKMIAKSEQEIGKATAKYFFYSNIMNFFKTEITLANGEIRKRPLIETNGETGEIVWDKGRDFATVRKVLSMPQVNIVKKTEVQTGGFSKESILPKRNSDKLIARKKDWDPKKYGGFDSPTVAYSVLVVAKVEKGKSKKLKSVKELLGITIMERSSFEKNPIDFLEAKGYKEVKKDLIIKLPKYSLFELENGRKRMLASAGELQKGNELALPSKYVNFLYLASHYEKLKGSPEDNEQKQLFVEQHKHYLDEIIEQISEFSKRVILADANLDKVLSAYNKHRDKPIREQAENIIHLFTLTNLGAPAAFKYFDTTIDRKRYTSTKEVLDATLIHQSITGLYETRIDLSQLGGDGGGSSPAPGGSGGTVSLQDEHRLFDIPVTTSLPDVWLQDFPQAWAETGGLGRAKCQAPIIIDLKPTAVPVSIKQYPMSLEAHMGIRQHIIKFLELGVLRPCRSPWNTPLLPVKKPGTQDYRPVQDLREINKRTVDIHPTVPNPYNLLSTLKPDYSWYTVLDLKDAFFCLPLAPQSQELFAFEWKDPERGISGQLTWTRLPQGFKNSPTLFNEALHRDLTDFRTQHPEVTLLQYVDDLLLAAPTKKACTQGTRHLLQELGEKGYRASAKKAQICQTKVTYLGYILSEGKRWLTPGRIETVARIPPPRNPREVREFLGKAGFCRLFIPGFAELAAPLYALTKPSTPFTWQTEHQLAFEALKKALLSAPALGLPDTSKPFTLFLDERQGIAKGVLTQKLGPWKRPVAYLSKKLDPVAAGWPPCLRIMAATAMLVKDSAKLTLGQPLTVITPHTLEAIVRQPPDRWITNARLTHYQALLLDTDRVQFGPPVTLNPATLLPVPENQPSPHDCRQVLAETHGTREDLKDQELPDADHTWYTDGSSYLDSGTRRAGAAVVDGHNTIWAQSLPPGTSAQKAELIALTKALELSKGKKANIYTDSRYAFATAHTHGSIYERRGWLTSEGKEIKNKAEIIALLKALFLPQEVAIIHCPGHQKGQDPVAVGNRQADRVARQAAMAEVLTLATEPDNTSHITAGKRTADGSEFEKRTADGSEFESPKKKAKVE

SEQ ID NO: 1986 - protein, 2099 aa, synthetic construct
MPAAKRVKLDGGDKKYSIGLDIGTNSVGWAVITDEYKVPSKKFKVLGNTDRHSIKKNLIGALLFDSGETAEATRLKRTARRRYTRRKNRICYLQEIFSNEMAKVDDSFFHRLEESFLVEEDKKHERHPIFGNIVDEVAYHEKYPTIYHLRKKLVDSTDKADLRLIYLALAHMIKFRGHFLIEGDLNPDNSDVDKLFIQLVQTYNQLFEENPINASGVDAKAILSARLSKSRRLENLIAQLPGEKKNGLFGNLIALSLGLTPNFKSNFDLAEDAKLQLSKDTYDDDLDNLLAQIGDQYADLFLAAKNLSDAILLSDILRVNTEITKAPLSASMIKRYDEHHQDLTLLKALVRQQLPEKYKEIFFDQSKNGYAGYIDGGASQEEFYKFIKPILEKMDGTEELLVKLNREDLLRKQRTFDNGSIPHQIHLGELHAILRRQEDFYPFLKDNREKIEKILTFRIPYYVGPLARGNSRFAWMTRKSEETITPWNFEEVVDKGASAQSFIERMTNFDKNLPNEKVLPKHSLLYEYFTVYNELTKVKYVTEGMRKPAFLSGEQKKAIVDLLFKTNRKVTVKQLKEDYFKKIECFDSVEISGVEDRFNASLGTYHDLLKIIKDKDFLDNEENEDILEDIVLTLTLFEDREMIEERLKTYAHLFDDKVMKQLKRRRYTGWGRLSRKLINGIRDKQSGKTILDFLKSDGFANRNFMQLIHDDSLTFKEDIQKAQVSGQGDSLHEHIANLAGSPAIKKGILQTVKVVDELVKVMGRHKPENIVIEMARENQTTQKGQKNSRERMKRIEEGIKELGSQILKEHPVENTQLQNEKLYLYYLQNGRDMYVDQELDINRLSDYDVDHIVPQSFLKDDSIDNKVLTRSDKARGKSDNVPSEEVVKKMKNYWRQLLNAKLITQRKFDNLTKAERGGLSELDKAGFIKRQLVETRQITKHVAQILDSRMNTKYDENDKLIREVKVITLKSKLVSDFRKDFQFYKVREINNYHHAHDAYLNAVVGTALIKKYPKLESEFVYGDYKVYDVRKMIAKSEQEIGKATAKYFFYSNIMNFFKTEITLANGEIRKRPLIETNGETGEIVWDKGRDFATVRKVLSMPQVNIVKKTEVQTGGFSKESILPKRNSDKLIARKKDWDPKKYGGFDSPTVAYSVLVVAKVEKGKSKKLKSVKELLGITIMERSSFEKNPIDFLEAKGYKEVKKDLIIKLPKYSLFELENGRKRMLASAGELQKGNELALPSKYVNFLYLASHYEKLKGSPEDNEQKQLFVEQHKHYLDEIIEQISEFSKRVILADANLDKVLSAYNKHRDKPIREQAENIIHLFTLTNLGAPAAFKYFDTTIDRKRYTSTKEVLDATLIHQSITGLYETRIDLSQLGGDGGEAAAKGGGGGTVSLQDEHRLFDIPVTTSLPDVWLQDFPQAWAETGGLGRAKCQAPIIIDLKPTAVPVSIKQYPMSLEAHMGIRQHIIKFLELGVLRPCRSPWNTPLLPVKKPGTQDYRPVQDLREINKRTVDIHPTVPNPYNLLSTLKPDYSWYTVLDLKDAFFCLPLAPQSQELFAFEWKDPERGISGQLTWTRLPQGFKNSPTLFNEALHRDLTDFRTQHPEVTLLQYVDDLLLAAPTKKACTQGTRHLLQELGEKGYRASAKKAQICQTKVTYLGYILSEGKRWLTPGRIETVARIPPPRNPREVREFLGKAGFCRLFIPGFAELAAPLYALTKPSTPFTWQTEHQLAFEALKKALLSAPALGLPDTSKPFTLFLDERQGIAKGVLTQKLGPWKRPVAYLSKKLDPVAAGWPPCLRIMAATAMLVKDSAKLTLGQPLTVITPHTLEAIVRQPPDRWITNARLTHYQALLLDTDRVQFGPPVTLNPATLLPVPENQPSPHDCRQVLAETHGTREDLKDQELPDADHTWYTDGSSYLDSGTRRAGAAVVDGHNTIWAQSLPPGTSAQKAELIALTKALELSKGKKANIYTDSRYAFATAHTHGSIYERRGWLTSEGKEIKNKAEIIALLKALFLPQEVAIIHCPGHQKGQDPVAVGNRQADRVARQAAMAEVLTLATEPDNTSHITAGKRTADGSEFEKRTADGSEFESPKKKAKVE

SEQ ID NO: 1987 - protein, 2106 aa, synthetic construct
MPAAKRVKLDGGDKKYSIGLDIGTNSVGWAVITDEYKVPSKKFKVLGNTDRHSIKKNLIGALLFDSGETAEATRLKRTARRRYTRRKNRICYLQEIFSNEMAKVDDSFFHRLEESFLVEEDKKHERHPIFGNIVDEVAYHEKYPTIYHLRKKLVDSTDKADLRLIYLALAHMIKFRGHFLIEGDLNPDNSDVDKLFIQLVQTYNQLFEENPINASGVDAKAILSARLSKSRRLENLIAQLPGEKKNGLFGNLIALSLGLTPNFKSNFDLAEDAKLQLSKDTYDDDLDNLLAQIGDQYADLFLAAKNLSDAILLSDILRVNTEITKAPLSASMIKRYDEHHQDLTLLKALVRQQLPEKYKEIFFDQSKNGYAGYIDGGASQEEFYKFIKPILEKMDGTEELLVKLNREDLLRKQRTFDNGSIPHQIHLGELHAILRRQEDFYPFLKDNREKIEKILTFRIPYYVGPLARGNSRFAWMTRKSEETITPWNFEEVVDKGASAQSFIERMTNFDKNLPNEKVLPKHSLLYEYFTVYNELTKVKYVTEGMRKPAFLSGEQKKAIVDLLFKTNRKVTVKQLKEDYFKKIECFDSVEISGVEDRFNASLGTYHDLLKIIKDKDFLDNEENEDILEDIVLTLTLFEDREMIEERLKTYAHLFDDKVMKQLKRRRYTGWGRLSRKLINGIRDKQSGKTILDFLKSDGFANRNFMQLIHDDSLTFKEDIQKAQVSGQGDSLHEHIANLAGSPAIKKGILQTVKVVDELVKVMGRHKPENIVIEMARENQTTQKGQKNSRERMKRIEEGIKELGSQILKEHPVENTQLQNEKLYLYYLQNGRDMYVDQELDINRLSDYDVDHIVPQSFLKDDSIDNKVLTRSDKARGKSDNVPSEEVVKKMKNYWRQLLNAKLITQRKFDNLTKAERGGLSELDKAGFIKRQLVETRQITKHVAQILDSRMNTKYDENDKLIREVKVITLKSKLVSDFRKDFQFYKVREINNYHHAHDAYLNAVVGTALIKKYPKLESEFVYGDYKVYDVRKMIAKSEQEIGKATAKYFFYSNIMNFFKTEITLANGEIRKRPLIETNGETGEIVWDKGRDFATVRKVLSMPQVNIVKKTEVQTGGFSKESILPKRNSDKLIARKKDWDPKKYGGFDSPTVAYSVLVVAKVEKGKSKKLKSVKELLGITIMERSSFEKNPIDFLEAKGYKEVKKDLIIKLPKYSLFELENGRKRMLASAGELQKGNELALPSKYVNFLYLASHYEKLKGSPEDNEQKQLFVEQHKHYLDEIIEQISEFSKRVILADANLDKVLSAYNKHRDKPIREQAENIIHLFTLTNLGAPAAFKYFDTTIDRKRYTSTKEVLDATLIHQSITGLYETRIDLSQLGGDGGGGGGSGGGGSGGGGSGGTVSLQDEHRLFDIPVTTSLPDVWLQDFPQAWAETGGLGRAKCQAPIIIDLKPTAVPVSIKQYPMSLEAHMGIRQHIIKFLELGVLRPCRSPWNTPLLPVKKPGTQDYRPVQDLREINKRTVDIHPTVPNPYNLLSTLKPDYSWYTVLDLKDAFFCLPLAPQSQELFAFEWKDPERGISGQLTWTRLPQGFKNSPTLFNEALHRDLTDFRTQHPEVTLLQYVDDLLLAAPTKKACTQGTRHLLQELGEKGYRASAKKAQICQTKVTYLGYILSEGKRWLTPGRIETVARIPPPRNPREVREFLGKAGFCRLFIPGFAELAAPLYALTKPSTPFTWQTEHQLAFEALKKALLSAPALGLPDTSKPFTLFLDERQGIAKGVLTQKLGPWKRPVAYLSKKLDPVAAGWPPCLRIMAATAMLVKDSAKLTLGQPLTVITPHTLEAIVRQPPDRWITNARLTHYQALLLDTDRVQFGPPVTLNPATLLPVPENQPSPHDCRQVLAETHGTREDLKDQELPDADHTWYTDGSSYLDSGTRRAGAAVVDGHNTIWAQSLPPGTSAQKAELIALTKALELSKGKKANIYTDSRYAFATAHTHGSIYERRGWLTSEGKEIKNKAEIIALLKALFLPQEVAIIHCPGHQKGQDPVAVGNRQADRVARQAAMAEVLTLATEPDNTSHITAGKRTADGSEFEKRTADGSEFESPKKKAKVE

SEQ ID NO: 1988 - protein, 2100 aa, synthetic construct
MPAAKRVKLDGGDKKYSIGLDIGTNSVGWAVITDEYKVPSKKFKVLGNTDRHSIKKNLIGALLFDSGETAEATRLKRTARRRYTRRKNRICYLQEIFSNEMAKVDDSFFHRLEESFLVEEDKKHERHPIFGNIVDEVAYHEKYPTIYHLRKKLVDSTDKADLRLIYLALAHMIKFRGHFLIEGDLNPDNSDVDKLFIQLVQTYNQLFEENPINASGVDAKAILSARLSKSRRLENLIAQLPGEKKNGLFGNLIALSLGLTPNFKSNFDLAEDAKLQLSKDTYDDDLDNLLAQIGDQYADLFLAAKNLSDAILLSDILRVNTEITKAPLSASMIKRYDEHHQDLTLLKALVRQQLPEKYKEIFFDQSKNGYAGYIDGGASQEEFYKFIKPILEKMDGTEELLVKLNREDLLRKQRTFDNGSIPHQIHLGELHAILRRQEDFYPFLKDNREKIEKILTFRIPYYVGPLARGNSRFAWMTRKSEETITPWNFEEVVDKGASAQSFIERMTNFDKNLPNEKVLPKHSLLYEYFTVYNELTKVKYVTEGMRKPAFLSGEQKKAIVDLLFKTNRKVTVKQLKEDYFKKIECFDSVEISGVEDRFNASLGTYHDLLKIIKDKDFLDNEENEDILEDIVLTLTLFEDREMIEERLKTYAHLFDDKVMKQLKRRRYTGWGRLSRKLINGIRDKQSGKTILDFLKSDGFANRNFMQLIHDDSLTFKEDIQKAQVSGQGDSLHEHIANLAGSPAIKKGILQTVKVVDELVKVMGRHKPENIVIEMARENQTTQKGQKNSRERMKRIEEGIKELGSQILKEHPVENTQLQNEKLYLYYLQNGRDMYVDQELDINRLSDYDVDHIVPQSFLKDDSIDNKVLTRSDKARGKSDNVPSEEVVKKMKNYWRQLLNAKLITQRKFDNLTKAERGGLSELDKAGFIKRQLVETRQITKHVAQILDSRMNTKYDENDKLIREVKVITLKSKLVSDFRKDFQFYKVREINNYHHAHDAYLNAVVGTALIKKYPKLESEFVYGDYKVYDVRKMIAKSEQEIGKATAKYFFYSNIMNFFKTEITLANGEIRKRPLIETNGETGEIVWDKGRDFATVRKVLSMPQVNIVKKTEVQTGGFSKESILPKRNSDKLIARKKDWDPKKYGGFDSPTVAYSVLVVAKVEKGKSKKLKSVKELLGITIMERSSFEKNPIDFLEAKGYKEVKKDLIIKLPKYSLFELENGRKRMLASAGELQKGNELALPSKYVNFLYLASHYEKLKGSPEDNEQKQLFVEQHKHYLDEIIEQISEFSKRVILADANLDKVLSAYNKHRDKPIREQAENIIHLFTLTNLGAPAAFKYFDTTIDRKRYTSTKEVLDATLIHQSITGLYETRIDLSQLGGDGGGGGPAPGSSGGTVSLQDEHRLFDIPVTTSLPDVWLQDFPQAWAETGGLGRAKCQAPIIIDLKPTAVPVSIKQYPMSLEAHMGIRQHIIKFLELGVLRPCRSPWNTPLLPVKKPGTQDYRPVQDLREINKRTVDIHPTVPNPYNLLSTLKPDYSWYTVLDLKDAFFCLPLAPQSQELFAFEWKDPERGISGQLTWTRLPQGFKNSPTLFNEALHRDLTDFRTQHPEVTLLQYVDDLLLAAPTKKACTQGTRHLLQELGEKGYRASAKKAQICQTKVTYLGYILSEGKRWLTPGRIETVARIPPPRNPREVREFLGKAGFCRLFIPGFAELAAPLYALTKPSTPFTWQTEHQLAFEALKKALLSAPALGLPDTSKPFTLFLDERQGIAKGVLTQKLGPWKRPVAYLSKKLDPVAAGWPPCLRIMAATAMLVKDSAKLTLGQPLTVITPHTLEAIVRQPPDRWITNARLTHYQALLLDTDRVQFGPPVTLNPATLLPVPENQPSPHDCRQVLAETHGTREDLKDQELPDADHTWYTDGSSYLDSGTRRAGAAVVDGHNTIWAQSLPPGTSAQKAELIALTKALELSKGKKANIYTDSRYAFATAHTHGSIYERRGWLTSEGKEIKNKAEIIALLKALFLPQEVAIIHCPGHQKGQDPVAVGNRQADRVARQAAMAEVLTLATEPDNTSHITAGKRTADGSEFEKRTADGSEFESPKKKAKVE

SEQ ID NO: 1989 - protein, 2102 aa, synthetic construct
MPAAKRVKLDGGDKKYSIGLDIGTNSVGWAVITDEYKVPSKKFKVLGNTDRHSIKKNLIGALLFDSGETAEATRLKRTARRRYTRRKNRICYLQEIFSNEMAKVDDSFFHRLEESFLVEEDKKHERHPIFGNIVDEVAYHEKYPTIYHLRKKLVDSTDKADLRLIYLALAHMIKFRGHFLIEGDLNPDNSDVDKLFIQLVQTYNQLFEENPINASGVDAKAILSARLSKSRRLENLIAQLPGEKKNGLFGNLIALSLGLTPNFKSNFDLAEDAKLQLSKDTYDDDLDNLLAQIGDQYADLFLAAKNLSDAILLSDILRVNTEITKAPLSASMIKRYDEHHQDLTLLKALVRQQLPEKYKEIFFDQSKNGYAGYIDGGASQEEFYKFIKPILEKMDGTEELLVKLNREDLLRKQRTFDNGSIPHQIHLGELHAILRRQEDFYPFLKDNREKIEKILTFRIPYYVGPLARGNSRFAWMTRKSEETITPWNFEEVVDKGASAQSFIERMTNFDKNLPNEKVLPKHSLLYEYFTVYNELTKVKYVTEGMRKPAFLSGEQKKAIVDLLFKTNRKVTVKQLKEDYFKKIECFDSVEISGVEDRFNASLGTYHDLLKIIKDKDFLDNEENEDILEDIVLTLTLFEDREMIEERLKTYAHLFDDKVMKQLKRRRYTGWGRLSRKLINGIRDKQSGKTILDFLKSDGFANRNFMQLIHDDSLTFKEDIQKAQVSGQGDSLHEHIANLAGSPAIKKGILQTVKVVDELVKVMGRHKPENIVIEMARENQTTQKGQKNSRERMKRIEEGIKELGSQILKEHPVENTQLQNEKLYLYYLQNGRDMYVDQELDINRLSDYDVDHIVPQSFLKDDSIDNKVLTRSDKARGKSDNVPSEEVVKKMKNYWRQLLNAKLITQRKFDNLTKAERGGLSELDKAGFIKRQLVETRQITKHVAQILDSRMNTKYDENDKLIREVKVITLKSKLVSDFRKDFQFYKVREINNYHHAHDAYLNAVVGTALIKKYPKLESEFVYGDYKVYDVRKMIAKSEQEIGKATAKYFFYSNIMNFFKTEITLANGEIRKRPLIETNGETGEIVWDKGRDFATVRKVLSMPQVNIVKKTEVQTGGFSKESILPKRNSDKLIARKKDWDPKKYGGFDSPTVAYSVLVVAKVEKGKSKKLKSVKELLGITIMERSSFEKNPIDFLEAKGYKEVKKDLIIKLPKYSLFELENGRKRMLASAGELQKGNELALPSKYVNFLYLASHYEKLKGSPEDNEQKQLFVEQHKHYLDEIIEQISEFSKRVILADANLDKVLSAYNKHRDKPIREQAENIIHLFTLTNLGAPAAFKYFDTTIDRKRYTSTKEVLDATLIHQSITGLYETRIDLSQLGGDGGGGSEAAAKPAPGGTVSLQDEHRLFDIPVTTSLPDVWLQDFPQAWAETGGLGRAKCQAPIIIDLKPTAVPVSIKQYPMSLEAHMGIRQHIIKFLELGVLRPCRSPWNTPLLPVKKPGTQDYRPVQDLREINKRTVDIHPTVPNPYNLLSTLKPDYSWYTVLDLKDAFFCLPLAPQSQELFAFEWKDPERGISGQLTWTRLPQGFKNSPTLFNEALHRDLTDFRTQHPEVTLLQYVDDLLLAAPTKKACTQGTRHLLQELGEKGYRASAKKAQICQTKVTYLGYILSEGKRWLTPGRIETVARIPPPRNPREVREFLGKAGFCRLFIPGFAELAAPLYALTKPSTPFTWQTEHQLAFEALKKALLSAPALGLPDTSKPFTLFLDERQGIAKGVLTQKLGPWKRPVAYLSKKLDPVAAGWPPCLRIMAATAMLVKDSAKLTLGQPLTVITPHTLEAIVRQPPDRWITNARLTHYQALLLDTDRVQFGPPVTLNPATLLPVPENQPSPHDCRQVLAETHGTREDLKDQELPDADHTWYTDGSSYLDSGTRRAGAAVVDGHNTIWAQSLPPGTSAQKAELIALTKALELSKGKKANIYTDSRYAFATAHTHGSIYERRGWLTSEGKEIKNKAEIIALLKALFLPQEVAIIHCPGHQKGQDPVAVGNRQADRVARQAAMAEVLTLATEPDNTSHITAGKRTADGSEFEKRTADGSEFESPKKKAKVE

SEQ ID NO: 1990 - protein, 2100 aa, synthetic construct
MPAAKRVKLDGGDKKYSIGLDIGTNSVGWAVITDEYKVPSKKFKVLGNTDRHSIKKNLIGALLFDSGETAEATRLKRTARRRYTRRKNRICYLQEIFSNEMAKVDDSFFHRLEESFLVEEDKKHERHPIFGNIVDEVAYHEKYPTIYHLRKKLVDSTDKADLRLIYLALAHMIKFRGHFLIEGDLNPDNSDVDKLFIQLVQTYNQLFEENPINASGVDAKAILSARLSKSRRLENLIAQLPGEKKNGLFGNLIALSLGLTPNFKSNFDLAEDAKLQLSKDTYDDDLDNLLAQIGDQYADLFLAAKNLSDAILLSDILRVNTEITKAPLSASMIKRYDEHHQDLTLLKALVRQQLPEKYKEIFFDQSKNGYAGYIDGGASQEEFYKFIKPILEKMDGTEELLVKLNREDLLRKQRTFDNGSIPHQIHLGELHAILRRQEDFYPFLKDNREKIEKILTFRIPYYVGPLARGNSRFAWMTRKSEETITPWNFEEVVDKGASAQSFIERMTNFDKNLPNEKVLPKHSLLYEYFTVYNELTKVKYVTEGMRKPAFLSGEQKKAIVDLLFKTNRKVTVKQLKEDYFKKIECFDSVEISGVEDRFNASLGTYHDLLKIIKDKDFLDNEENEDILEDIVLTLTLFEDREMIEERLKTYAHLFDDKVMKQLKRRRYTGWGRLSRKLINGIRDKQSGKTILDFLKSDGFANRNFMQLIHDDSLTFKEDIQKAQVSGQGDSLHEHIANLAGSPAIKKGILQTVKVVDELVKVMGRHKPENIVIEMARENQTTQKGQKNSRERMKRIEEGIKELGSQILKEHPVENTQLQNEKLYLYYLQNGRDMYVDQELDINRLSDYDVDHIVPQSFLKDDSIDNKVLTRSDKARGKSDNVPSEEVVKKMKNYWRQLLNAKLITQRKFDNLTKAERGGLSELDKAGFIKRQLVETRQITKHVAQILDSRMNTKYDENDKLIREVKVITLKSKLVSDFRKDFQFYKVREINNYHHAHDAYLNAVVGTALIKKYPKLESEFVYGDYKVYDVRKMIAKSEQEIGKATAKYFFYSNIMNFFKTEITLANGEIRKRPLIETNGETGEIVWDKGRDFATVRKVLSMPQVNIVKKTEVQTGGFSKESILPKRNSDKLIARKKDWDPKKYGGFDSPTVAYSVLVVAKVEKGKSKKLKSVKELLGITIMERSSFEKNPIDFLEAKGYKEVKKDLIIKLPKYSLFELENGRKRMLASAGELQKGNELALPSKYVNFLYLASHYEKLKGSPEDNEQKQLFVEQHKHYLDEIIEQISEFSKRVILADANLDKVLSAYNKHRDKPIREQAENIIHLFTLTNLGAPAAFKYFDTTIDRKRYTSTKEVLDATLIHQSITGLYETRIDLSQLGGDGGPAPGGSGSSGGTVSLQDEHRLFDIPVTTSLPDVWLQDFPQAWAETGGLGRAKCQAPIIIDLKPTAVPVSIKQYPMSLEAHMGIRQHIIKFLELGVLRPCRSPWNTPLLPVKKPGTQDYRPVQDLREINKRTVDIHPTVPNPYNLLSTLKPDYSWYTVLDLKDAFFCLPLAPQSQELFAFEWKDPERGISGQLTWTRLPQGFKNSPTLFNEALHRDLTDFRTQHPEVTLLQYVDDLLLAAPTKKACTQGTRHLLQELGEKGYRASAKKAQICQTKVTYLGYILSEGKRWLTPGRIETVARIPPPRNPREVREFLGKAGFCRLFIPGFAELAAPLYALTKPSTPFTWQTEHQLAFEALKKALLSAPALGLPDTSKPFTLFLDERQGIAKGVLTQKLGPWKRPVAYLSKKLDPVAAGWPPCLRIMAATAMLVKDSAKLTLGQPLTVITPHTLEAIVRQPPDRWITNARLTHYQALLLDTDRVQFGPPVTLNPATLLPVPENQPSPHDCRQVLAETHGTREDLKDQELPDADHTWYTDGSSYLDSGTRRAGAAVVDGHNTIWAQSLPPGTSAQKAELIALTKALELSKGKKANIYTDSRYAFATAHTHGSIYERRGWLTSEGKEIKNKAEIIALLKALFLPQEVAIIHCPGHQKGQDPVAVGNRQADRVARQAAMAEVLTLATEPDNTSHITAGKRTADGSEFEKRTADGSEFESPKKKAKVE

SEQ ID NO: 1991 - protein, 2100 aa, synthetic construct
MPAAKRVKLDGGDKKYSIGLDIGTNSVGWAVITDEYKVPSKKFKVLGNTDRHSIKKNLIGALLFDSGETAEATRLKRTARRRYTRRKNRICYLQEIFSNEMAKVDDSFFHRLEESFLVEEDKKHERHPIFGNIVDEVAYHEKYPTIYHLRKKLVDSTDKADLRLIYLALAHMIKFRGHFLIEGDLNPDNSDVDKLFIQLVQTYNQLFEENPINASGVDAKAILSARLSKSRRLENLIAQLPGEKKNGLFGNLIALSLGLTPNFKSNFDLAEDAKLQLSKDTYDDDLDNLLAQIGDQYADLFLAAKNLSDAILLSDILRVNTEITKAPLSASMIKRYDEHHQDLTLLKALVRQQLPEKYKEIFFDQSKNGYAGYIDGGASQEEFYKFIKPILEKMDGTEELLVKLNREDLLRKQRTFDNGSIPHQIHLGELHAILRRQEDFYPFLKDNREKIEKILTFRIPYYVGPLARGNSRFAWMTRKSEETITPWNFEEVVDKGASAQSFIERMTNFDKNLPNEKVLPKHSLLYEYFTVYNELTKVKYVTEGMRKPAFLSGEQKKAIVDLLFKTNRKVTVKQLKEDYFKKIECFDSVEISGVEDRFNASLGTYHDLLKIIKDKDFLDNEENEDILEDIVLTLTLFEDREMIEERLKTYAHLFDDKVMKQLKRRRYTGWGRLSRKLINGIRDKQSGKTILDFLKSDGFANRNFMQLIHDDSLTFKEDIQKAQVSGQGDSLHEHIANLAGSPAIKKGILQTVKVVDELVKVMGRHKPENIVIEMARENQTTQKGQKNSRERMKRIEEGIKELGSQILKEHPVENTQLQNEKLYLYYLQNGRDMYVDQELDINRLSDYDVDHIVPQSFLKDDSIDNKVLTRSDKARGKSDNVPSEEVVKKMKNYWRQLLNAKLITQRKFDNLTKAERGGLSELDKAGFIKRQLVETRQITKHVAQILDSRMNTKYDENDKLIREVKVITLKSKLVSDFRKDFQFYKVREINNYHHAHDAYLNAVVGTALIKKYPKLESEFVYGDYKVYDVRKMIAKSEQEIGKATAKYFFYSNIMNFFKTEITLANGEIRKRPLIETNGETGEIVWDKGRDFATVRKVLSMPQVNIVKKTEVQTGGFSKESILPKRNSDKLIARKKDWDPKKYGGFDSPTVAYSVLVVAKVEKGKSKKLKSVKELLGITIMERSSFEKNPIDFLEAKGYKEVKKDLIIKLPKYSLFELENGRKRMLASAGELQKGNELALPSKYVNFLYLASHYEKLKGSPEDNEQKQLFVEQHKHYLDEIIEQISEFSKRVILADANLDKVLSAYNKHRDKPIREQAENIIHLFTLTNLGAPAAFKYFDTTIDRKRYTSTKEVLDATLIHQSITGLYETRIDLSQLGGDGGGGGGSSGGSGGTVSLQDEHRLFDIPVTTSLPDVWLQDFPQAWAETGGLGRAKCQAPIIIDLKPTAVPVSIKQYPMSLEAHMGIRQHIIKFLELGVLRPCRSPWNTPLLPVKKPGTQDYRPVQDLREINKRTVDIHPTVPNPYNLLSTLKPDYSWYTVLDLKDAFFCLPLAPQSQELFAFEWKDPERGISGQLTWTRLPQGFKNSPTLFNEALHRDLTDFRTQHPEVTLLQYVDDLLLAAPTKKACTQGTRHLLQELGEKGYRASAKKAQICQTKVTYLGYILSEGKRWLTPGRIETVARIPPPRNPREVREFLGKAGFCRLFIPGFAELAAPLYALTKPSTPFTWQTEHQLAFEALKKALLSAPALGLPDTSKPFTLFLDERQGIAKGVLTQKLGPWKRPVAYLSKKLDPVAAGWPPCLRIMAATAMLVKDSAKLTLGQPLTVITPHTLEAIVRQPPDRWITNARLTHYQALLLDTDRVQFGPPVTLNPATLLPVPENQPSPHDCRQVLAETHGTREDLKDQELPDADHTWYTDGSSYLDSGTRRAGAAVVDGHNTIWAQSLPPGTSAQKAELIALTKALELSKGKKANIYTDSRYAFATAHTHGSIYERRGWLTSEGKEIKNKAEIIALLKALFLPQEVAIIHCPGHQKGQDPVAVGNRQADRVARQAAMAEVLTLATEPDNTSHITAGKRTADGSEFEKRTADGSEFESPKKKAKVE

SEQ ID NO: 1992 - protein, 2106 aa, synthetic construct
MPAAKRVKLDGGDKKYSIGLDIGTNSVGWAVITDEYKVPSKKFKVLGNTDRHSIKKNLIGALLFDSGETAEATRLKRTARRRYTRRKNRICYLQEIFSNEMAKVDDSFFHRLEESFLVEEDKKHERHPIFGNIVDEVAYHEKYPTIYHLRKKLVDSTDKADLRLIYLALAHMIKFRGHFLIEGDLNPDNSDVDKLFIQLVQTYNQLFEENPINASGVDAKAILSARLSKSRRLENLIAQLPGEKKNGLFGNLIALSLGLTPNFKSNFDLAEDAKLQLSKDTYDDDLDNLLAQIGDQYADLFLAAKNLSDAILLSDILRVNTEITKAPLSASMIKRYDEHHQDLTLLKALVRQQLPEKYKEIFFDQSKNGYAGYIDGGASQEEFYKFIKPILEKMDGTEELLVKLNREDLLRKQRTFDNGSIPHQIHLGELHAILRRQEDFYPFLKDNREKIEKILTFRIPYYVGPLARGNSRFAWMTRKSEETITPWNFEEVVDKGASAQSFIERMTNFDKNLPNEKVLPKHSLLYEYFTVYNELTKVKYVTEGMRKPAFLSGEQKKAIVDLLFKTNRKVTVKQLKEDYFKKIECFDSVEISGVEDRFNASLGTYHDLLKIIKDKDFLDNEENEDILEDIVLTLTLFEDREMIEERLKTYAHLFDDKVMKQLKRRRYTGWGRLSRKLINGIRDKQSGKTILDFLKSDGFANRNFMQLIHDDSLTFKEDIQKAQVSGQGDSLHEHIANLAGSPAIKKGILQTVKVVDELVKVMGRHKPENIVIEMARENQTTQKGQKNSRERMKRIEEGIKELGSQILKEHPVENTQLQNEKLYLYYLQNGRDMYVDQELDINRLSDYDVDHIVPQSFLKDDSIDNKVLTRSDKARGKSDNVPSEEVVKKMKNYWRQLLNAKLITQRKFDNLTKAERGGLSELDKAGFIKRQLVETRQITKHVAQILDSRMNTKYDENDKLIREVKVITLKSKLVSDFRKDFQFYKVREINNYHHAHDAYLNAVVGTALIKKYPKLESEFVYGDYKVYDVRKMIAKSEQEIGKATAKYFFYSNIMNFFKTEITLANGEIRKRPLIETNGETGEIVWDKGRDFATVRKVLSMPQVNIVKKTEVQTGGFSKESILPKRNSDKLIARKKDWDPKKYGGFDSPTVAYSVLVVAKVEKGKSKKLKSVKELLGITIMERSSFEKNPIDFLEAKGYKEVKKDLIIKLPKYSLFELENGRKRMLASAGELQKGNELALPSKYVNFLYLASHYEKLKGSPEDNEQKQLFVEQHKHYLDEIIEQISEFSKRVILADANLDKVLSAYNKHRDKPIREQAENIIHLFTLTNLGAPAAFKYFDTTIDRKRYTSTKEVLDATLIHQSITGLYETRIDLSQLGGDGGGGSGGSGGSGGSGGSGGTVSLQDEHRLFDIPVTTSLPDVWLQDFPQAWAETGGLGRAKCQAPIIIDLKPTAVPVSIKQYPMSLEAHMGIRQHIIKFLELGVLRPCRSPWNTPLLPVKKPGTQDYRPVQDLREINKRTVDIHPTVPNPYNLLSTLKPDYSWYTVLDLKDAFFCLPLAPQSQELFAFEWKDPERGISGQLTWTRLPQGFKNSPTLFNEALHRDLTDFRTQHPEVTLLQYVDDLLLAAPTKKACTQGTRHLLQELGEKGYRASAKKAQICQTKVTYLGYILSEGKRWLTPGRIETVARIPPPRNPREVREFLGKAGFCRLFIPGFAELAAPLYALTKPSTPFTWQTEHQLAFEALKKALLSAPALGLPDTSKPFTLFLDERQGIAKGVLTQKLGPWKRPVAYLSKKLDPVAAGWPPCLRIMAATAMLVKDSAKLTLGQPLTVITPHTLEAIVRQPPDRWITNARLTHYQALLLDTDRVQFGPPVTLNPATLLPVPENQPSPHDCRQVLAETHGTREDLKDQELPDADHTWYTDGSSYLDSGTRRAGAAVVDGHNTIWAQSLPPGTSAQKAELIALTKALELSKGKKANIYTDSRYAFATAHTHGSIYERRGWLTSEGKEIKNKAEIIALLKALFLPQEVAIIHCPGHQKGQDPVAVGNRQADRVARQAAMAEVLTLATEPDNTSHITAGKRTADGSEFEKRTADGSEFESPKKKAKVE

SEQ ID NO: 1993 - protein, 2100 aa, synthetic construct
MPAAKRVKLDGGDKKYSIGLDIGTNSVGWAVITDEYKVPSKKFKVLGNTDRHSIKKNLIGALLFDSGETAEATRLKRTARRRYTRRKNRICYLQEIFSNEMAKVDDSFFHRLEESFLVEEDKKHERHPIFGNIVDEVAYHEKYPTIYHLRKKLVDSTDKADLRLIYLALAHMIKFRGHFLIEGDLNPDNSDVDKLFIQLVQTYNQLFEENPINASGVDAKAILSARLSKSRRLENLIAQLPGEKKNGLFGNLIALSLGLTPNFKSNFDLAEDAKLQLSKDTYDDDLDNLLAQIGDQYADLFLAAKNLSDAILLSDILRVNTEITKAPLSASMIKRYDEHHQDLTLLKALVRQQLPEKYKEIFFDQSKNGYAGYIDGGASQEEFYKFIKPILEKMDGTEELLVKLNREDLLRKQRTFDNGSIPHQIHLGELHAILRRQEDFYPFLKDNREKIEKILTFRIPYYVGPLARGNSRFAWMTRKSEETITPWNFEEVVDKGASAQSFIERMTNFDKNLPNEKVLPKHSLLYEYFTVYNELTKVKYVTEGMRKPAFLSGEQKKAIVDLLFKTNRKVTVKQLKEDYFKKIECFDSVEISGVEDRFNASLGTYHDLLKIIKDKDFLDNEENEDILEDIVLTLTLFEDREMIEERLKTYAHLFDDKVMKQLKRRRYTGWGRLSRKLINGIRDKQSGKTILDFLKSDGFANRNFMQLIHDDSLTFKEDIQKAQVSGQGDSLHEHIANLAGSPAIKKGILQTVKVVDELVKVMGRHKPENIVIEMARENQTTQKGQKNSRERMKRIEEGIKELGSQILKEHPVENTQLQNEKLYLYYLQNGRDMYVDQELDINRLSDYDVDHIVPQSFLKDDSIDNKVLTRSDKARGKSDNVPSEEVVKKMKNYWRQLLNAKLITQRKFDNLTKAERGGLSELDKAGFIKRQLVETRQITKHVAQILDSRMNTKYDENDKLIREVKVITLKSKLVSDFRKDFQFYKVREINNYHHAHDAYLNAVVGTALIKKYPKLESEFVYGDYKVYDVRKMIAKSEQEIGKATAKYFFYSNIMNFFKTEITLANGEIRKRPLIETNGETGEIVWDKGRDFATVRKVLSMPQVNIVKKTEVQTGGFSKESILPKRNSDKLIARKKDWDPKKYGGFDSPTVAYSVLVVAKVEKGKSKKLKSVKELLGITIMERSSFEKNPIDFLEAKGYKEVKKDLIIKLPKYSLFELENGRKRMLASAGELQKGNELALPSKYVNFLYLASHYEKLKGSPEDNEQKQLFVEQHKHYLDEIIEQISEFSKRVILADANLDKVLSAYNKHRDKPIREQAENIIHLFTLTNLGAPAAFKYFDTTIDRKRYTSTKEVLDATLIHQSITGLYETRIDLSQLGGDGGGSSGGSGGGGGTVSLQDEHRLFDIPVTTSLPDVWLQDFPQAWAETGGLGRAKCQAPIIIDLKPTAVPVSIKQYPMSLEAHMGIRQHIIKFLELGVLRPCRSPWNTPLLPVKKPGTQDYRPVQDLREINKRTVDIHPTVPNPYNLLSTLKPDYSWYTVLDLKDAFFCLPLAPQSQELFAFEWKDPERGISGQLTWTRLPQGFKNSPTLFNEALHRDLTDFRTQHPEVTLLQYVDDLLLAAPTKKACTQGTRHLLQELGEKGYRASAKKAQICQTKVTYLGYILSEGKRWLTPGRIETVARIPPPRNPREVREFLGKAGFCRLFIPGFAELAAPLYALTKPSTPFTWQTEHQLAFEALKKALLSAPALGLPDTSKPFTLFLDERQGIAKGVLTQKLGPWKRPVAYLSKKLDPVAAGWPPCLRIMAATAMLVKDSAKLTLGQPLTVITPHTLEAIVRQPPDRWITNARLTHYQALLLDTDRVQFGPPVTLNPATLLPVPENQPSPHDCRQVLAETHGTREDLKDQELPDADHTWYTDGSSYLDSGTRRAGAAVVDGHNTIWAQSLPPGTSAQKAELIALTKALELSKGKKANIYTDSRYAFATAHTHGSIYERRGWLTSEGKEIKNKAEIIALLKALFLPQEVAIIHCPGHQKGQDPVAVGNRQADRVARQAAMAEVLTLATEPDNTSHITAGKRTADGSEFEKRTADGSEFESPKKKAKVE

SEQ ID NO: 1994 - protein, 2103 aa, synthetic construct
MPAAKRVKLDGGDKKYSIGLDIGTNSVGWAVITDEYKVPSKKFKVLGNTDRHSIKKNLIGALLFDSGETAEATRLKRTARRRYTRRKNRICYLQEIFSNEMAKVDDSFFHRLEESFLVEEDKKHERHPIFGNIVDEVAYHEKYPTIYHLRKKLVDSTDKADLRLIYLALAHMIKFRGHFLIEGDLNPDNSDVDKLFIQLVQTYNQLFEENPINASGVDAKAILSARLSKSRRLENLIAQLPGEKKNGLFGNLIALSLGLTPNFKSNFDLAEDAKLQLSKDTYDDDLDNLLAQIGDQYADLFLAAKNLSDAILLSDILRVNTEITKAPLSASMIKRYDEHHQDLTLLKALVRQQLPEKYKEIFFDQSKNGYAGYIDGGASQEEFYKFIKPILEKMDGTEELLVKLNREDLLRKQRTFDNGSIPHQIHLGELHAILRRQEDFYPFLKDNREKIEKILTFRIPYYVGPLARGNSRFAWMTRKSEETITPWNFEEVVDKGASAQSFIERMTNFDKNLPNEKVLPKHSLLYEYFTVYNELTKVKYVTEGMRKPAFLSGEQKKAIVDLLFKTNRKVTVKQLKEDYFKKIECFDSVEISGVEDRFNASLGTYHDLLKIIKDKDFLDNEENEDILEDIVLTLTLFEDREMIEERLKTYAHLFDDKVMKQLKRRRYTGWGRLSRKLINGIRDKQSGKTILDFLKSDGFANRNFMQLIHDDSLTFKEDIQKAQVSGQGDSLHEHIANLAGSPAIKKGILQTVKVVDELVKVMGRHKPENIVIEMARENQTTQKGQKNSRERMKRIEEGIKELGSQILKEHPVENTQLQNEKLYLYYLQNGRDMYVDQELDINRLSDYDVDHIVPQSFLKDDSIDNKVLTRSDKARGKSDNVPSEEVVKKMKNYWRQLLNAKLITQRKFDNLTKAERGGLSELDKAGFIKRQLVETRQITKHVAQILDSRMNTKYDENDKLIREVKVITLKSKLVSDFRKDFQFYKVREINNYHHAHDAYLNAVVGTALIKKYPKLESEFVYGDYKVYDVRKMIAKSEQEIGKATAKYFFYSNIMNFFKTEITLANGEIRKRPLIETNGETGEIVWDKGRDFATVRKVLSMPQVNIVKKTEVQTGGFSKESILPKRNSDKLIARKKDWDPKKYGGFDSPTVAYSVLVVAKVEKGKSKKLKSVKELLGITIMERSSFEKNPIDFLEAKGYKEVKKDLIIKLPKYSLFELENGRKRMLASAGELQKGNELALPSKYVNFLYLASHYEKLKGSPEDNEQKQLFVEQHKHYLDEIIEQISEFSKRVILADANLDKVLSAYNKHRDKPIREQAENIIHLFTLTNLGAPAAFKYFDTTIDRKRYTSTKEVLDATLIHQSITGLYETRIDLSQLGGDGGGSSGSSGSSGSSGGTVSLQDEHRLFDIPVTTSLPDVWLQDFPQAWAETGGLGRAKCQAPIIIDLKPTAVPVSIKQYPMSLEAHMGIRQHIIKFLELGVLRPCRSPWNTPLLPVKKPGTQDYRPVQDLREINKRTVDIHPTVPNPYNLLSTLKPDYSWYTVLDLKDAFFCLPLAPQSQELFAFEWKDPERGISGQLTWTRLPQGFKNSPTLFNEALHRDLTDFRTQHPEVTLLQYVDDLLLAAPTKKACTQGTRHLLQELGEKGYRASAKKAQICQTKVTYLGYILSEGKRWLTPGRIETVARIPPPRNPREVREFLGKAGFCRLFIPGFAELAAPLYALTKPSTPFTWQTEHQLAFEALKKALLSAPALGLPDTSKPFTLFLDERQGIAKGVLTQKLGPWKRPVAYLSKKLDPVAAGWPPCLRIMAATAMLVKDSAKLTLGQPLTVITPHTLEAIVRQPPDRWITNARLTHYQALLLDTDRVQFGPPVTLNPATLLPVPENQPSPHDCRQVLAETHGTREDLKDQELPDADHTWYTDGSSYLDSGTRRAGAAVVDGHNTIWAQSLPPGTSAQKAELIALTKALELSKGKKANIYTDSRYAFATAHTHGSIYERRGWLTSEGKEIKNKAEIIALLKALFLPQEVAIIHCPGHQKGQDPVAVGNRQADRVARQAAMAEVLTLATEPDNTSHITAGKRTADGSEFEKRTADGSEFESPKKKAKVE

SEQ ID NO: 1995 - protein, 2099 aa, synthetic construct
MPAAKRVKLDGGDKKYSIGLDIGTNSVGWAVITDEYKVPSKKFKVLGNTDRHSIKKNLIGALLFDSGETAEATRLKRTARRRYTRRKNRICYLQEIFSNEMAKVDDSFFHRLEESFLVEEDKKHERHPIFGNIVDEVAYHEKYPTIYHLRKKLVDSTDKADLRLIYLALAHMIKFRGHFLIEGDLNPDNSDVDKLFIQLVQTYNQLFEENPINASGVDAKAILSARLSKSRRLENLIAQLPGEKKNGLFGNLIALSLGLTPNFKSNFDLAEDAKLQLSKDTYDDDLDNLLAQIGDQYADLFLAAKNLSDAILLSDILRVNTEITKAPLSASMIKRYDEHHQDLTLLKALVRQQLPEKYKEIFFDQSKNGYAGYIDGGASQEEFYKFIKPILEKMDGTEELLVKLNREDLLRKQRTFDNGSIPHQIHLGELHAILRRQEDFYPFLKDNREKIEKILTFRIPYYVGPLARGNSRFAWMTRKSEETITPWNFEEVVDKGASAQSFIERMTNFDKNLPNEKVLPKHSLLYEYFTVYNELTKVKYVTEGMRKPAFLSGEQKKAIVDLLFKTNRKVTVKQLKEDYFKKIECFDSVEISGVEDRFNASLGTYHDLLKIIKDKDFLDNEENEDILEDIVLTLTLFEDREMIEERLKTYAHLFDDKVMKQLKRRRYTGWGRLSRKLINGIRDKQSGKTILDFLKSDGFANRNFMQLIHDDSLTFKEDIQKAQVSGQGDSLHEHIANLAGSPAIKKGILQTVKVVDELVKVMGRHKPENIVIEMARENQTTQKGQKNSRERMKRIEEGIKELGSQILKEHPVENTQLQNEKLYLYYLQNGRDMYVDQELDINRLSDYDVDHIVPQSFLKDDSIDNKVLTRSDKARGKSDNVPSEEVVKKMKNYWRQLLNAKLITQRKFDNLTKAERGGLSELDKAGFIKRQLVETRQITKHVAQILDSRMNTKYDENDKLIREVKVITLKSKLVSDFRKDFQFYKVREINNYHHAHDAYLNAVVGTALIKKYPKLESEFVYGDYKVYDVRKMIAKSEQEIGKATAKYFFYSNIMNFFKTEITLANGEIRKRPLIETNGETGEIVWDKGRDFATVRKVLSMPQVNIVKKTEVQTGGFSKESILPKRNSDKLIARKKDWDPKKYGGFDSPTVAYSVLVVAKVEKGKSKKLKSVKELLGITIMERSSFEKNPIDFLEAKGYKEVKKDLIIKLPKYSLFELENGRKRMLASAGELQKGNELALPSKYVNFLYLASHYEKLKGSPEDNEQKQLFVEQHKHYLDEIIEQISEFSKRVILADANLDKVLSAYNKHRDKPIREQAENIIHLFTLTNLGAPAAFKYFDTTIDRKRYTSTKEVLDATLIHQSITGLYETRIDLSQLGGDGGPAPEAAAKGGTVSLQDEHRLFDIPVTTSLPDVWLQDFPQAWAETGGLGRAKCQAPIIIDLKPTAVPVSIKQYPMSLEAHMGIRQHIIKFLELGVLRPCRSPWNTPLLPVKKPGTQDYRPVQDLREINKRTVDIHPTVPNPYNLLSTLKPDYSWYTVLDLKDAFFCLPLAPQSQELFAFEWKDPERGISGQLTWTRLPQGFKNSPTLFNEALHRDLTDFRTQHPEVTLLQYVDDLLLAAPTKKACTQGTRHLLQELGEKGYRASAKKAQICQTKVTYLGYILSEGKRWLTPGRIETVARIPPPRNPREVREFLGKAGFCRLFIPGFAELAAPLYALTKPSTPFTWQTEHQLAFEALKKALLSAPALGLPDTSKPFTLFLDERQGIAKGVLTQKLGPWKRPVAYLSKKLDPVAAGWPPCLRIMAATAMLVKDSAKLTLGQPLTVITPHTLEAIVRQPPDRWITNARLTHYQALLLDTDRVQFGPPVTLNPATLLPVPENQPSPHDCRQVLAETHGTREDLKDQELPDADHTWYTDGSSYLDSGTRRAGAAVVDGHNTIWAQSLPPGTSAQKAELIALTKALELSKGKKANIYTDSRYAFATAHTHGSIYERRGWLTSEGKEIKNKAEIIALLKALFLPQEVAIIHCPGHQKGQDPVAVGNRQADRVARQAAMAEVLTLATEPDNTSHITAGKRTADGSEFEKRTADGSEFESPKKKAKVE

SEQ ID NO: 1996 - protein, 2097 aa, synthetic construct
MPAAKRVKLDGGDKKYSIGLDIGTNSVGWAVITDEYKVPSKKFKVLGNTDRHSIKKNLIGALLFDSGETAEATRLKRTARRRYTRRKNRICYLQEIFSNEMAKVDDSFFHRLEESFLVEEDKKHERHPIFGNIVDEVAYHEKYPTIYHLRKKLVDSTDKADLRLIYLALAHMIKFRGHFLIEGDLNPDNSDVDKLFIQLVQTYNQLFEENPINASGVDAKAILSARLSKSRRLENLIAQLPGEKKNGLFGNLIALSLGLTPNFKSNFDLAEDAKLQLSKDTYDDDLDNLLAQIGDQYADLFLAAKNLSDAILLSDILRVNTEITKAPLSASMIKRYDEHHQDLTLLKALVRQQLPEKYKEIFFDQSKNGYAGYIDGGASQEEFYKFIKPILEKMDGTEELLVKLNREDLLRKQRTFDNGSIPHQIHLGELHAILRRQEDFYPFLKDNREKIEKILTFRIPYYVGPLARGNSRFAWMTRKSEETITPWNFEEVVDKGASAQSFIERMTNFDKNLPNEKVLPKHSLLYEYFTVYNELTKVKYVTEGMRKPAFLSGEQKKAIVDLLFKTNRKVTVKQLKEDYFKKIECFDSVEISGVEDRFNASLGTYHDLLKIIKDKDFLDNEENEDILEDIVLTLTLFEDREMIEERLKTYAHLFDDKVMKQLKRRRYTGWGRLSRKLINGIRDKQSGKTILDFLKSDGFANRNFMQLIHDDSLTFKEDIQKAQVSGQGDSLHEHIANLAGSPAIKKGILQTVKVVDELVKVMGRHKPENIVIEMARENQTTQKGQKNSRERMKRIEEGIKELGSQILKEHPVENTQLQNEKLYLYYLQNGRDMYVDQELDINRLSDYDVDHIVPQSFLKDDSIDNKVLTRSDKARGKSDNVPSEEVVKKMKNYWRQLLNAKLITQRKFDNLTKAERGGLSELDKAGFIKRQLVETRQITKHVAQILDSRMNTKYDENDKLIREVKVITLKSKLVSDFRKDFQFYKVREINNYHHAHDAYLNAVVGTALIKKYPKLESEFVYGDYKVYDVRKMIAKSEQEIGKATAKYFFYSNIMNFFKTEITLANGEIRKRPLIETNGETGEIVWDKGRDFATVRKVLSMPQVNIVKKTEVQTGGFSKESILPKRNSDKLIARKKDWDPKKYGGFDSPTVAYSVLVVAKVEKGKSKKLKSVKELLGITIMERSSFEKNPIDFLEAKGYKEVKKDLIIKLPKYSLFELENGRKRMLASAGELQKGNELALPSKYVNFLYLASHYEKLKGSPEDNEQKQLFVEQHKHYLDEIIEQISEFSKRVILADANLDKVLSAYNKHRDKPIREQAENIIHLFTLTNLGAPAAFKYFDTTIDRKRYTSTKEVLDATLIHQSITGLYETRIDLSQLGGDGGGGGPAPGGTVSLQDEHRLFDIPVTTSLPDVWLQDFPQAWAETGGLGRAKCQAPIIIDLKPTAVPVSIKQYPMSLEAHMGIRQHIIKFLELGVLRPCRSPWNTPLLPVKKPGTQDYRPVQDLREINKRTVDIHPTVPNPYNLLSTLKPDYSWYTVLDLKDAFFCLPLAPQSQELFAFEWKDPERGISGQLTWTRLPQGFKNSPTLFNEALHRDLTDFRTQHPEVTLLQYVDDLLLAAPTKKACTQGTRHLLQELGEKGYRASAKKAQICQTKVTYLGYILSEGKRWLTPGRIETVARIPPPRNPREVREFLGKAGFCRLFIPGFAELAAPLYALTKPSTPFTWQTEHQLAFEALKKALLSAPALGLPDTSKPFTLFLDERQGIAKGVLTQKLGPWKRPVAYLSKKLDPVAAGWPPCLRIMAATAMLVKDSAKLTLGQPLTVITPHTLEAIVRQPPDRWITNARLTHYQALLLDTDRVQFGPPVTLNPATLLPVPENQPSPHDCRQVLAETHGTREDLKDQELPDADHTWYTDGSSYLDSGTRRAGAAVVDGHNTIWAQSLPPGTSAQKAELIALTKALELSKGKKANIYTDSRYAFATAHTHGSIYERRGWLTSEGKEIKNKAEIIALLKALFLPQEVAIIHCPGHQKGQDPVAVGNRQADRVARQAAMAEVLTLATEPDNTSHITAGKRTADGSEFEKRTADGSEFESPKKKAKVE

SEQ ID NO: 1997 - protein, 2099 aa, synthetic construct
MPAAKRVKLDGGDKKYSIGLDIGTNSVGWAVITDEYKVPSKKFKVLGNTDRHSIKKNLIGALLFDSGETAEATRLKRTARRRYTRRKNRICYLQEIFSNEMAKVDDSFFHRLEESFLVEEDKKHERHPIFGNIVDEVAYHEKYPTIYHLRKKLVDSTDKADLRLIYLALAHMIKFRGHFLIEGDLNPDNSDVDKLFIQLVQTYNQLFEENPINASGVDAKAILSARLSKSRRLENLIAQLPGEKKNGLFGNLIALSLGLTPNFKSNFDLAEDAKLQLSKDTYDDDLDNLLAQIGDQYADLFLAAKNLSDAILLSDILRVNTEITKAPLSASMIKRYDEHHQDLTLLKALVRQQLPEKYKEIFFDQSKNGYAGYIDGGASQEEFYKFIKPILEKMDGTEELLVKLNREDLLRKQRTFDNGSIPHQIHLGELHAILRRQEDFYPFLKDNREKIEKILTFRIPYYVGPLARGNSRFAWMTRKSEETITPWNFEEVVDKGASAQSFIERMTNFDKNLPNEKVLPKHSLLYEYFTVYNELTKVKYVTEGMRKPAFLSGEQKKAIVDLLFKTNRKVTVKQLKEDYFKKIECFDSVEISGVEDRFNASLGTYHDLLKIIKDKDFLDNEENEDILEDIVLTLTLFEDREMIEERLKTYAHLFDDKVMKQLKRRRYTGWGRLSRKLINGIRDKQSGKTILDFLKSDGFANRNFMQLIHDDSLTFKEDIQKAQVSGQGDSLHEHIANLAGSPAIKKGILQTVKVVDELVKVMGRHKPENIVIEMARENQTTQKGQKNSRERMKRIEEGIKELGSQILKEHPVENTQLQNEKLYLYYLQNGRDMYVDQELDINRLSDYDVDHIVPQSFLKDDSIDNKVLTRSDKARGKSDNVPSEEVVKKMKNYWRQLLNAKLITQRKFDNLTKAERGGLSELDKAGFIKRQLVETRQITKHVAQILDSRMNTKYDENDKLIREVKVITLKSKLVSDFRKDFQFYKVREINNYHHAHDAYLNAVVGTALIKKYPKLESEFVYGDYKVYDVRKMIAKSEQEIGKATAKYFFYSNIMNFFKTEITLANGEIRKRPLIETNGETGEIVWDKGRDFATVRKVLSMPQVNIVKKTEVQTGGFSKESILPKRNSDKLIARKKDWDPKKYGGFDSPTVAYSVLVVAKVEKGKSKKLKSVKELLGITIMERSSFEKNPIDFLEAKGYKEVKKDLIIKLPKYSLFELENGRKRMLASAGELQKGNELALPSKYVNFLYLASHYEKLKGSPEDNEQKQLFVEQHKHYLDEIIEQISEFSKRVILADANLDKVLSAYNKHRDKPIREQAENIIHLFTLTNLGAPAAFKYFDTTIDRKRYTSTKEVLDATLIHQSITGLYETRIDLSQLGGDGGGGSEAAAKGGTVSLQDEHRLFDIPVTTSLPDVWLQDFPQAWAETGGLGRAKCQAPIIIDLKPTAVPVSIKQYPMSLEAHMGIRQHIIKFLELGVLRPCRSPWNTPLLPVKKPGTQDYRPVQDLREINKRTVDIHPTVPNPYNLLSTLKPDYSWYTVLDLKDAFFCLPLAPQSQELFAFEWKDPERGISGQLTWTRLPQGFKNSPTLFNEALHRDLTDFRTQHPEVTLLQYVDDLLLAAPTKKACTQGTRHLLQELGEKGYRASAKKAQICQTKVTYLGYILSEGKRWLTPGRIETVARIPPPRNPREVREFLGKAGFCRLFIPGFAELAAPLYALTKPSTPFTWQTEHQLAFEALKKALLSAPALGLPDTSKPFTLFLDERQGIAKGVLTQKLGPWKRPVAYLSKKLDPVAAGWPPCLRIMAATAMLVKDSAKLTLGQPLTVITPHTLEAIVRQPPDRWITNARLTHYQALLLDTDRVQFGPPVTLNPATLLPVPENQPSPHDCRQVLAETHGTREDLKDQELPDADHTWYTDGSSYLDSGTRRAGAAVVDGHNTIWAQSLPPGTSAQKAELIALTKALELSKGKKANIYTDSRYAFATAHTHGSIYERRGWLTSEGKEIKNKAEIIALLKALFLPQEVAIIHCPGHQKGQDPVAVGNRQADRVARQAAMAEVLTLATEPDNTSHITAGKRTADGSEFEKRTADGSEFESPKKKAKVE

SEQ ID NO: 1998 - protein, 2096 aa, synthetic construct
MPAAKRVKLDGGDKKYSIGLDIGTNSVGWAVITDEYKVPSKKFKVLGNTDRHSIKKNLIGALLFDSGETAEATRLKRTARRRYTRRKNRICYLQEIFSNEMAKVDDSFFHRLEESFLVEEDKKHERHPIFGNIVDEVAYHEKYPTIYHLRKKLVDSTDKADLRLIYLALAHMIKFRGHFLIEGDLNPDNSDVDKLFIQLVQTYNQLFEENPINASGVDAKAILSARLSKSRRLENLIAQLPGEKKNGLFGNLIALSLGLTPNFKSNFDLAEDAKLQLSKDTYDDDLDNLLAQIGDQYADLFLAAKNLSDAILLSDILRVNTEITKAPLSASMIKRYDEHHQDLTLLKALVRQQLPEKYKEIFFDQSKNGYAGYIDGGASQEEFYKFIKPILEKMDGTEELLVKLNREDLLRKQRTFDNGSIPHQIHLGELHAILRRQEDFYPFLKDNREKIEKILTFRIPYYVGPLARGNSRFAWMTRKSEETITPWNFEEVVDKGASAQSFIERMTNFDKNLPNEKVLPKHSLLYEYFTVYNELTKVKYVTEGMRKPAFLSGEQKKAIVDLLFKTNRKVTVKQLKEDYFKKIECFDSVEISGVEDRFNASLGTYHDLLKIIKDKDFLDNEENEDILEDIVLTLTLFEDREMIEERLKTYAHLFDDKVMKQLKRRRYTGWGRLSRKLINGIRDKQSGKTILDFLKSDGFANRNFMQLIHDDSLTFKEDIQKAQVSGQGDSLHEHIANLAGSPAIKKGILQTVKVVDELVKVMGRHKPENIVIEMARENQTTQKGQKNSRERMKRIEEGIKELGSQILKEHPVENTQLQNEKLYLYYLQNGRDMYVDQELDINRLSDYDVDHIVPQSFLKDDSIDNKVLTRSDKARGKSDNVPSEEVVKKMKNYWRQLLNAKLITQRKFDNLTKAERGGLSELDKAGFIKRQLVETRQITKHVAQILDSRMNTKYDENDKLIREVKVITLKSKLVSDFRKDFQFYKVREINNYHHAHDAYLNAVVGTALIKKYPKLESEFVYGDYKVYDVRKMIAKSEQEIGKATAKYFFYSNIMNFFKTEITLANGEIRKRPLIETNGETGEIVWDKGRDFATVRKVLSMPQVNIVKKTEVQTGGFSKESILPKRNSDKLIARKKDWDPKKYGGFDSPTVAYSVLVVAKVEKGKSKKLKSVKELLGITIMERSSFEKNPIDFLEAKGYKEVKKDLIIKLPKYSLFELENGRKRMLASAGELQKGNELALPSKYVNFLYLASHYEKLKGSPEDNEQKQLFVEQHKHYLDEIIEQISEFSKRVILADANLDKVLSAYNKHRDKPIREQAENIIHLFTLTNLGAPAAFKYFDTTIDRKRYTSTKEVLDATLIHQSITGLYETRIDLSQLGGDGGGGGGGGGTVSLQDEHRLFDIPVTTSLPDVWLQDFPQAWAETGGLGRAKCQAPIIIDLKPTAVPVSIKQYPMSLEAHMGIRQHIIKFLELGVLRPCRSPWNTPLLPVKKPGTQDYRPVQDLREINKRTVDIHPTVPNPYNLLSTLKPDYSWYTVLDLKDAFFCLPLAPQSQELFAFEWKDPERGISGQLTWTRLPQGFKNSPTLFNEALHRDLTDFRTQHPEVTLLQYVDDLLLAAPTKKACTQGTRHLLQELGEKGYRASAKKAQICQTKVTYLGYILSEGKRWLTPGRIETVARIPPPRNPREVREFLGKAGFCRLFIPGFAELAAPLYALTKPSTPFTWQTEHQLAFEALKKALLSAPALGLPDTSKPFTLFLDERQGIAKGVLTQKLGPWKRPVAYLSKKLDPVAAGWPPCLRIMAATAMLVKDSAKLTLGQPLTVITPHTLEAIVRQPPDRWITNARLTHYQALLLDTDRVQFGPPVTLNPATLLPVPENQPSPHDCRQVLAETHGTREDLKDQELPDADHTWYTDGSSYLDSGTRRAGAAVVDGHNTIWAQSLPPGTSAQKAELIALTKALELSKGKKANIYTDSRYAFATAHTHGSIYERRGWLTSEGKEIKNKAEIIALLKALFLPQEVAIIHCPGHQKGQDPVAVGNRQADRVARQAAMAEVLTLATEPDNTSHITAGKRTADGSEFEKRTADGSEFESPKKKAKVE

SEQ ID NO: 1999 - protein, 2094 aa, synthetic construct
MPAAKRVKLDGGDKKYSIGLDIGTNSVGWAVITDEYKVPSKKFKVLGNTDRHSIKKNLIGALLFDSGETAEATRLKRTARRRYTRRKNRICYLQEIFSNEMAKVDDSFFHRLEESFLVEEDKKHERHPIFGNIVDEVAYHEKYPTIYHLRKKLVDSTDKADLRLIYLALAHMIKFRGHFLIEGDLNPDNSDVDKLFIQLVQTYNQLFEENPINASGVDAKAILSARLSKSRRLENLIAQLPGEKKNGLFGNLIALSLGLTPNFKSNFDLAEDAKLQLSKDTYDDDLDNLLAQIGDQYADLFLAAKNLSDAILLSDILRVNTEITKAPLSASMIKRYDEHHQDLTLLKALVRQQLPEKYKEIFFDQSKNGYAGYIDGGASQEEFYKFIKPILEKMDGTEELLVKLNREDLLRKQRTFDNGSIPHQIHLGELHAILRRQEDFYPFLKDNREKIEKILTFRIPYYVGPLARGNSRFAWMTRKSEETITPWNFEEVVDKGASAQSFIERMTNFDKNLPNEKVLPKHSLLYEYFTVYNELTKVKYVTEGMRKPAFLSGEQKKAIVDLLFKTNRKVTVKQLKEDYFKKIECFDSVEISGVEDRFNASLGTYHDLLKIIKDKDFLDNEENEDILEDIVLTLTLFEDREMIEERLKTYAHLFDDKVMKQLKRRRYTGWGRLSRKLINGIRDKQSGKTILDFLKSDGFANRNFMQLIHDDSLTFKEDIQKAQVSGQGDSLHEHIANLAGSPAIKKGILQTVKVVDELVKVMGRHKPENIVIEMARENQTTQKGQKNSRERMKRIEEGIKELGSQILKEHPVENTQLQNEKLYLYYLQNGRDMYVDQELDINRLSDYDVDHIVPQSFLKDDSIDNKVLTRSDKARGKSDNVPSEEVVKKMKNYWRQLLNAKLITQRKFDNLTKAERGGLSELDKAGFIKRQLVETRQITKHVAQILDSRMNTKYDENDKLIREVKVITLKSKLVSDFRKDFQFYKVREINNYHHAHDAYLNAVVGTALIKKYPKLESEFVYGDYKVYDVRKMIAKSEQEIGKATAKYFFYSNIMNFFKTEITLANGEIRKRPLIETNGETGEIVWDKGRDFATVRKVLSMPQVNIVKKTEVQTGGFSKESILPKRNSDKLIARKKDWDPKKYGGFDSPTVAYSVLVVAKVEKGKSKKLKSVKELLGITIMERSSFEKNPIDFLEAKGYKEVKKDLIIKLPKYSLFELENGRKRMLASAGELQKGNELALPSKYVNFLYLASHYEKLKGSPEDNEQKQLFVEQHKHYLDEIIEQISEFSKRVILADANLDKVLSAYNKHRDKPIREQAENIIHLFTLTNLGAPAAFKYFDTTIDRKRYTSTKEVLDATLIHQSITGLYETRIDLSQLGGDGGGGSGGTVSLQDEHRLFDIPVTTSLPDVWLQDFPQAWAETGGLGRAKCQAPIIIDLKPTAVPVSIKQYPMSLEAHMGIRQHIIKFLELGVLRPCRSPWNTPLLPVKKPGTQDYRPVQDLREINKRTVDIHPTVPNPYNLLSTLKPDYSWYTVLDLKDAFFCLPLAPQSQELFAFEWKDPERGISGQLTWTRLPQGFKNSPTLFNEALHRDLTDFRTQHPEVTLLQYVDDLLLAAPTKKACTQGTRHLLQELGEKGYRASAKKAQICQTKVTYLGYILSEGKRWLTPGRIETVARIPPPRNPREVREFLGKAGFCRLFIPGFAELAAPLYALTKPSTPFTWQTEHQLAFEALKKALLSAPALGLPDTSKPFTLFLDERQGIAKGVLTQKLGPWKRPVAYLSKKLDPVAAGWPPCLRIMAATAMLVKDSAKLTLGQPLTVITPHTLEAIVRQPPDRWITNARLTHYQALLLDTDRVQFGPPVTLNPATLLPVPENQPSPHDCRQVLAETHGTREDLKDQELPDADHTWYTDGSSYLDSGTRRAGAAVVDGHNTIWAQSLPPGTSAQKAELIALTKALELSKGKKANIYTDSRYAFATAHTHGSIYERRGWLTSEGKEIKNKAEIIALLKALFLPQEVAIIHCPGHQKGQDPVAVGNRQADRVARQAAMAEVLTLATEPDNTSHITAGKRTADGSEFEKRTADGSEFESPKKKAKVE

SEQ ID NO: 2000 - protein, 2121 aa, synthetic construct
MPAAKRVKLDGGDKKYSIGLDIGTNSVGWAVITDEYKVPSKKFKVLGNTDRHSIKKNLIGALLFDSGETAEATRLKRTARRRYTRRKNRICYLQEIFSNEMAKVDDSFFHRLEESFLVEEDKKHERHPIFGNIVDEVAYHEKYPTIYHLRKKLVDSTDKADLRLIYLALAHMIKFRGHFLIEGDLNPDNSDVDKLFIQLVQTYNQLFEENPINASGVDAKAILSARLSKSRRLENLIAQLPGEKKNGLFGNLIALSLGLTPNFKSNFDLAEDAKLQLSKDTYDDDLDNLLAQIGDQYADLFLAAKNLSDAILLSDILRVNTEITKAPLSASMIKRYDEHHQDLTLLKALVRQQLPEKYKEIFFDQSKNGYAGYIDGGASQEEFYKFIKPILEKMDGTEELLVKLNREDLLRKQRTFDNGSIPHQIHLGELHAILRRQEDFYPFLKDNREKIEKILTFRIPYYVGPLARGNSRFAWMTRKSEETITPWNFEEVVDKGASAQSFIERMTNFDKNLPNEKVLPKHSLLYEYFTVYNELTKVKYVTEGMRKPAFLSGEQKKAIVDLLFKTNRKVTVKQLKEDYFKKIECFDSVEISGVEDRFNASLGTYHDLLKIIKDKDFLDNEENEDILEDIVLTLTLFEDREMIEERLKTYAHLFDDKVMKQLKRRRYTGWGRLSRKLINGIRDKQSGKTILDFLKSDGFANRNFMQLIHDDSLTFKEDIQKAQVSGQGDSLHEHIANLAGSPAIKKGILQTVKVVDELVKVMGRHKPENIVIEMARENQTTQKGQKNSRERMKRIEEGIKELGSQILKEHPVENTQLQNEKLYLYYLQNGRDMYVDQELDINRLSDYDVDHIVPQSFLKDDSIDNKVLTRSDKARGKSDNVPSEEVVKKMKNYWRQLLNAKLITQRKFDNLTKAERGGLSELDKAGFIKRQLVETRQITKHVAQILDSRMNTKYDENDKLIREVKVITLKSKLVSDFRKDFQFYKVREINNYHHAHDAYLNAVVGTALIKKYPKLESEFVYGDYKVYDVRKMIAKSEQEIGKATAKYFFYSNIMNFFKTEITLANGEIRKRPLIETNGETGEIVWDKGRDFATVRKVLSMPQVNIVKKTEVQTGGFSKESILPKRNSDKLIARKKDWDPKKYGGFDSPTVAYSVLVVAKVEKGKSKKLKSVKELLGITIMERSSFEKNPIDFLEAKGYKEVKKDLIIKLPKYSLFELENGRKRMLASAGELQKGNELALPSKYVNFLYLASHYEKLKGSPEDNEQKQLFVEQHKHYLDEIIEQISEFSKRVILADANLDKVLSAYNKHRDKPIREQAENIIHLFTLTNLGAPAAFKYFDTTIDRKRYTSTKEVLDATLIHQSITGLYETRIDLSQLGGDGGEAAAKEAAAKEAAAKEAAAKEAAAKEAAAKGGTVSLQDEHRLFDIPVTTSLPDVWLQDFPQAWAETGGLGRAKCQAPIIIDLKPTAVPVSIKQYPMSLEAHMGIRQHIIKFLELGVLRPCRSPWNTPLLPVKKPGTQDYRPVQDLREINKRTVDIHPTVPNPYNLLSTLKPDYSWYTVLDLKDAFFCLPLAPQSQELFAFEWKDPERGISGQLTWTRLPQGFKNSPTLFNEALHRDLTDFRTQHPEVTLLQYVDDLLLAAPTKKACTQGTRHLLQELGEKGYRASAKKAQICQTKVTYLGYILSEGKRWLTPGRIETVARIPPPRNPREVREFLGKAGFCRLFIPGFAELAAPLYALTKPSTPFTWQTEHQLAFEALKKALLSAPALGLPDTSKPFTLFLDERQGIAKGVLTQKLGPWKRPVAYLSKKLDPVAAGWPPCLRIMAATAMLVKDSAKLTLGQPLTVITPHTLEAIVRQPPDRWITNARLTHYQALLLDTDRVQFGPPVTLNPATLLPVPENQPSPHDCRQVLAETHGTREDLKDQELPDADHTWYTDGSSYLDSGTRRAGAAVVDGHNTIWAQSLPPGTSAQKAELIALTKALELSKGKKANIYTDSRYAFATAHTHGSIYERRGWLTSEGKEIKNKAEIIALLKALFLPQEVAIIHCPGHQKGQDPVAVGNRQADRVARQAAMAEVLTLATEPDNTSHITAGKRTADGSEFEKRTADGSEFESPKKKAKVE

SEQ ID NO: 2001 - protein, 2102 aa, synthetic construct
MPAAKRVKLDGGDKKYSIGLDIGTNSVGWAVITDEYKVPSKKFKVLGNTDRHSIKKNLIGALLFDSGETAEATRLKRTARRRYTRRKNRICYLQEIFSNEMAKVDDSFFHRLEESFLVEEDKKHERHPIFGNIVDEVAYHEKYPTIYHLRKKLVDSTDKADLRLIYLALAHMIKFRGHFLIEGDLNPDNSDVDKLFIQLVQTYNQLFEENPINASGVDAKAILSARLSKSRRLENLIAQLPGEKKNGLFGNLIALSLGLTPNFKSNFDLAEDAKLQLSKDTYDDDLDNLLAQIGDQYADLFLAAKNLSDAILLSDILRVNTEITKAPLSASMIKRYDEHHQDLTLLKALVRQQLPEKYKEIFFDQSKNGYAGYIDGGASQEEFYKFIKPILEKMDGTEELLVKLNREDLLRKQRTFDNGSIPHQIHLGELHAILRRQEDFYPFLKDNREKIEKILTFRIPYYVGPLARGNSRFAWMTRKSEETITPWNFEEVVDKGASAQSFIERMTNFDKNLPNEKVLPKHSLLYEYFTVYNELTKVKYVTEGMRKPAFLSGEQKKAIVDLLFKTNRKVTVKQLKEDYFKKIECFDSVEISGVEDRFNASLGTYHDLLKIIKDKDFLDNEENEDILEDIVLTLTLFEDREMIEERLKTYAHLFDDKVMKQLKRRRYTGWGRLSRKLINGIRDKQSGKTILDFLKSDGFANRNFMQLIHDDSLTFKEDIQKAQVSGQGDSLHEHIANLAGSPAIKKGILQTVKVVDELVKVMGRHKPENIVIEMARENQTTQKGQKNSRERMKRIEEGIKELGSQILKEHPVENTQLQNEKLYLYYLQNGRDMYVDQELDINRLSDYDVDHIVPQSFLKDDSIDNKVLTRSDKARGKSDNVPSEEVVKKMKNYWRQLLNAKLITQRKFDNLTKAERGGLSELDKAGFIKRQLVETRQITKHVAQILDSRMNTKYDENDKLIREVKVITLKSKLVSDFRKDFQFYKVREINNYHHAHDAYLNAVVGTALIKKYPKLESEFVYGDYKVYDVRKMIAKSEQEIGKATAKYFFYSNIMNFFKTEITLANGEIRKRPLIETNGETGEIVWDKGRDFATVRKVLSMPQVNIVKKTEVQTGGFSKESILPKRNSDKLIARKKDWDPKKYGGFDSPTVAYSVLVVAKVEKGKSKKLKSVKELLGITIMERSSFEKNPIDFLEAKGYKEVKKDLIIKLPKYSLFELENGRKRMLASAGELQKGNELALPSKYVNFLYLASHYEKLKGSPEDNEQKQLFVEQHKHYLDEIIEQISEFSKRVILADANLDKVLSAYNKHRDKPIREQAENIIHLFTLTNLGAPAAFKYFDTTIDRKRYTSTKEVLDATLIHQSITGLYETRIDLSQLGGDGGEAAAKGGSGSSGGTVSLQDEHRLFDIPVTTSLPDVWLQDFPQAWAETGGLGRAKCQAPIIIDLKPTAVPVSIKQYPMSLEAHMGIRQHIIKFLELGVLRPCRSPWNTPLLPVKKPGTQDYRPVQDLREINKRTVDIHPTVPNPYNLLSTLKPDYSWYTVLDLKDAFFCLPLAPQSQELFAFEWKDPERGISGQLTWTRLPQGFKNSPTLFNEALHRDLTDFRTQHPEVTLLQYVDDLLLAAPTKKACTQGTRHLLQELGEKGYRASAKKAQICQTKVTYLGYILSEGKRWLTPGRIETVARIPPPRNPREVREFLGKAGFCRLFIPGFAELAAPLYALTKPSTPFTWQTEHQLAFEALKKALLSAPALGLPDTSKPFTLFLDERQGIAKGVLTQKLGPWKRPVAYLSKKLDPVAAGWPPCLRIMAATAMLVKDSAKLTLGQPLTVITPHTLEAIVRQPPDRWITNARLTHYQALLLDTDRVQFGPPVTLNPATLLPVPENQPSPHDCRQVLAETHGTREDLKDQELPDADHTWYTDGSSYLDSGTRRAGAAVVDGHNTIWAQSLPPGTSAQKAELIALTKALELSKGKKANIYTDSRYAFATAHTHGSIYERRGWLTSEGKEIKNKAEIIALLKALFLPQEVAIIHCPGHQKGQDPVAVGNRQADRVARQAAMAEVLTLATEPDNTSHITAGKRTADGSEFEKRTADGSEFESPKKKAKVE

SEQ ID NO: 2002 - protein, 2100 aa, synthetic construct
MPAAKRVKLDGGDKKYSIGLDIGTNSVGWAVITDEYKVPSKKFKVLGNTDRHSIKKNLIGALLFDSGETAEATRLKRTARRRYTRRKNRICYLQEIFSNEMAKVDDSFFHRLEESFLVEEDKKHERHPIFGNIVDEVAYHEKYPTIYHLRKKLVDSTDKADLRLIYLALAHMIKFRGHFLIEGDLNPDNSDVDKLFIQLVQTYNQLFEENPINASGVDAKAILSARLSKSRRLENLIAQLPGEKKNGLFGNLIALSLGLTPNFKSNFDLAEDAKLQLSKDTYDDDLDNLLAQIGDQYADLFLAAKNLSDAILLSDILRVNTEITKAPLSASMIKRYDEHHQDLTLLKALVRQQLPEKYKEIFFDQSKNGYAGYIDGGASQEEFYKFIKPILEKMDGTEELLVKLNREDLLRKQRTFDNGSIPHQIHLGELHAILRRQEDFYPFLKDNREKIEKILTFRIPYYVGPLARGNSRFAWMTRKSEETITPWNFEEVVDKGASAQSFIERMTNFDKNLPNEKVLPKHSLLYEYFTVYNELTKVKYVTEGMRKPAFLSGEQKKAIVDLLFKTNRKVTVKQLKEDYFKKIECFDSVEISGVEDRFNASLGTYHDLLKIIKDKDFLDNEENEDILEDIVLTLTLFEDREMIEERLKTYAHLFDDKVMKQLKRRRYTGWGRLSRKLINGIRDKQSGKTILDFLKSDGFANRNFMQLIHDDSLTFKEDIQKAQVSGQGDSLHEHIANLAGSPAIKKGILQTVKVVDELVKVMGRHKPENIVIEMARENQTTQKGQKNSRERMKRIEEGIKELGSQILKEHPVENTQLQNEKLYLYYLQNGRDMYVDQELDINRLSDYDVDHIVPQSFLKDDSIDNKVLTRSDKARGKSDNVPSEEVVKKMKNYWRQLLNAKLITQRKFDNLTKAERGGLSELDKAGFIKRQLVETRQITKHVAQILDSRMNTKYDENDKLIREVKVITLKSKLVSDFRKDFQFYKVREINNYHHAHDAYLNAVVGTALIKKYPKLESEFVYGDYKVYDVRKMIAKSEQEIGKATAKYFFYSNIMNFFKTEITLANGEIRKRPLIETNGETGEIVWDKGRDFATVRKVLSMPQVNIVKKTEVQTGGFSKESILPKRNSDKLIARKKDWDPKKYGGFDSPTVAYSVLVVAKVEKGKSKKLKSVKELLGITIMERSSFEKNPIDFLEAKGYKEVKKDLIIKLPKYSLFELENGRKRMLASAGELQKGNELALPSKYVNFLYLASHYEKLKGSPEDNEQKQLFVEQHKHYLDEIIEQISEFSKRVILADANLDKVLSAYNKHRDKPIREQAENIIHLFTLTNLGAPAAFKYFDTTIDRKRYTSTKEVLDATLIHQSITGLYETRIDLSQLGGDGGGGGGSSPAPGGTVSLQDEHRLFDIPVTTSLPDVWLQDFPQAWAETGGLGRAKCQAPIIIDLKPTAVPVSIKQYPMSLEAHMGIRQHIIKFLELGVLRPCRSPWNTPLLPVKKPGTQDYRPVQDLREINKRTVDIHPTVPNPYNLLSTLKPDYSWYTVLDLKDAFFCLPLAPQSQELFAFEWKDPERGISGQLTWTRLPQGFKNSPTLFNEALHRDLTDFRTQHPEVTLLQYVDDLLLAAPTKKACTQGTRHLLQELGEKGYRASAKKAQICQTKVTYLGYILSEGKRWLTPGRIETVARIPPPRNPREVREFLGKAGFCRLFIPGFAELAAPLYALTKPSTPFTWQTEHQLAFEALKKALLSAPALGLPDTSKPFTLFLDERQGIAKGVLTQKLGPWKRPVAYLSKKLDPVAAGWPPCLRIMAATAMLVKDSAKLTLGQPLTVITPHTLEAIVRQPPDRWITNARLTHYQALLLDTDRVQFGPPVTLNPATLLPVPENQPSPHDCRQVLAETHGTREDLKDQELPDADHTWYTDGSSYLDSGTRRAGAAVVDGHNTIWAQSLPPGTSAQKAELIALTKALELSKGKKANIYTDSRYAFATAHTHGSIYERRGWLTSEGKEIKNKAEIIALLKALFLPQEVAIIHCPGHQKGQDPVAVGNRQADRVARQAAMAEVLTLATEPDNTSHITAGKRTADGSEFEKRTADGSEFESPKKKAKVE

SEQ ID NO: 2003 - protein, 2102 aa, synthetic construct
MPAAKRVKLDGGDKKYSIGLDIGTNSVGWAVITDEYKVPSKKFKVLGNTDRHSIKKNLIGALLFDSGETAEATRLKRTARRRYTRRKNRICYLQEIFSNEMAKVDDSFFHRLEESFLVEEDKKHERHPIFGNIVDEVAYHEKYPTIYHLRKKLVDSTDKADLRLIYLALAHMIKFRGHFLIEGDLNPDNSDVDKLFIQLVQTYNQLFEENPINASGVDAKAILSARLSKSRRLENLIAQLPGEKKNGLFGNLIALSLGLTPNFKSNFDLAEDAKLQLSKDTYDDDLDNLLAQIGDQYADLFLAAKNLSDAILLSDILRVNTEITKAPLSASMIKRYDEHHQDLTLLKALVRQQLPEKYKEIFFDQSKNGYAGYIDGGASQEEFYKFIKPILEKMDGTEELLVKLNREDLLRKQRTFDNGSIPHQIHLGELHAILRRQEDFYPFLKDNREKIEKILTFRIPYYVGPLARGNSRFAWMTRKSEETITPWNFEEVVDKGASAQSFIERMTNFDKNLPNEKVLPKHSLLYEYFTVYNELTKVKYVTEGMRKPAFLSGEQKKAIVDLLFKTNRKVTVKQLKEDYFKKIECFDSVEISGVEDRFNASLGTYHDLLKIIKDKDFLDNEENEDILEDIVLTLTLFEDREMIEERLKTYAHLFDDKVMKQLKRRRYTGWGRLSRKLINGIRDKQSGKTILDFLKSDGFANRNFMQLIHDDSLTFKEDIQKAQVSGQGDSLHEHIANLAGSPAIKKGILQTVKVVDELVKVMGRHKPENIVIEMARENQTTQKGQKNSRERMKRIEEGIKELGSQILKEHPVENTQLQNEKLYLYYLQNGRDMYVDQELDINRLSDYDVDHIVPQSFLKDDSIDNKVLTRSDKARGKSDNVPSEEVVKKMKNYWRQLLNAKLITQRKFDNLTKAERGGLSELDKAGFIKRQLVETRQITKHVAQILDSRMNTKYDENDKLIREVKVITLKSKLVSDFRKDFQFYKVREINNYHHAHDAYLNAVVGTALIKKYPKLESEFVYGDYKVYDVRKMIAKSEQEIGKATAKYFFYSNIMNFFKTEITLANGEIRKRPLIETNGETGEIVWDKGRDFATVRKVLSMPQVNIVKKTEVQTGGFSKESILPKRNSDKLIARKKDWDPKKYGGFDSPTVAYSVLVVAKVEKGKSKKLKSVKELLGITIMERSSFEKNPIDFLEAKGYKEVKKDLIIKLPKYSLFELENGRKRMLASAGELQKGNELALPSKYVNFLYLASHYEKLKGSPEDNEQKQLFVEQHKHYLDEIIEQISEFSKRVILADANLDKVLSAYNKHRDKPIREQAENIIHLFTLTNLGAPAAFKYFDTTIDRKRYTSTKEVLDATLIHQSITGLYETRIDLSQLGGDGGGGSGGGEAAAKGGTVSLQDEHRLFDIPVTTSLPDVWLQDFPQAWAETGGLGRAKCQAPIIIDLKPTAVPVSIKQYPMSLEAHMGIRQHIIKFLELGVLRPCRSPWNTPLLPVKKPGTQDYRPVQDLREINKRTVDIHPTVPNPYNLLSTLKPDYSWYTVLDLKDAFFCLPLAPQSQELFAFEWKDPERGISGQLTWTRLPQGFKNSPTLFNEALHRDLTDFRTQHPEVTLLQYVDDLLLAAPTKKACTQGTRHLLQELGEKGYRASAKKAQICQTKVTYLGYILSEGKRWLTPGRIETVARIPPPRNPREVREFLGKAGFCRLFIPGFAELAAPLYALTKPSTPFTWQTEHQLAFEALKKALLSAPALGLPDTSKPFTLFLDERQGIAKGVLTQKLGPWKRPVAYLSKKLDPVAAGWPPCLRIMAATAMLVKDSAKLTLGQPLTVITPHTLEAIVRQPPDRWITNARLTHYQALLLDTDRVQFGPPVTLNPATLLPVPENQPSPHDCRQVLAETHGTREDLKDQELPDADHTWYTDGSSYLDSGTRRAGAAVVDGHNTIWAQSLPPGTSAQKAELIALTKALELSKGKKANIYTDSRYAFATAHTHGSIYERRGWLTSEGKEIKNKAEIIALLKALFLPQEVAIIHCPGHQKGQDPVAVGNRQADRVARQAAMAEVLTLATEPDNTSHITAGKRTADGSEFEKRTADGSEFESPKKKAKVE

SEQ ID NO: 2004 - protein, 2099 aa, synthetic construct
MPAAKRVKLDGGDKKYSIGLDIGTNSVGWAVITDEYKVPSKKFKVLGNTDRHSIKKNLIGALLFDSGETAEATRLKRTARRRYTRRKNRICYLQEIFSNEMAKVDDSFFHRLEESFLVEEDKKHERHPIFGNIVDEVAYHEKYPTIYHLRKKLVDSTDKADLRLIYLALAHMIKFRGHFLIEGDLNPDNSDVDKLFIQLVQTYNQLFEENPINASGVDAKAILSARLSKSRRLENLIAQLPGEKKNGLFGNLIALSLGLTPNFKSNFDLAEDAKLQLSKDTYDDDLDNLLAQIGDQYADLFLAAKNLSDAILLSDILRVNTEITKAPLSASMIKRYDEHHQDLTLLKALVRQQLPEKYKEIFFDQSKNGYAGYIDGGASQEEFYKFIKPILEKMDGTEELLVKLNREDLLRKQRTFDNGSIPHQIHLGELHAILRRQEDFYPFLKDNREKIEKILTFRIPYYVGPLARGNSRFAWMTRKSEETITPWNFEEVVDKGASAQSFIERMTNFDKNLPNEKVLPKHSLLYEYFTVYNELTKVKYVTEGMRKPAFLSGEQKKAIVDLLFKTNRKVTVKQLKEDYFKKIECFDSVEISGVEDRFNASLGTYHDLLKIIKDKDFLDNEENEDILEDIVLTLTLFEDREMIEERLKTYAHLFDDKVMKQLKRRRYTGWGRLSRKLINGIRDKQSGKTILDFLKSDGFANRNFMQLIHDDSLTFKEDIQKAQVSGQGDSLHEHIANLAGSPAIKKGILQTVKVVDELVKVMGRHKPENIVIEMARENQTTQKGQKNSRERMKRIEEGIKELGSQILKEHPVENTQLQNEKLYLYYLQNGRDMYVDQELDINRLSDYDVDHIVPQSFLKDDSIDNKVLTRSDKARGKSDNVPSEEVVKKMKNYWRQLLNAKLITQRKFDNLTKAERGGLSELDKAGFIKRQLVETRQITKHVAQILDSRMNTKYDENDKLIREVKVITLKSKLVSDFRKDFQFYKVREINNYHHAHDAYLNAVVGTALIKKYPKLESEFVYGDYKVYDVRKMIAKSEQEIGKATAKYFFYSNIMNFFKTEITLANGEIRKRPLIETNGETGEIVWDKGRDFATVRKVLSMPQVNIVKKTEVQTGGFSKESILPKRNSDKLIARKKDWDPKKYGGFDSPTVAYSVLVVAKVEKGKSKKLKSVKELLGITIMERSSFEKNPIDFLEAKGYKEVKKDLIIKLPKYSLFELENGRKRMLASAGELQKGNELALPSKYVNFLYLASHYEKLKGSPEDNEQKQLFVEQHKHYLDEIIEQISEFSKRVILADANLDKVLSAYNKHRDKPIREQAENIIHLFTLTNLGAPAAFKYFDTTIDRKRYTSTKEVLDATLIHQSITGLYETRIDLSQLGGDGGGGGEAAAKGGTVSLQDEHRLFDIPVTTSLPDVWLQDFPQAWAETGGLGRAKCQAPIIIDLKPTAVPVSIKQYPMSLEAHMGIRQHIIKFLELGVLRPCRSPWNTPLLPVKKPGTQDYRPVQDLREINKRTVDIHPTVPNPYNLLSTLKPDYSWYTVLDLKDAFFCLPLAPQSQELFAFEWKDPERGISGQLTWTRLPQGFKNSPTLFNEALHRDLTDFRTQHPEVTLLQYVDDLLLAAPTKKACTQGTRHLLQELGEKGYRASAKKAQICQTKVTYLGYILSEGKRWLTPGRIETVARIPPPRNPREVREFLGKAGFCRLFIPGFAELAAPLYALTKPSTPFTWQTEHQLAFEALKKALLSAPALGLPDTSKPFTLFLDERQGIAKGVLTQKLGPWKRPVAYLSKKLDPVAAGWPPCLRIMAATAMLVKDSAKLTLGQPLTVITPHTLEAIVRQPPDRWITNARLTHYQALLLDTDRVQFGPPVTLNPATLLPVPENQPSPHDCRQVLAETHGTREDLKDQELPDADHTWYTDGSSYLDSGTRRAGAAVVDGHNTIWAQSLPPGTSAQKAELIALTKALELSKGKKANIYTDSRYAFATAHTHGSIYERRGWLTSEGKEIKNKAEIIALLKALFLPQEVAIIHCPGHQKGQDPVAVGNRQADRVARQAAMAEVLTLATEPDNTSHITAGKRTADGSEFEKRTADGSEFESPKKKAKVE

SEQ ID NO: 2005 - protein, 2103 aa, synthetic construct
MPAAKRVKLDGGDKKYSIGLDIGTNSVGWAVITDEYKVPSKKFKVLGNTDRHSIKKNLIGALLFDSGETAEATRLKRTARRRYTRRKNRICYLQEIFSNEMAKVDDSFFHRLEESFLVEEDKKHERHPIFGNIVDEVAYHEKYPTIYHLRKKLVDSTDKADLRLIYLALAHMIKFRGHFLIEGDLNPDNSDVDKLFIQLVQTYNQLFEENPINASGVDAKAILSARLSKSRRLENLIAQLPGEKKNGLFGNLIALSLGLTPNFKSNFDLAEDAKLQLSKDTYDDDLDNLLAQIGDQYADLFLAAKNLSDAILLSDILRVNTEITKAPLSASMIKRYDEHHQDLTLLKALVRQQLPEKYKEIFFDQSKNGYAGYIDGGASQEEFYKFIKPILEKMDGTEELLVKLNREDLLRKQRTFDNGSIPHQIHLGELHAILRRQEDFYPFLKDNREKIEKILTFRIPYYVGPLARGNSRFAWMTRKSEETITPWNFEEVVDKGASAQSFIERMTNFDKNLPNEKVLPKHSLLYEYFTVYNELTKVKYVTEGMRKPAFLSGEQKKAIVDLLFKTNRKVTVKQLKEDYFKKIECFDSVEISGVEDRFNASLGTYHDLLKIIKDKDFLDNEENEDILEDIVLTLTLFEDREMIEERLKTYAHLFDDKVMKQLKRRRYTGWGRLSRKLINGIRDKQSGKTILDFLKSDGFANRNFMQLIHDDSLTFKEDIQKAQVSGQGDSLHEHIANLAGSPAIKKGILQTVKVVDELVKVMGRHKPENIVIEMARENQTTQKGQKNSRERMKRIEEGIKELGSQILKEHPVENTQLQNEKLYLYYLQNGRDMYVDQELDINRLSDYDVDHIVPQSFLKDDSIDNKVLTRSDKARGKSDNVPSEEVVKKMKNYWRQLLNAKLITQRKFDNLTKAERGGLSELDKAGFIKRQLVETRQITKHVAQILDSRMNTKYDENDKLIREVKVITLKSKLVSDFRKDFQFYKVREINNYHHAHDAYLNAVVGTALIKKYPKLESEFVYGDYKVYDVRKMIAKSEQEIGKATAKYFFYSNIMNFFKTEITLANGEIRKRPLIETNGETGEIVWDKGRDFATVRKVLSMPQVNIVKKTEVQTGGFSKESILPKRNSDKLIARKKDWDPKKYGGFDSPTVAYSVLVVAKVEKGKSKKLKSVKELLGITIMERSSFEKNPIDFLEAKGYKEVKKDLIIKLPKYSLFELENGRKRMLASAGELQKGNELALPSKYVNFLYLASHYEKLKGSPEDNEQKQLFVEQHKHYLDEIIEQISEFSKRVILADANLDKVLSAYNKHRDKPIREQAENIIHLFTLTNLGAPAAFKYFDTTIDRKRYTSTKEVLDATLIHQSITGLYETRIDLSQLGGDGGGSAGSAAGSGEFGGTVSLQDEHRLFDIPVTTSLPDVWLQDFPQAWAETGGLGRAKCQAPIIIDLKPTAVPVSIKQYPMSLEAHMGIRQHIIKFLELGVLRPCRSPWNTPLLPVKKPGTQDYRPVQDLREINKRTVDIHPTVPNPYNLLSTLKPDYSWYTVLDLKDAFFCLPLAPQSQELFAFEWKDPERGISGQLTWTRLPQGFKNSPTLFNEALHRDLTDFRTQHPEVTLLQYVDDLLLAAPTKKACTQGTRHLLQELGEKGYRASAKKAQICQTKVTYLGYILSEGKRWLTPGRIETVARIPPPRNPREVREFLGKAGFCRLFIPGFAELAAPLYALTKPSTPFTWQTEHQLAFEALKKALLSAPALGLPDTSKPFTLFLDERQGIAKGVLTQKLGPWKRPVAYLSKKLDPVAAGWPPCLRIMAATAMLVKDSAKLTLGQPLTVITPHTLEAIVRQPPDRWITNARLTHYQALLLDTDRVQFGPPVTLNPATLLPVPENQPSPHDCRQVLAETHGTREDLKDQELPDADHTWYTDGSSYLDSGTRRAGAAVVDGHNTIWAQSLPPGTSAQKAELIALTKALELSKGKKANIYTDSRYAFATAHTHGSIYERRGWLTSEGKEIKNKAEIIALLKALFLPQEVAIIHCPGHQKGQDPVAVGNRQADRVARQAAMAEVLTLATEPDNTSHITAGKRTADGSEFEKRTADGSEFESPKKKAKVE

SEQ ID NO: 2006 - protein, 2096 aa, synthetic construct
MPAAKRVKLDGGDKKYSIGLDIGTNSVGWAVITDEYKVPSKKFKVLGNTDRHSIKKNLIGALLFDSGETAEATRLKRTARRRYTRRKNRICYLQEIFSNEMAKVDDSFFHRLEESFLVEEDKKHERHPIFGNIVDEVAYHEKYPTIYHLRKKLVDSTDKADLRLIYLALAHMIKFRGHFLIEGDLNPDNSDVDKLFIQLVQTYNQLFEENPINASGVDAKAILSARLSKSRRLENLIAQLPGEKKNGLFGNLIALSLGLTPNFKSNFDLAEDAKLQLSKDTYDDDLDNLLAQIGDQYADLFLAAKNLSDAILLSDILRVNTEITKAPLSASMIKRYDEHHQDLTLLKALVRQQLPEKYKEIFFDQSKNGYAGYIDGGASQEEFYKFIKPILEKMDGTEELLVKLNREDLLRKQRTFDNGSIPHQIHLGELHAILRRQEDFYPFLKDNREKIEKILTFRIPYYVGPLARGNSRFAWMTRKSEETITPWNFEEVVDKGASAQSFIERMTNFDKNLPNEKVLPKHSLLYEYFTVYNELTKVKYVTEGMRKPAFLSGEQKKAIVDLLFKTNRKVTVKQLKEDYFKKIECFDSVEISGVEDRFNASLGTYHDLLKIIKDKDFLDNEENEDILEDIVLTLTLFEDREMIEERLKTYAHLFDDKVMKQLKRRRYTGWGRLSRKLINGIRDKQSGKTILDFLKSDGFANRNFMQLIHDDSLTFKEDIQKAQVSGQGDSLHEHIANLAGSPAIKKGILQTVKVVDELVKVMGRHKPENIVIEMARENQTTQKGQKNSRERMKRIEEGIKELGSQILKEHPVENTQLQNEKLYLYYLQNGRDMYVDQELDINRLSDYDVDHIVPQSFLKDDSIDNKVLTRSDKARGKSDNVPSEEVVKKMKNYWRQLLNAKLITQRKFDNLTKAERGGLSELDKAGFIKRQLVETRQITKHVAQILDSRMNTKYDENDKLIREVKVITLKSKLVSDFRKDFQFYKVREINNYHHAHDAYLNAVVGTALIKKYPKLESEFVYGDYKVYDVRKMIAKSEQEIGKATAKYFFYSNIMNFFKTEITLANGEIRKRPLIETNGETGEIVWDKGRDFATVRKVLSMPQVNIVKKTEVQTGGFSKESILPKRNSDKLIARKKDWDPKKYGGFDSPTVAYSVLVVAKVEKGKSKKLKSVKELLGITIMERSSFEKNPIDFLEAKGYKEVKKDLIIKLPKYSLFELENGRKRMLASAGELQKGNELALPSKYVNFLYLASHYEKLKGSPEDNEQKQLFVEQHKHYLDEIIEQISEFSKRVILADANLDKVLSAYNKHRDKPIREQAENIIHLFTLTNLGAPAAFKYFDTTIDRKRYTSTKEVLDATLIHQSITGLYETRIDLSQLGGDGGGGGGSGGTVSLQDEHRLFDIPVTTSLPDVWLQDFPQAWAETGGLGRAKCQAPIIIDLKPTAVPVSIKQYPMSLEAHMGIRQHIIKFLELGVLRPCRSPWNTPLLPVKKPGTQDYRPVQDLREINKRTVDIHPTVPNPYNLLSTLKPDYSWYTVLDLKDAFFCLPLAPQSQELFAFEWKDPERGISGQLTWTRLPQGFKNSPTLFNEALHRDLTDFRTQHPEVTLLQYVDDLLLAAPTKKACTQGTRHLLQELGEKGYRASAKKAQICQTKVTYLGYILSEGKRWLTPGRIETVARIPPPRNPREVREFLGKAGFCRLFIPGFAELAAPLYALTKPSTPFTWQTEHQLAFEALKKALLSAPALGLPDTSKPFTLFLDERQGIAKGVLTQKLGPWKRPVAYLSKKLDPVAAGWPPCLRIMAATAMLVKDSAKLTLGQPLTVITPHTLEAIVRQPPDRWITNARLTHYQALLLDTDRVQFGPPVTLNPATLLPVPENQPSPHDCRQVLAETHGTREDLKDQELPDADHTWYTDGSSYLDSGTRRAGAAVVDGHNTIWAQSLPPGTSAQKAELIALTKALELSKGKKANIYTDSRYAFATAHTHGSIYERRGWLTSEGKEIKNKAEIIALLKALFLPQEVAIIHCPGHQKGQDPVAVGNRQADRVARQAAMAEVLTLATEPDNTSHITAGKRTADGSEFEKRTADGSEFESPKKKAKVE

SEQ ID NO: 2007 - protein, 2100 aa, synthetic construct
MPAAKRVKLDGGDKKYSIGLDIGTNSVGWAVITDEYKVPSKKFKVLGNTDRHSIKKNLIGALLFDSGETAEATRLKRTARRRYTRRKNRICYLQEIFSNEMAKVDDSFFHRLEESFLVEEDKKHERHPIFGNIVDEVAYHEKYPTIYHLRKKLVDSTDKADLRLIYLALAHMIKFRGHFLIEGDLNPDNSDVDKLFIQLVQTYNQLFEENPINASGVDAKAILSARLSKSRRLENLIAQLPGEKKNGLFGNLIALSLGLTPNFKSNFDLAEDAKLQLSKDTYDDDLDNLLAQIGDQYADLFLAAKNLSDAILLSDILRVNTEITKAPLSASMIKRYDEHHQDLTLLKALVRQQLPEKYKEIFFDQSKNGYAGYIDGGASQEEFYKFIKPILEKMDGTEELLVKLNREDLLRKQRTFDNGSIPHQIHLGELHAILRRQEDFYPFLKDNREKIEKILTFRIPYYVGPLARGNSRFAWMTRKSEETITPWNFEEVVDKGASAQSFIERMTNFDKNLPNEKVLPKHSLLYEYFTVYNELTKVKYVTEGMRKPAFLSGEQKKAIVDLLFKTNRKVTVKQLKEDYFKKIECFDSVEISGVEDRFNASLGTYHDLLKIIKDKDFLDNEENEDILEDIVLTLTLFEDREMIEERLKTYAHLFDDKVMKQLKRRRYTGWGRLSRKLINGIRDKQSGKTILDFLKSDGFANRNFMQLIHDDSLTFKEDIQKAQVSGQGDSLHEHIANLAGSPAIKKGILQTVKVVDELVKVMGRHKPENIVIEMARENQTTQKGQKNSRERMKRIEEGIKELGSQILKEHPVENTQLQNEKLYLYYLQNGRDMYVDQELDINRLSDYDVDHIVPQSFLKDDSIDNKVLTRSDKARGKSDNVPSEEVVKKMKNYWRQLLNAKLITQRKFDNLTKAERGGLSELDKAGFIKRQLVETRQITKHVAQILDSRMNTKYDENDKLIREVKVITLKSKLVSDFRKDFQFYKVREINNYHHAHDAYLNAVVGTALIKKYPKLESEFVYGDYKVYDVRKMIAKSEQEIGKATAKYFFYSNIMNFFKTEITLANGEIRKRPLIETNGETGEIVWDKGRDFATVRKVLSMPQVNIVKKTEVQTGGFSKESILPKRNSDKLIARKKDWDPKKYGGFDSPTVAYSVLVVAKVEKGKSKKLKSVKELLGITIMERSSFEKNPIDFLEAKGYKEVKKDLIIKLPKYSLFELENGRKRMLASAGELQKGNELALPSKYVNFLYLASHYEKLKGSPEDNEQKQLFVEQHKHYLDEIIEQISEFSKRVILADANLDKVLSAYNKHRDKPIREQAENIIHLFTLTNLGAPAAFKYFDTTIDRKRYTSTKEVLDATLIHQSITGLYETRIDLSQLGGDGGGSSGGGPAPGGTVSLQDEHRLFDIPVTTSLPDVWLQDFPQAWAETGGLGRAKCQAPIIIDLKPTAVPVSIKQYPMSLEAHMGIRQHIIKFLELGVLRPCRSPWNTPLLPVKKPGTQDYRPVQDLREINKRTVDIHPTVPNPYNLLSTLKPDYSWYTVLDLKDAFFCLPLAPQSQELFAFEWKDPERGISGQLTWTRLPQGFKNSPTLFNEALHRDLTDFRTQHPEVTLLQYVDDLLLAAPTKKACTQGTRHLLQELGEKGYRASAKKAQICQTKVTYLGYILSEGKRWLTPGRIETVARIPPPRNPREVREFLGKAGFCRLFIPGFAELAAPLYALTKPSTPFTWQTEHQLAFEALKKALLSAPALGLPDTSKPFTLFLDERQGIAKGVLTQKLGPWKRPVAYLSKKLDPVAAGWPPCLRIMAATAMLVKDSAKLTLGQPLTVITPHTLEAIVRQPPDRWITNARLTHYQALLLDTDRVQFGPPVTLNPATLLPVPENQPSPHDCRQVLAETHGTREDLKDQELPDADHTWYTDGSSYLDSGTRRAGAAVVDGHNTIWAQSLPPGTSAQKAELIALTKALELSKGKKANIYTDSRYAFATAHTHGSIYERRGWLTSEGKEIKNKAEIIALLKALFLPQEVAIIHCPGHQKGQDPVAVGNRQADRVARQAAMAEVLTLATEPDNTSHITAGKRTADGSEFEKRTADGSEFESPKKKAKVE

SEQ ID NO: 2008 - protein, 2096 aa, synthetic construct
MPAAKRVKLDGGDKKYSIGLDIGTNSVGWAVITDEYKVPSKKFKVLGNTDRHSIKKNLIGALLFDSGETAEATRLKRTARRRYTRRKNRICYLQEIFSNEMAKVDDSFFHRLEESFLVEEDKKHERHPIFGNIVDEVAYHEKYPTIYHLRKKLVDSTDKADLRLIYLALAHMIKFRGHFLIEGDLNPDNSDVDKLFIQLVQTYNQLFEENPINASGVDAKAILSARLSKSRRLENLIAQLPGEKKNGLFGNLIALSLGLTPNFKSNFDLAEDAKLQLSKDTYDDDLDNLLAQIGDQYADLFLAAKNLSDAILLSDILRVNTEITKAPLSASMIKRYDEHHQDLTLLKALVRQQLPEKYKEIFFDQSKNGYAGYIDGGASQEEFYKFIKPILEKMDGTEELLVKLNREDLLRKQRTFDNGSIPHQIHLGELHAILRRQEDFYPFLKDNREKIEKILTFRIPYYVGPLARGNSRFAWMTRKSEETITPWNFEEVVDKGASAQSFIERMTNFDKNLPNEKVLPKHSLLYEYFTVYNELTKVKYVTEGMRKPAFLSGEQKKAIVDLLFKTNRKVTVKQLKEDYFKKIECFDSVEISGVEDRFNASLGTYHDLLKIIKDKDFLDNEENEDILEDIVLTLTLFEDREMIEERLKTYAHLFDDKVMKQLKRRRYTGWGRLSRKLINGIRDKQSGKTILDFLKSDGFANRNFMQLIHDDSLTFKEDIQKAQVSGQGDSLHEHIANLAGSPAIKKGILQTVKVVDELVKVMGRHKPENIVIEMARENQTTQKGQKNSRERMKRIEEGIKELGSQILKEHPVENTQLQNEKLYLYYLQNGRDMYVDQELDINRLSDYDVDHIVPQSFLKDDSIDNKVLTRSDKARGKSDNVPSEEVVKKMKNYWRQLLNAKLITQRKFDNLTKAERGGLSELDKAGFIKRQLVETRQITKHVAQILDSRMNTKYDENDKLIREVKVITLKSKLVSDFRKDFQFYKVREINNYHHAHDAYLNAVVGTALIKKYPKLESEFVYGDYKVYDVRKMIAKSEQEIGKATAKYFFYSNIMNFFKTEITLANGEIRKRPLIETNGETGEIVWDKGRDFATVRKVLSMPQVNIVKKTEVQTGGFSKESILPKRNSDKLIARKKDWDPKKYGGFDSPTVAYSVLVVAKVEKGKSKKLKSVKELLGITIMERSSFEKNPIDFLEAKGYKEVKKDLIIKLPKYSLFELENGRKRMLASAGELQKGNELALPSKYVNFLYLASHYEKLKGSPEDNEQKQLFVEQHKHYLDEIIEQISEFSKRVILADANLDKVLSAYNKHRDKPIREQAENIIHLFTLTNLGAPAAFKYFDTTIDRKRYTSTKEVLDATLIHQSITGLYETRIDLSQLGGDGGEAAAKGGTVSLQDEHRLFDIPVTTSLPDVWLQDFPQAWAETGGLGRAKCQAPIIIDLKPTAVPVSIKQYPMSLEAHMGIRQHIIKFLELGVLRPCRSPWNTPLLPVKKPGTQDYRPVQDLREINKRTVDIHPTVPNPYNLLSTLKPDYSWYTVLDLKDAFFCLPLAPQSQELFAFEWKDPERGISGQLTWTRLPQGFKNSPTLFNEALHRDLTDFRTQHPEVTLLQYVDDLLLAAPTKKACTQGTRHLLQELGEKGYRASAKKAQICQTKVTYLGYILSEGKRWLTPGRIETVARIPPPRNPREVREFLGKAGFCRLFIPGFAELAAPLYALTKPSTPFTWQTEHQLAFEALKKALLSAPALGLPDTSKPFTLFLDERQGIAKGVLTQKLGPWKRPVAYLSKKLDPVAAGWPPCLRIMAATAMLVKDSAKLTLGQPLTVITPHTLEAIVRQPPDRWITNARLTHYQALLLDTDRVQFGPPVTLNPATLLPVPENQPSPHDCRQVLAETHGTREDLKDQELPDADHTWYTDGSSYLDSGTRRAGAAVVDGHNTIWAQSLPPGTSAQKAELIALTKALELSKGKKANIYTDSRYAFATAHTHGSIYERRGWLTSEGKEIKNKAEIIALLKALFLPQEVAIIHCPGHQKGQDPVAVGNRQADRVARQAAMAEVLTLATEPDNTSHITAGKRTADGSEFEKRTADGSEFESPKKKAKVE

SEQ ID NO: 2009 - protein, 2102 aa, synthetic construct
MPAAKRVKLDGGDKKYSIGLDIGTNSVGWAVITDEYKVPSKKFKVLGNTDRHSIKKNLIGALLFDSGETAEATRLKRTARRRYTRRKNRICYLQEIFSNEMAKVDDSFFHRLEESFLVEEDKKHERHPIFGNIVDEVAYHEKYPTIYHLRKKLVDSTDKADLRLIYLALAHMIKFRGHFLIEGDLNPDNSDVDKLFIQLVQTYNQLFEENPINASGVDAKAILSARLSKSRRLENLIAQLPGEKKNGLFGNLIALSLGLTPNFKSNFDLAEDAKLQLSKDTYDDDLDNLLAQIGDQYADLFLAAKNLSDAILLSDILRVNTEITKAPLSASMIKRYDEHHQDLTLLKALVRQQLPEKYKEIFFDQSKNGYAGYIDGGASQEEFYKFIKPILEKMDGTEELLVKLNREDLLRKQRTFDNGSIPHQIHLGELHAILRRQEDFYPFLKDNREKIEKILTFRIPYYVGPLARGNSRFAWMTRKSEETITPWNFEEVVDKGASAQSFIERMTNFDKNLPNEKVLPKHSLLYEYFTVYNELTKVKYVTEGMRKPAFLSGEQKKAIVDLLFKTNRKVTVKQLKEDYFKKIECFDSVEISGVEDRFNASLGTYHDLLKIIKDKDFLDNEENEDILEDIVLTLTLFEDREMIEERLKTYAHLFDDKVMKQLKRRRYTGWGRLSRKLINGIRDKQSGKTILDFLKSDGFANRNFMQLIHDDSLTFKEDIQKAQVSGQGDSLHEHIANLAGSPAIKKGILQTVKVVDELVKVMGRHKPENIVIEMARENQTTQKGQKNSRERMKRIEEGIKELGSQILKEHPVENTQLQNEKLYLYYLQNGRDMYVDQELDINRLSDYDVDHIVPQSFLKDDSIDNKVLTRSDKARGKSDNVPSEEVVKKMKNYWRQLLNAKLITQRKFDNLTKAERGGLSELDKAGFIKRQLVETRQITKHVAQILDSRMNTKYDENDKLIREVKVITLKSKLVSDFRKDFQFYKVREINNYHHAHDAYLNAVVGTALIKKYPKLESEFVYGDYKVYDVRKMIAKSEQEIGKATAKYFFYSNIMNFFKTEITLANGEIRKRPLIETNGETGEIVWDKGRDFATVRKVLSMPQVNIVKKTEVQTGGFSKESILPKRNSDKLIARKKDWDPKKYGGFDSPTVAYSVLVVAKVEKGKSKKLKSVKELLGITIMERSSFEKNPIDFLEAKGYKEVKKDLIIKLPKYSLFELENGRKRMLASAGELQKGNELALPSKYVNFLYLASHYEKLKGSPEDNEQKQLFVEQHKHYLDEIIEQISEFSKRVILADANLDKVLSAYNKHRDKPIREQAENIIHLFTLTNLGAPAAFKYFDTTIDRKRYTSTKEVLDATLIHQSITGLYETRIDLSQLGGDGGEAAAKGGGGSSGGTVSLQDEHRLFDIPVTTSLPDVWLQDFPQAWAETGGLGRAKCQAPIIIDLKPTAVPVSIKQYPMSLEAHMGIRQHIIKFLELGVLRPCRSPWNTPLLPVKKPGTQDYRPVQDLREINKRTVDIHPTVPNPYNLLSTLKPDYSWYTVLDLKDAFFCLPLAPQSQELFAFEWKDPERGISGQLTWTRLPQGFKNSPTLFNEALHRDLTDFRTQHPEVTLLQYVDDLLLAAPTKKACTQGTRHLLQELGEKGYRASAKKAQICQTKVTYLGYILSEGKRWLTPGRIETVARIPPPRNPREVREFLGKAGFCRLFIPGFAELAAPLYALTKPSTPFTWQTEHQLAFEALKKALLSAPALGLPDTSKPFTLFLDERQGIAKGVLTQKLGPWKRPVAYLSKKLDPVAAGWPPCLRIMAATAMLVKDSAKLTLGQPLTVITPHTLEAIVRQPPDRWITNARLTHYQALLLDTDRVQFGPPVTLNPATLLPVPENQPSPHDCRQVLAETHGTREDLKDQELPDADHTWYTDGSSYLDSGTRRAGAAVVDGHNTIWAQSLPPGTSAQKAELIALTKALELSKGKKANIYTDSRYAFATAHTHGSIYERRGWLTSEGKEIKNKAEIIALLKALFLPQEVAIIHCPGHQKGQDPVAVGNRQADRVARQAAMAEVLTLATEPDNTSHITAGKRTADGSEFEKRTADGSEFESPKKKAKVE

SEQ ID NO: 2010 - protein, 2100 aa, synthetic construct
MPAAKRVKLDGGDKKYSIGLDIGTNSVGWAVITDEYKVPSKKFKVLGNTDRHSIKKNLIGALLFDSGETAEATRLKRTARRRYTRRKNRICYLQEIFSNEMAKVDDSFFHRLEESFLVEEDKKHERHPIFGNIVDEVAYHEKYPTIYHLRKKLVDSTDKADLRLIYLALAHMIKFRGHFLIEGDLNPDNSDVDKLFIQLVQTYNQLFEENPINASGVDAKAILSARLSKSRRLENLIAQLPGEKKNGLFGNLIALSLGLTPNFKSNFDLAEDAKLQLSKDTYDDDLDNLLAQIGDQYADLFLAAKNLSDAILLSDILRVNTEITKAPLSASMIKRYDEHHQDLTLLKALVRQQLPEKYKEIFFDQSKNGYAGYIDGGASQEEFYKFIKPILEKMDGTEELLVKLNREDLLRKQRTFDNGSIPHQIHLGELHAILRRQEDFYPFLKDNREKIEKILTFRIPYYVGPLARGNSRFAWMTRKSEETITPWNFEEVVDKGASAQSFIERMTNFDKNLPNEKVLPKHSLLYEYFTVYNELTKVKYVTEGMRKPAFLSGEQKKAIVDLLFKTNRKVTVKQLKEDYFKKIECFDSVEISGVEDRFNASLGTYHDLLKIIKDKDFLDNEENEDILEDIVLTLTLFEDREMIEERLKTYAHLFDDKVMKQLKRRRYTGWGRLSRKLINGIRDKQSGKTILDFLKSDGFANRNFMQLIHDDSLTFKEDIQKAQVSGQGDSLHEHIANLAGSPAIKKGILQTVKVVDELVKVMGRHKPENIVIEMARENQTTQKGQKNSRERMKRIEEGIKELGSQILKEHPVENTQLQNEKLYLYYLQNGRDMYVDQELDINRLSDYDVDHIVPQSFLKDDSIDNKVLTRSDKARGKSDNVPSEEVVKKMKNYWRQLLNAKLITQRKFDNLTKAERGGLSELDKAGFIKRQLVETRQITKHVAQILDSRMNTKYDENDKLIREVKVITLKSKLVSDFRKDFQFYKVREINNYHHAHDAYLNAVVGTALIKKYPKLESEFVYGDYKVYDVRKMIAKSEQEIGKATAKYFFYSNIMNFFKTEITLANGEIRKRPLIETNGETGEIVWDKGRDFATVRKVLSMPQVNIVKKTEVQTGGFSKESILPKRNSDKLIARKKDWDPKKYGGFDSPTVAYSVLVVAKVEKGKSKKLKSVKELLGITIMERSSFEKNPIDFLEAKGYKEVKKDLIIKLPKYSLFELENGRKRMLASAGELQKGNELALPSKYVNFLYLASHYEKLKGSPEDNEQKQLFVEQHKHYLDEIIEQISEFSKRVILADANLDKVLSAYNKHRDKPIREQAENIIHLFTLTNLGAPAAFKYFDTTIDRKRYTSTKEVLDATLIHQSITGLYETRIDLSQLGGDGGPAPGGSGGGGGTVSLQDEHRLFDIPVTTSLPDVWLQDFPQAWAETGGLGRAKCQAPIIIDLKPTAVPVSIKQYPMSLEAHMGIRQHIIKFLELGVLRPCRSPWNTPLLPVKKPGTQDYRPVQDLREINKRTVDIHPTVPNPYNLLSTLKPDYSWYTVLDLKDAFFCLPLAPQSQELFAFEWKDPERGISGQLTWTRLPQGFKNSPTLFNEALHRDLTDFRTQHPEVTLLQYVDDLLLAAPTKKACTQGTRHLLQELGEKGYRASAKKAQICQTKVTYLGYILSEGKRWLTPGRIETVARIPPPRNPREVREFLGKAGFCRLFIPGFAELAAPLYALTKPSTPFTWQTEHQLAFEALKKALLSAPALGLPDTSKPFTLFLDERQGIAKGVLTQKLGPWKRPVAYLSKKLDPVAAGWPPCLRIMAATAMLVKDSAKLTLGQPLTVITPHTLEAIVRQPPDRWITNARLTHYQALLLDTDRVQFGPPVTLNPATLLPVPENQPSPHDCRQVLAETHGTREDLKDQELPDADHTWYTDGSSYLDSGTRRAGAAVVDGHNTIWAQSLPPGTSAQKAELIALTKALELSKGKKANIYTDSRYAFATAHTHGSIYERRGWLTSEGKEIKNKAEIIALLKALFLPQEVAIIHCPGHQKGQDPVAVGNRQADRVARQAAMAEVLTLATEPDNTSHITAGKRTADGSEFEKRTADGSEFESPKKKAKVE

SEQ ID NO: 2011 - protein, 2100 aa, synthetic construct
MPAAKRVKLDGGDKKYSIGLDIGTNSVGWAVITDEYKVPSKKFKVLGNTDRHSIKKNLIGALLFDSGETAEATRLKRTARRRYTRRKNRICYLQEIFSNEMAKVDDSFFHRLEESFLVEEDKKHERHPIFGNIVDEVAYHEKYPTIYHLRKKLVDSTDKADLRLIYLALAHMIKFRGHFLIEGDLNPDNSDVDKLFIQLVQTYNQLFEENPINASGVDAKAILSARLSKSRRLENLIAQLPGEKKNGLFGNLIALSLGLTPNFKSNFDLAEDAKLQLSKDTYDDDLDNLLAQIGDQYADLFLAAKNLSDAILLSDILRVNTEITKAPLSASMIKRYDEHHQDLTLLKALVRQQLPEKYKEIFFDQSKNGYAGYIDGGASQEEFYKFIKPILEKMDGTEELLVKLNREDLLRKQRTFDNGSIPHQIHLGELHAILRRQEDFYPFLKDNREKIEKILTFRIPYYVGPLARGNSRFAWMTRKSEETITPWNFEEVVDKGASAQSFIERMTNFDKNLPNEKVLPKHSLLYEYFTVYNELTKVKYVTEGMRKPAFLSGEQKKAIVDLLFKTNRKVTVKQLKEDYFKKIECFDSVEISGVEDRFNASLGTYHDLLKIIKDKDFLDNEENEDILEDIVLTLTLFEDREMIEERLKTYAHLFDDKVMKQLKRRRYTGWGRLSRKLINGIRDKQSGKTILDFLKSDGFANRNFMQLIHDDSLTFKEDIQKAQVSGQGDSLHEHIANLAGSPAIKKGILQTVKVVDELVKVMGRHKPENIVIEMARENQTTQKGQKNSRERMKRIEEGIKELGSQILKEHPVENTQLQNEKLYLYYLQNGRDMYVDQELDINRLSDYDVDHIVPQSFLKDDSIDNKVLTRSDKARGKSDNVPSEEVVKKMKNYWRQLLNAKLITQRKFDNLTKAERGGLSELDKAGFIKRQLVETRQITKHVAQILDSRMNTKYDENDKLIREVKVITLKSKLVSDFRKDFQFYKVREINNYHHAHDAYLNAVVGTALIKKYPKLESEFVYGDYKVYDVRKMIAKSEQEIGKATAKYFFYSNIMNFFKTEITLANGEIRKRPLIETNGETGEIVWDKGRDFATVRKVLSMPQVNIVKKTEVQTGGFSKESILPKRNSDKLIARKKDWDPKKYGGFDSPTVAYSVLVVAKVEKGKSKKLKSVKELLGITIMERSSFEKNPIDFLEAKGYKEVKKDLIIKLPKYSLFELENGRKRMLASAGELQKGNELALPSKYVNFLYLASHYEKLKGSPEDNEQKQLFVEQHKHYLDEIIEQISEFSKRVILADANLDKVLSAYNKHRDKPIREQAENIIHLFTLTNLGAPAAFKYFDTTIDRKRYTSTKEVLDATLIHQSITGLYETRIDLSQLGGDGGGGGPAPGGSGGTVSLQDEHRLFDIPVTTSLPDVWLQDFPQAWAETGGLGRAKCQAPIIIDLKPTAVPVSIKQYPMSLEAHMGIRQHIIKFLELGVLRPCRSPWNTPLLPVKKPGTQDYRPVQDLREINKRTVDIHPTVPNPYNLLSTLKPDYSWYTVLDLKDAFFCLPLAPQSQELFAFEWKDPERGISGQLTWTRLPQGFKNSPTLFNEALHRDLTDFRTQHPEVTLLQYVDDLLLAAPTKKACTQGTRHLLQELGEKGYRASAKKAQICQTKVTYLGYILSEGKRWLTPGRIETVARIPPPRNPREVREFLGKAGFCRLFIPGFAELAAPLYALTKPSTPFTWQTEHQLAFEALKKALLSAPALGLPDTSKPFTLFLDERQGIAKGVLTQKLGPWKRPVAYLSKKLDPVAAGWPPCLRIMAATAMLVKDSAKLTLGQPLTVITPHTLEAIVRQPPDRWITNARLTHYQALLLDTDRVQFGPPVTLNPATLLPVPENQPSPHDCRQVLAETHGTREDLKDQELPDADHTWYTDGSSYLDSGTRRAGAAVVDGHNTIWAQSLPPGTSAQKAELIALTKALELSKGKKANIYTDSRYAFATAHTHGSIYERRGWLTSEGKEIKNKAEIIALLKALFLPQEVAIIHCPGHQKGQDPVAVGNRQADRVARQAAMAEVLTLATEPDNTSHITAGKRTADGSEFEKRTADGSEFESPKKKAKVE

SEQ ID NO: 2012 - protein, 2099 aa, synthetic construct
MPAAKRVKLDGGDKKYSIGLDIGTNSVGWAVITDEYKVPSKKFKVLGNTDRHSIKKNLIGALLFDSGETAEATRLKRTARRRYTRRKNRICYLQEIFSNEMAKVDDSFFHRLEESFLVEEDKKHERHPIFGNIVDEVAYHEKYPTIYHLRKKLVDSTDKADLRLIYLALAHMIKFRGHFLIEGDLNPDNSDVDKLFIQLVQTYNQLFEENPINASGVDAKAILSARLSKSRRLENLIAQLPGEKKNGLFGNLIALSLGLTPNFKSNFDLAEDAKLQLSKDTYDDDLDNLLAQIGDQYADLFLAAKNLSDAILLSDILRVNTEITKAPLSASMIKRYDEHHQDLTLLKALVRQQLPEKYKEIFFDQSKNGYAGYIDGGASQEEFYKFIKPILEKMDGTEELLVKLNREDLLRKQRTFDNGSIPHQIHLGELHAILRRQEDFYPFLKDNREKIEKILTFRIPYYVGPLARGNSRFAWMTRKSEETITPWNFEEVVDKGASAQSFIERMTNFDKNLPNEKVLPKHSLLYEYFTVYNELTKVKYVTEGMRKPAFLSGEQKKAIVDLLFKTNRKVTVKQLKEDYFKKIECFDSVEISGVEDRFNASLGTYHDLLKIIKDKDFLDNEENEDILEDIVLTLTLFEDREMIEERLKTYAHLFDDKVMKQLKRRRYTGWGRLSRKLINGIRDKQSGKTILDFLKSDGFANRNFMQLIHDDSLTFKEDIQKAQVSGQGDSLHEHIANLAGSPAIKKGILQTVKVVDELVKVMGRHKPENIVIEMARENQTTQKGQKNSRERMKRIEEGIKELGSQILKEHPVENTQLQNEKLYLYYLQNGRDMYVDQELDINRLSDYDVDHIVPQSFLKDDSIDNKVLTRSDKARGKSDNVPSEEVVKKMKNYWRQLLNAKLITQRKFDNLTKAERGGLSELDKAGFIKRQLVETRQITKHVAQILDSRMNTKYDENDKLIREVKVITLKSKLVSDFRKDFQFYKVREINNYHHAHDAYLNAVVGTALIKKYPKLESEFVYGDYKVYDVRKMIAKSEQEIGKATAKYFFYSNIMNFFKTEITLANGEIRKRPLIETNGETGEIVWDKGRDFATVRKVLSMPQVNIVKKTEVQTGGFSKESILPKRNSDKLIARKKDWDPKKYGGFDSPTVAYSVLVVAKVEKGKSKKLKSVKELLGITIMERSSFEKNPIDFLEAKGYKEVKKDLIIKLPKYSLFELENGRKRMLASAGELQKGNELALPSKYVNFLYLASHYEKLKGSPEDNEQKQLFVEQHKHYLDEIIEQISEFSKRVILADANLDKVLSAYNKHRDKPIREQAENIIHLFTLTNLGAPAAFKYFDTTIDRKRYTSTKEVLDATLIHQSITGLYETRIDLSQLGGDGGEAAAKGGSGGTVSLQDEHRLFDIPVTTSLPDVWLQDFPQAWAETGGLGRAKCQAPIIIDLKPTAVPVSIKQYPMSLEAHMGIRQHIIKFLELGVLRPCRSPWNTPLLPVKKPGTQDYRPVQDLREINKRTVDIHPTVPNPYNLLSTLKPDYSWYTVLDLKDAFFCLPLAPQSQELFAFEWKDPERGISGQLTWTRLPQGFKNSPTLFNEALHRDLTDFRTQHPEVTLLQYVDDLLLAAPTKKACTQGTRHLLQELGEKGYRASAKKAQICQTKVTYLGYILSEGKRWLTPGRIETVARIPPPRNPREVREFLGKAGFCRLFIPGFAELAAPLYALTKPSTPFTWQTEHQLAFEALKKALLSAPALGLPDTSKPFTLFLDERQGIAKGVLTQKLGPWKRPVAYLSKKLDPVAAGWPPCLRIMAATAMLVKDSAKLTLGQPLTVITPHTLEAIVRQPPDRWITNARLTHYQALLLDTDRVQFGPPVTLNPATLLPVPENQPSPHDCRQVLAETHGTREDLKDQELPDADHTWYTDGSSYLDSGTRRAGAAVVDGHNTIWAQSLPPGTSAQKAELIALTKALELSKGKKANIYTDSRYAFATAHTHGSIYERRGWLTSEGKEIKNKAEIIALLKALFLPQEVAIIHCPGHQKGQDPVAVGNRQADRVARQAAMAEVLTLATEPDNTSHITAGKRTADGSEFEKRTADGSEFESPKKKAKVE

SEQ ID NO: 2013 - protein, 2100 aa, synthetic construct
MPAAKRVKLDGGDKKYSIGLDIGTNSVGWAVITDEYKVPSKKFKVLGNTDRHSIKKNLIGALLFDSGETAEATRLKRTARRRYTRRKNRICYLQEIFSNEMAKVDDSFFHRLEESFLVEEDKKHERHPIFGNIVDEVAYHEKYPTIYHLRKKLVDSTDKADLRLIYLALAHMIKFRGHFLIEGDLNPDNSDVDKLFIQLVQTYNQLFEENPINASGVDAKAILSARLSKSRRLENLIAQLPGEKKNGLFGNLIALSLGLTPNFKSNFDLAEDAKLQLSKDTYDDDLDNLLAQIGDQYADLFLAAKNLSDAILLSDILRVNTEITKAPLSASMIKRYDEHHQDLTLLKALVRQQLPEKYKEIFFDQSKNGYAGYIDGGASQEEFYKFIKPILEKMDGTEELLVKLNREDLLRKQRTFDNGSIPHQIHLGELHAILRRQEDFYPFLKDNREKIEKILTFRIPYYVGPLARGNSRFAWMTRKSEETITPWNFEEVVDKGASAQSFIERMTNFDKNLPNEKVLPKHSLLYEYFTVYNELTKVKYVTEGMRKPAFLSGEQKKAIVDLLFKTNRKVTVKQLKEDYFKKIECFDSVEISGVEDRFNASLGTYHDLLKIIKDKDFLDNEENEDILEDIVLTLTLFEDREMIEERLKTYAHLFDDKVMKQLKRRRYTGWGRLSRKLINGIRDKQSGKTILDFLKSDGFANRNFMQLIHDDSLTFKEDIQKAQVSGQGDSLHEHIANLAGSPAIKKGILQTVKVVDELVKVMGRHKPENIVIEMARENQTTQKGQKNSRERMKRIEEGIKELGSQILKEHPVENTQLQNEKLYLYYLQNGRDMYVDQELDINRLSDYDVDHIVPQSFLKDDSIDNKVLTRSDKARGKSDNVPSEEVVKKMKNYWRQLLNAKLITQRKFDNLTKAERGGLSELDKAGFIKRQLVETRQITKHVAQILDSRMNTKYDENDKLIREVKVITLKSKLVSDFRKDFQFYKVREINNYHHAHDAYLNAVVGTALIKKYPKLESEFVYGDYKVYDVRKMIAKSEQEIGKATAKYFFYSNIMNFFKTEITLANGEIRKRPLIETNGETGEIVWDKGRDFATVRKVLSMPQVNIVKKTEVQTGGFSKESILPKRNSDKLIARKKDWDPKKYGGFDSPTVAYSVLVVAKVEKGKSKKLKSVKELLGITIMERSSFEKNPIDFLEAKGYKEVKKDLIIKLPKYSLFELENGRKRMLASAGELQKGNELALPSKYVNFLYLASHYEKLKGSPEDNEQKQLFVEQHKHYLDEIIEQISEFSKRVILADANLDKVLSAYNKHRDKPIREQAENIIHLFTLTNLGAPAAFKYFDTTIDRKRYTSTKEVLDATLIHQSITGLYETRIDLSQLGGDGGPAPGGGGSSGGTVSLQDEHRLFDIPVTTSLPDVWLQDFPQAWAETGGLGRAKCQAPIIIDLKPTAVPVSIKQYPMSLEAHMGIRQHIIKFLELGVLRPCRSPWNTPLLPVKKPGTQDYRPVQDLREINKRTVDIHPTVPNPYNLLSTLKPDYSWYTVLDLKDAFFCLPLAPQSQELFAFEWKDPERGISGQLTWTRLPQGFKNSPTLFNEALHRDLTDFRTQHPEVTLLQYVDDLLLAAPTKKACTQGTRHLLQELGEKGYRASAKKAQICQTKVTYLGYILSEGKRWLTPGRIETVARIPPPRNPREVREFLGKAGFCRLFIPGFAELAAPLYALTKPSTPFTWQTEHQLAFEALKKALLSAPALGLPDTSKPFTLFLDERQGIAKGVLTQKLGPWKRPVAYLSKKLDPVAAGWPPCLRIMAATAMLVKDSAKLTLGQPLTVITPHTLEAIVRQPPDRWITNARLTHYQALLLDTDRVQFGPPVTLNPATLLPVPENQPSPHDCRQVLAETHGTREDLKDQELPDADHTWYTDGSSYLDSGTRRAGAAVVDGHNTIWAQSLPPGTSAQKAELIALTKALELSKGKKANIYTDSRYAFATAHTHGSIYERRGWLTSEGKEIKNKAEIIALLKALFLPQEVAIIHCPGHQKGQDPVAVGNRQADRVARQAAMAEVLTLATEPDNTSHITAGKRTADGSEFEKRTADGSEFESPKKKAKVE

SEQ ID NO: 2014 - protein, 2102 aa, synthetic construct
MPAAKRVKLDGGDKKYSIGLDIGTNSVGWAVITDEYKVPSKKFKVLGNTDRHSIKKNLIGALLFDSGETAEATRLKRTARRRYTRRKNRICYLQEIFSNEMAKVDDSFFHRLEESFLVEEDKKHERHPIFGNIVDEVAYHEKYPTIYHLRKKLVDSTDKADLRLIYLALAHMIKFRGHFLIEGDLNPDNSDVDKLFIQLVQTYNQLFEENPINASGVDAKAILSARLSKSRRLENLIAQLPGEKKNGLFGNLIALSLGLTPNFKSNFDLAEDAKLQLSKDTYDDDLDNLLAQIGDQYADLFLAAKNLSDAILLSDILRVNTEITKAPLSASMIKRYDEHHQDLTLLKALVRQQLPEKYKEIFFDQSKNGYAGYIDGGASQEEFYKFIKPILEKMDGTEELLVKLNREDLLRKQRTFDNGSIPHQIHLGELHAILRRQEDFYPFLKDNREKIEKILTFRIPYYVGPLARGNSRFAWMTRKSEETITPWNFEEVVDKGASAQSFIERMTNFDKNLPNEKVLPKHSLLYEYFTVYNELTKVKYVTEGMRKPAFLSGEQKKAIVDLLFKTNRKVTVKQLKEDYFKKIECFDSVEISGVEDRFNASLGTYHDLLKIIKDKDFLDNEENEDILEDIVLTLTLFEDREMIEERLKTYAHLFDDKVMKQLKRRRYTGWGRLSRKLINGIRDKQSGKTILDFLKSDGFANRNFMQLIHDDSLTFKEDIQKAQVSGQGDSLHEHIANLAGSPAIKKGILQTVKVVDELVKVMGRHKPENIVIEMARENQTTQKGQKNSRERMKRIEEGIKELGSQILKEHPVENTQLQNEKLYLYYLQNGRDMYVDQELDINRLSDYDVDHIVPQSFLKDDSIDNKVLTRSDKARGKSDNVPSEEVVKKMKNYWRQLLNAKLITQRKFDNLTKAERGGLSELDKAGFIKRQLVETRQITKHVAQILDSRMNTKYDENDKLIREVKVITLKSKLVSDFRKDFQFYKVREINNYHHAHDAYLNAVVGTALIKKYPKLESEFVYGDYKVYDVRKMIAKSEQEIGKATAKYFFYSNIMNFFKTEITLANGEIRKRPLIETNGETGEIVWDKGRDFATVRKVLSMPQVNIVKKTEVQTGGFSKESILPKRNSDKLIARKKDWDPKKYGGFDSPTVAYSVLVVAKVEKGKSKKLKSVKELLGITIMERSSFEKNPIDFLEAKGYKEVKKDLIIKLPKYSLFELENGRKRMLASAGELQKGNELALPSKYVNFLYLASHYEKLKGSPEDNEQKQLFVEQHKHYLDEIIEQISEFSKRVILADANLDKVLSAYNKHRDKPIREQAENIIHLFTLTNLGAPAAFKYFDTTIDRKRYTSTKEVLDATLIHQSITGLYETRIDLSQLGGDGGEAAAKGSSGGGGGTVSLQDEHRLFDIPVTTSLPDVWLQDFPQAWAETGGLGRAKCQAPIIIDLKPTAVPVSIKQYPMSLEAHMGIRQHIIKFLELGVLRPCRSPWNTPLLPVKKPGTQDYRPVQDLREINKRTVDIHPTVPNPYNLLSTLKPDYSWYTVLDLKDAFFCLPLAPQSQELFAFEWKDPERGISGQLTWTRLPQGFKNSPTLFNEALHRDLTDFRTQHPEVTLLQYVDDLLLAAPTKKACTQGTRHLLQELGEKGYRASAKKAQICQTKVTYLGYILSEGKRWLTPGRIETVARIPPPRNPREVREFLGKAGFCRLFIPGFAELAAPLYALTKPSTPFTWQTEHQLAFEALKKALLSAPALGLPDTSKPFTLFLDERQGIAKGVLTQKLGPWKRPVAYLSKKLDPVAAGWPPCLRIMAATAMLVKDSAKLTLGQPLTVITPHTLEAIVRQPPDRWITNARLTHYQALLLDTDRVQFGPPVTLNPATLLPVPENQPSPHDCRQVLAETHGTREDLKDQELPDADHTWYTDGSSYLDSGTRRAGAAVVDGHNTIWAQSLPPGTSAQKAELIALTKALELSKGKKANIYTDSRYAFATAHTHGSIYERRGWLTSEGKEIKNKAEIIALLKALFLPQEVAIIHCPGHQKGQDPVAVGNRQADRVARQAAMAEVLTLATEPDNTSHITAGKRTADGSEFEKRTADGSEFESPKKKAKVE

SEQ ID NO: 2015 - protein, 2100 aa, synthetic construct
MPAAKRVKLDGGDKKYSIGLDIGTNSVGWAVITDEYKVPSKKFKVLGNTDRHSIKKNLIGALLFDSGETAEATRLKRTARRRYTRRKNRICYLQEIFSNEMAKVDDSFFHRLEESFLVEEDKKHERHPIFGNIVDEVAYHEKYPTIYHLRKKLVDSTDKADLRLIYLALAHMIKFRGHFLIEGDLNPDNSDVDKLFIQLVQTYNQLFEENPINASGVDAKAILSARLSKSRRLENLIAQLPGEKKNGLFGNLIALSLGLTPNFKSNFDLAEDAKLQLSKDTYDDDLDNLLAQIGDQYADLFLAAKNLSDAILLSDILRVNTEITKAPLSASMIKRYDEHHQDLTLLKALVRQQLPEKYKEIFFDQSKNGYAGYIDGGASQEEFYKFIKPILEKMDGTEELLVKLNREDLLRKQRTFDNGSIPHQIHLGELHAILRRQEDFYPFLKDNREKIEKILTFRIPYYVGPLARGNSRFAWMTRKSEETITPWNFEEVVDKGASAQSFIERMTNFDKNLPNEKVLPKHSLLYEYFTVYNELTKVKYVTEGMRKPAFLSGEQKKAIVDLLFKTNRKVTVKQLKEDYFKKIECFDSVEISGVEDRFNASLGTYHDLLKIIKDKDFLDNEENEDILEDIVLTLTLFEDREMIEERLKTYAHLFDDKVMKQLKRRRYTGWGRLSRKLINGIRDKQSGKTILDFLKSDGFANRNFMQLIHDDSLTFKEDIQKAQVSGQGDSLHEHIANLAGSPAIKKGILQTVKVVDELVKVMGRHKPENIVIEMARENQTTQKGQKNSRERMKRIEEGIKELGSQILKEHPVENTQLQNEKLYLYYLQNGRDMYVDQELDINRLSDYDVDHIVPQSFLKDDSIDNKVLTRSDKARGKSDNVPSEEVVKKMKNYWRQLLNAKLITQRKFDNLTKAERGGLSELDKAGFIKRQLVETRQITKHVAQILDSRMNTKYDENDKLIREVKVITLKSKLVSDFRKDFQFYKVREINNYHHAHDAYLNAVVGTALIKKYPKLESEFVYGDYKVYDVRKMIAKSEQEIGKATAKYFFYSNIMNFFKTEITLANGEIRKRPLIETNGETGEIVWDKGRDFATVRKVLSMPQVNIVKKTEVQTGGFSKESILPKRNSDKLIARKKDWDPKKYGGFDSPTVAYSVLVVAKVEKGKSKKLKSVKELLGITIMERSSFEKNPIDFLEAKGYKEVKKDLIIKLPKYSLFELENGRKRMLASAGELQKGNELALPSKYVNFLYLASHYEKLKGSPEDNEQKQLFVEQHKHYLDEIIEQISEFSKRVILADANLDKVLSAYNKHRDKPIREQAENIIHLFTLTNLGAPAAFKYFDTTIDRKRYTSTKEVLDATLIHQSITGLYETRIDLSQLGGDGGPAPGGGGGSGGTVSLQDEHRLFDIPVTTSLPDVWLQDFPQAWAETGGLGRAKCQAPIIIDLKPTAVPVSIKQYPMSLEAHMGIRQHIIKFLELGVLRPCRSPWNTPLLPVKKPGTQDYRPVQDLREINKRTVDIHPTVPNPYNLLSTLKPDYSWYTVLDLKDAFFCLPLAPQSQELFAFEWKDPERGISGQLTWTRLPQGFKNSPTLFNEALHRDLTDFRTQHPEVTLLQYVDDLLLAAPTKKACTQGTRHLLQELGEKGYRASAKKAQICQTKVTYLGYILSEGKRWLTPGRIETVARIPPPRNPREVREFLGKAGFCRLFIPGFAELAAPLYALTKPSTPFTWQTEHQLAFEALKKALLSAPALGLPDTSKPFTLFLDERQGIAKGVLTQKLGPWKRPVAYLSKKLDPVAAGWPPCLRIMAATAMLVKDSAKLTLGQPLTVITPHTLEAIVRQPPDRWITNARLTHYQALLLDTDRVQFGPPVTLNPATLLPVPENQPSPHDCRQVLAETHGTREDLKDQELPDADHTWYTDGSSYLDSGTRRAGAAVVDGHNTIWAQSLPPGTSAQKAELIALTKALELSKGKKANIYTDSRYAFATAHTHGSIYERRGWLTSEGKEIKNKAEIIALLKALFLPQEVAIIHCPGHQKGQDPVAVGNRQADRVARQAAMAEVLTLATEPDNTSHITAGKRTADGSEFEKRTADGSEFESPKKKAKVE

SEQ ID NO: 2016 - protein, 2095 aa, synthetic construct
MPAAKRVKLDGGDKKYSIGLDIGTNSVGWAVITDEYKVPSKKFKVLGNTDRHSIKKNLIGALLFDSGETAEATRLKRTARRRYTRRKNRICYLQEIFSNEMAKVDDSFFHRLEESFLVEEDKKHERHPIFGNIVDEVAYHEKYPTIYHLRKKLVDSTDKADLRLIYLALAHMIKFRGHFLIEGDLNPDNSDVDKLFIQLVQTYNQLFEENPINASGVDAKAILSARLSKSRRLENLIAQLPGEKKNGLFGNLIALSLGLTPNFKSNFDLAEDAKLQLSKDTYDDDLDNLLAQIGDQYADLFLAAKNLSDAILLSDILRVNTEITKAPLSASMIKRYDEHHQDLTLLKALVRQQLPEKYKEIFFDQSKNGYAGYIDGGASQEEFYKFIKPILEKMDGTEELLVKLNREDLLRKQRTFDNGSIPHQIHLGELHAILRRQEDFYPFLKDNREKIEKILTFRIPYYVGPLARGNSRFAWMTRKSEETITPWNFEEVVDKGASAQSFIERMTNFDKNLPNEKVLPKHSLLYEYFTVYNELTKVKYVTEGMRKPAFLSGEQKKAIVDLLFKTNRKVTVKQLKEDYFKKIECFDSVEISGVEDRFNASLGTYHDLLKIIKDKDFLDNEENEDILEDIVLTLTLFEDREMIEERLKTYAHLFDDKVMKQLKRRRYTGWGRLSRKLINGIRDKQSGKTILDFLKSDGFANRNFMQLIHDDSLTFKEDIQKAQVSGQGDSLHEHIANLAGSPAIKKGILQTVKVVDELVKVMGRHKPENIVIEMARENQTTQKGQKNSRERMKRIEEGIKELGSQILKEHPVENTQLQNEKLYLYYLQNGRDMYVDQELDINRLSDYDVDHIVPQSFLKDDSIDNKVLTRSDKARGKSDNVPSEEVVKKMKNYWRQLLNAKLITQRKFDNLTKAERGGLSELDKAGFIKRQLVETRQITKHVAQILDSRMNTKYDENDKLIREVKVITLKSKLVSDFRKDFQFYKVREINNYHHAHDAYLNAVVGTALIKKYPKLESEFVYGDYKVYDVRKMIAKSEQEIGKATAKYFFYSNIMNFFKTEITLANGEIRKRPLIETNGETGEIVWDKGRDFATVRKVLSMPQVNIVKKTEVQTGGFSKESILPKRNSDKLIARKKDWDPKKYGGFDSPTVAYSVLVVAKVEKGKSKKLKSVKELLGITIMERSSFEKNPIDFLEAKGYKEVKKDLIIKLPKYSLFELENGRKRMLASAGELQKGNELALPSKYVNFLYLASHYEKLKGSPEDNEQKQLFVEQHKHYLDEIIEQISEFSKRVILADANLDKVLSAYNKHRDKPIREQAENIIHLFTLTNLGAPAAFKYFDTTIDRKRYTSTKEVLDATLIHQSITGLYETRIDLSQLGGDGGGGGGGGTVSLQDEHRLFDIPVTTSLPDVWLQDFPQAWAETGGLGRAKCQAPIIIDLKPTAVPVSIKQYPMSLEAHMGIRQHIIKFLELGVLRPCRSPWNTPLLPVKKPGTQDYRPVQDLREINKRTVDIHPTVPNPYNLLSTLKPDYSWYTVLDLKDAFFCLPLAPQSQELFAFEWKDPERGISGQLTWTRLPQGFKNSPTLFNEALHRDLTDFRTQHPEVTLLQYVDDLLLAAPTKKACTQGTRHLLQELGEKGYRASAKKAQICQTKVTYLGYILSEGKRWLTPGRIETVARIPPPRNPREVREFLGKAGFCRLFIPGFAELAAPLYALTKPSTPFTWQTEHQLAFEALKKALLSAPALGLPDTSKPFTLFLDERQGIAKGVLTQKLGPWKRPVAYLSKKLDPVAAGWPPCLRIMAATAMLVKDSAKLTLGQPLTVITPHTLEAIVRQPPDRWITNARLTHYQALLLDTDRVQFGPPVTLNPATLLPVPENQPSPHDCRQVLAETHGTREDLKDQELPDADHTWYTDGSSYLDSGTRRAGAAVVDGHNTIWAQSLPPGTSAQKAELIALTKALELSKGKKANIYTDSRYAFATAHTHGSIYERRGWLTSEGKEIKNKAEIIALLKALFLPQEVAIIHCPGHQKGQDPVAVGNRQADRVARQAAMAEVLTLATEPDNTSHITAGKRTADGSEFEKRTADGSEFESPKKKAKVE

SEQ ID NO: 2017 - protein, 2102 aa, synthetic construct
MPAAKRVKLDGGDKKYSIGLDIGTNSVGWAVITDEYKVPSKKFKVLGNTDRHSIKKNLIGALLFDSGETAEATRLKRTARRRYTRRKNRICYLQEIFSNEMAKVDDSFFHRLEESFLVEEDKKHERHPIFGNIVDEVAYHEKYPTIYHLRKKLVDSTDKADLRLIYLALAHMIKFRGHFLIEGDLNPDNSDVDKLFIQLVQTYNQLFEENPINASGVDAKAILSARLSKSRRLENLIAQLPGEKKNGLFGNLIALSLGLTPNFKSNFDLAEDAKLQLSKDTYDDDLDNLLAQIGDQYADLFLAAKNLSDAILLSDILRVNTEITKAPLSASMIKRYDEHHQDLTLLKALVRQQLPEKYKEIFFDQSKNGYAGYIDGGASQEEFYKFIKPILEKMDGTEELLVKLNREDLLRKQRTFDNGSIPHQIHLGELHAILRRQEDFYPFLKDNREKIEKILTFRIPYYVGPLARGNSRFAWMTRKSEETITPWNFEEVVDKGASAQSFIERMTNFDKNLPNEKVLPKHSLLYEYFTVYNELTKVKYVTEGMRKPAFLSGEQKKAIVDLLFKTNRKVTVKQLKEDYFKKIECFDSVEISGVEDRFNASLGTYHDLLKIIKDKDFLDNEENEDILEDIVLTLTLFEDREMIEERLKTYAHLFDDKVMKQLKRRRYTGWGRLSRKLINGIRDKQSGKTILDFLKSDGFANRNFMQLIHDDSLTFKEDIQKAQVSGQGDSLHEHIANLAGSPAIKKGILQTVKVVDELVKVMGRHKPENIVIEMARENQTTQKGQKNSRERMKRIEEGIKELGSQILKEHPVENTQLQNEKLYLYYLQNGRDMYVDQELDINRLSDYDVDHIVPQSFLKDDSIDNKVLTRSDKARGKSDNVPSEEVVKKMKNYWRQLLNAKLITQRKFDNLTKAERGGLSELDKAGFIKRQLVETRQITKHVAQILDSRMNTKYDENDKLIREVKVITLKSKLVSDFRKDFQFYKVREINNYHHAHDAYLNAVVGTALIKKYPKLESEFVYGDYKVYDVRKMIAKSEQEIGKATAKYFFYSNIMNFFKTEITLANGEIRKRPLIETNGETGEIVWDKGRDFATVRKVLSMPQVNIVKKTEVQTGGFSKESILPKRNSDKLIARKKDWDPKKYGGFDSPTVAYSVLVVAKVEKGKSKKLKSVKELLGITIMERSSFEKNPIDFLEAKGYKEVKKDLIIKLPKYSLFELENGRKRMLASAGELQKGNELALPSKYVNFLYLASHYEKLKGSPEDNEQKQLFVEQHKHYLDEIIEQISEFSKRVILADANLDKVLSAYNKHRDKPIREQAENIIHLFTLTNLGAPAAFKYFDTTIDRKRYTSTKEVLDATLIHQSITGLYETRIDLSQLGGDGGGGGEAAAKGSSGGTVSLQDEHRLFDIPVTTSLPDVWLQDFPQAWAETGGLGRAKCQAPIIIDLKPTAVPVSIKQYPMSLEAHMGIRQHIIKFLELGVLRPCRSPWNTPLLPVKKPGTQDYRPVQDLREINKRTVDIHPTVPNPYNLLSTLKPDYSWYTVLDLKDAFFCLPLAPQSQELFAFEWKDPERGISGQLTWTRLPQGFKNSPTLFNEALHRDLTDFRTQHPEVTLLQYVDDLLLAAPTKKACTQGTRHLLQELGEKGYRASAKKAQICQTKVTYLGYILSEGKRWLTPGRIETVARIPPPRNPREVREFLGKAGFCRLFIPGFAELAAPLYALTKPSTPFTWQTEHQLAFEALKKALLSAPALGLPDTSKPFTLFLDERQGIAKGVLTQKLGPWKRPVAYLSKKLDPVAAGWPPCLRIMAATAMLVKDSAKLTLGQPLTVITPHTLEAIVRQPPDRWITNARLTHYQALLLDTDRVQFGPPVTLNPATLLPVPENQPSPHDCRQVLAETHGTREDLKDQELPDADHTWYTDGSSYLDSGTRRAGAAVVDGHNTIWAQSLPPGTSAQKAELIALTKALELSKGKKANIYTDSRYAFATAHTHGSIYERRGWLTSEGKEIKNKAEIIALLKALFLPQEVAIIHCPGHQKGQDPVAVGNRQADRVARQAAMAEVLTLATEPDNTSHITAGKRTADGSEFEKRTADGSEFESPKKKAKVE

SEQ ID NO: 2018 - protein, 2104 aa, synthetic construct
MPAAKRVKLDGGDKKYSIGLDIGTNSVGWAVITDEYKVPSKKFKVLGNTDRHSIKKNLIGALLFDSGETAEATRLKRTARRRYTRRKNRICYLQEIFSNEMAKVDDSFFHRLEESFLVEEDKKHERHPIFGNIVDEVAYHEKYPTIYHLRKKLVDSTDKADLRLIYLALAHMIKFRGHFLIEGDLNPDNSDVDKLFIQLVQTYNQLFEENPINASGVDAKAILSARLSKSRRLENLIAQLPGEKKNGLFGNLIALSLGLTPNFKSNFDLAEDAKLQLSKDTYDDDLDNLLAQIGDQYADLFLAAKNLSDAILLSDILRVNTEITKAPLSASMIKRYDEHHQDLTLLKALVRQQLPEKYKEIFFDQSKNGYAGYIDGGASQEEFYKFIKPILEKMDGTEELLVKLNREDLLRKQRTFDNGSIPHQIHLGELHAILRRQEDFYPFLKDNREKIEKILTFRIPYYVGPLARGNSRFAWMTRKSEETITPWNFEEVVDKGASAQSFIERMTNFDKNLPNEKVLPKHSLLYEYFTVYNELTKVKYVTEGMRKPAFLSGEQKKAIVDLLFKTNRKVTVKQLKEDYFKKIECFDSVEISGVEDRFNASLGTYHDLLKIIKDKDFLDNEENEDILEDIVLTLTLFEDREMIEERLKTYAHLFDDKVMKQLKRRRYTGWGRLSRKLINGIRDKQSGKTILDFLKSDGFANRNFMQLIHDDSLTFKEDIQKAQVSGQGDSLHEHIANLAGSPAIKKGILQTVKVVDELVKVMGRHKPENIVIEMARENQTTQKGQKNSRERMKRIEEGIKELGSQILKEHPVENTQLQNEKLYLYYLQNGRDMYVDQELDINRLSDYDVDHIVPQSFLKDDSIDNKVLTRSDKARGKSDNVPSEEVVKKMKNYWRQLLNAKLITQRKFDNLTKAERGGLSELDKAGFIKRQLVETRQITKHVAQILDSRMNTKYDENDKLIREVKVITLKSKLVSDFRKDFQFYKVREINNYHHAHDAYLNAVVGTALIKKYPKLESEFVYGDYKVYDVRKMIAKSEQEIGKATAKYFFYSNIMNFFKTEITLANGEIRKRPLIETNGETGEIVWDKGRDFATVRKVLSMPQVNIVKKTEVQTGGFSKESILPKRNSDKLIARKKDWDPKKYGGFDSPTVAYSVLVVAKVEKGKSKKLKSVKELLGITIMERSSFEKNPIDFLEAKGYKEVKKDLIIKLPKYSLFELENGRKRMLASAGELQKGNELALPSKYVNFLYLASHYEKLKGSPEDNEQKQLFVEQHKHYLDEIIEQISEFSKRVILADANLDKVLSAYNKHRDKPIREQAENIIHLFTLTNLGAPAAFKYFDTTIDRKRYTSTKEVLDATLIHQSITGLYETRIDLSQLGGDGGPAPAPAPAPAPAPGGTVSLQDEHRLFDIPVTTSLPDVWLQDFPQAWAETGGLGRAKCQAPIIIDLKPTAVPVSIKQYPMSLEAHMGIRQHIIKFLELGVLRPCRSPWNTPLLPVKKPGTQDYRPVQDLREINKRTVDIHPTVPNPYNLLSTLKPDYSWYTVLDLKDAFFCLPLAPQSQELFAFEWKDPERGISGQLTWTRLPQGFKNSPTLFNEALHRDLTDFRTQHPEVTLLQYVDDLLLAAPTKKACTQGTRHLLQELGEKGYRASAKKAQICQTKVTYLGYILSEGKRWLTPGRIETVARIPPPRNPREVREFLGKAGFCRLFIPGFAELAAPLYALTKPSTPFTWQTEHQLAFEALKKALLSAPALGLPDTSKPFTLFLDERQGIAKGVLTQKLGPWKRPVAYLSKKLDPVAAGWPPCLRIMAATAMLVKDSAKLTLGQPLTVITPHTLEAIVRQPPDRWITNARLTHYQALLLDTDRVQFGPPVTLNPATLLPVPENQPSPHDCRQVLAETHGTREDLKDQELPDADHTWYTDGSSYLDSGTRRAGAAVVDGHNTIWAQSLPPGTSAQKAELIALTKALELSKGKKANIYTDSRYAFATAHTHGSIYERRGWLTSEGKEIKNKAEIIALLKALFLPQEVAIIHCPGHQKGQDPVAVGNRQADRVARQAAMAEVLTLATEPDNTSHITAGKRTADGSEFEKRTADGSEFESPKKKAKVE

SEQ ID NO: 2019 - protein, 2100 aa, synthetic construct
MPAAKRVKLDGGDKKYSIGLDIGTNSVGWAVITDEYKVPSKKFKVLGNTDRHSIKKNLIGALLFDSGETAEATRLKRTARRRYTRRKNRICYLQEIFSNEMAKVDDSFFHRLEESFLVEEDKKHERHPIFGNIVDEVAYHEKYPTIYHLRKKLVDSTDKADLRLIYLALAHMIKFRGHFLIEGDLNPDNSDVDKLFIQLVQTYNQLFEENPINASGVDAKAILSARLSKSRRLENLIAQLPGEKKNGLFGNLIALSLGLTPNFKSNFDLAEDAKLQLSKDTYDDDLDNLLAQIGDQYADLFLAAKNLSDAILLSDILRVNTEITKAPLSASMIKRYDEHHQDLTLLKALVRQQLPEKYKEIFFDQSKNGYAGYIDGGASQEEFYKFIKPILEKMDGTEELLVKLNREDLLRKQRTFDNGSIPHQIHLGELHAILRRQEDFYPFLKDNREKIEKILTFRIPYYVGPLARGNSRFAWMTRKSEETITPWNFEEVVDKGASAQSFIERMTNFDKNLPNEKVLPKHSLLYEYFTVYNELTKVKYVTEGMRKPAFLSGEQKKAIVDLLFKTNRKVTVKQLKEDYFKKIECFDSVEISGVEDRFNASLGTYHDLLKIIKDKDFLDNEENEDILEDIVLTLTLFEDREMIEERLKTYAHLFDDKVMKQLKRRRYTGWGRLSRKLINGIRDKQSGKTILDFLKSDGFANRNFMQLIHDDSLTFKEDIQKAQVSGQGDSLHEHIANLAGSPAIKKGILQTVKVVDELVKVMGRHKPENIVIEMARENQTTQKGQKNSRERMKRIEEGIKELGSQILKEHPVENTQLQNEKLYLYYLQNGRDMYVDQELDINRLSDYDVDHIVPQSFLKDDSIDNKVLTRSDKARGKSDNVPSEEVVKKMKNYWRQLLNAKLITQRKFDNLTKAERGGLSELDKAGFIKRQLVETRQITKHVAQILDSRMNTKYDENDKLIREVKVITLKSKLVSDFRKDFQFYKVREINNYHHAHDAYLNAVVGTALIKKYPKLESEFVYGDYKVYDVRKMIAKSEQEIGKATAKYFFYSNIMNFFKTEITLANGEIRKRPLIETNGETGEIVWDKGRDFATVRKVLSMPQVNIVKKTEVQTGGFSKESILPKRNSDKLIARKKDWDPKKYGGFDSPTVAYSVLVVAKVEKGKSKKLKSVKELLGITIMERSSFEKNPIDFLEAKGYKEVKKDLIIKLPKYSLFELENGRKRMLASAGELQKGNELALPSKYVNFLYLASHYEKLKGSPEDNEQKQLFVEQHKHYLDEIIEQISEFSKRVILADANLDKVLSAYNKHRDKPIREQAENIIHLFTLTNLGAPAAFKYFDTTIDRKRYTSTKEVLDATLIHQSITGLYETRIDLSQLGGDGGPAPGSSGGGGGTVSLQDEHRLFDIPVTTSLPDVWLQDFPQAWAETGGLGRAKCQAPIIIDLKPTAVPVSIKQYPMSLEAHMGIRQHIIKFLELGVLRPCRSPWNTPLLPVKKPGTQDYRPVQDLREINKRTVDIHPTVPNPYNLLSTLKPDYSWYTVLDLKDAFFCLPLAPQSQELFAFEWKDPERGISGQLTWTRLPQGFKNSPTLFNEALHRDLTDFRTQHPEVTLLQYVDDLLLAAPTKKACTQGTRHLLQELGEKGYRASAKKAQICQTKVTYLGYILSEGKRWLTPGRIETVARIPPPRNPREVREFLGKAGFCRLFIPGFAELAAPLYALTKPSTPFTWQTEHQLAFEALKKALLSAPALGLPDTSKPFTLFLDERQGIAKGVLTQKLGPWKRPVAYLSKKLDPVAAGWPPCLRIMAATAMLVKDSAKLTLGQPLTVITPHTLEAIVRQPPDRWITNARLTHYQALLLDTDRVQFGPPVTLNPATLLPVPENQPSPHDCRQVLAETHGTREDLKDQELPDADHTWYTDGSSYLDSGTRRAGAAVVDGHNTIWAQSLPPGTSAQKAELIALTKALELSKGKKANIYTDSRYAFATAHTHGSIYERRGWLTSEGKEIKNKAEIIALLKALFLPQEVAIIHCPGHQKGQDPVAVGNRQADRVARQAAMAEVLTLATEPDNTSHITAGKRTADGSEFEKRTADGSEFESPKKKAKVE

SEQ ID NO: 2020 - protein, 2100 aa, synthetic construct
MPAAKRVKLDGGDKKYSIGLDIGTNSVGWAVITDEYKVPSKKFKVLGNTDRHSIKKNLIGALLFDSGETAEATRLKRTARRRYTRRKNRICYLQEIFSNEMAKVDDSFFHRLEESFLVEEDKKHERHPIFGNIVDEVAYHEKYPTIYHLRKKLVDSTDKADLRLIYLALAHMIKFRGHFLIEGDLNPDNSDVDKLFIQLVQTYNQLFEENPINASGVDAKAILSARLSKSRRLENLIAQLPGEKKNGLFGNLIALSLGLTPNFKSNFDLAEDAKLQLSKDTYDDDLDNLLAQIGDQYADLFLAAKNLSDAILLSDILRVNTEITKAPLSASMIKRYDEHHQDLTLLKALVRQQLPEKYKEIFFDQSKNGYAGYIDGGASQEEFYKFIKPILEKMDGTEELLVKLNREDLLRKQRTFDNGSIPHQIHLGELHAILRRQEDFYPFLKDNREKIEKILTFRIPYYVGPLARGNSRFAWMTRKSEETITPWNFEEVVDKGASAQSFIERMTNFDKNLPNEKVLPKHSLLYEYFTVYNELTKVKYVTEGMRKPAFLSGEQKKAIVDLLFKTNRKVTVKQLKEDYFKKIECFDSVEISGVEDRFNASLGTYHDLLKIIKDKDFLDNEENEDILEDIVLTLTLFEDREMIEERLKTYAHLFDDKVMKQLKRRRYTGWGRLSRKLINGIRDKQSGKTILDFLKSDGFANRNFMQLIHDDSLTFKEDIQKAQVSGQGDSLHEHIANLAGSPAIKKGILQTVKVVDELVKVMGRHKPENIVIEMARENQTTQKGQKNSRERMKRIEEGIKELGSQILKEHPVENTQLQNEKLYLYYLQNGRDMYVDQELDINRLSDYDVDHIVPQSFLKDDSIDNKVLTRSDKARGKSDNVPSEEVVKKMKNYWRQLLNAKLITQRKFDNLTKAERGGLSELDKAGFIKRQLVETRQITKHVAQILDSRMNTKYDENDKLIREVKVITLKSKLVSDFRKDFQFYKVREINNYHHAHDAYLNAVVGTALIKKYPKLESEFVYGDYKVYDVRKMIAKSEQEIGKATAKYFFYSNIMNFFKTEITLANGEIRKRPLIETNGETGEIVWDKGRDFATVRKVLSMPQVNIVKKTEVQTGGFSKESILPKRNSDKLIARKKDWDPKKYGGFDSPTVAYSVLVVAKVEKGKSKKLKSVKELLGITIMERSSFEKNPIDFLEAKGYKEVKKDLIIKLPKYSLFELENGRKRMLASAGELQKGNELALPSKYVNFLYLASHYEKLKGSPEDNEQKQLFVEQHKHYLDEIIEQISEFSKRVILADANLDKVLSAYNKHRDKPIREQAENIIHLFTLTNLGAPAAFKYFDTTIDRKRYTSTKEVLDATLIHQSITGLYETRIDLSQLGGDGGGSSGGSPAPGGTVSLQDEHRLFDIPVTTSLPDVWLQDFPQAWAETGGLGRAKCQAPIIIDLKPTAVPVSIKQYPMSLEAHMGIRQHIIKFLELGVLRPCRSPWNTPLLPVKKPGTQDYRPVQDLREINKRTVDIHPTVPNPYNLLSTLKPDYSWYTVLDLKDAFFCLPLAPQSQELFAFEWKDPERGISGQLTWTRLPQGFKNSPTLFNEALHRDLTDFRTQHPEVTLLQYVDDLLLAAPTKKACTQGTRHLLQELGEKGYRASAKKAQICQTKVTYLGYILSEGKRWLTPGRIETVARIPPPRNPREVREFLGKAGFCRLFIPGFAELAAPLYALTKPSTPFTWQTEHQLAFEALKKALLSAPALGLPDTSKPFTLFLDERQGIAKGVLTQKLGPWKRPVAYLSKKLDPVAAGWPPCLRIMAATAMLVKDSAKLTLGQPLTVITPHTLEAIVRQPPDRWITNARLTHYQALLLDTDRVQFGPPVTLNPATLLPVPENQPSPHDCRQVLAETHGTREDLKDQELPDADHTWYTDGSSYLDSGTRRAGAAVVDGHNTIWAQSLPPGTSAQKAELIALTKALELSKGKKANIYTDSRYAFATAHTHGSIYERRGWLTSEGKEIKNKAEIIALLKALFLPQEVAIIHCPGHQKGQDPVAVGNRQADRVARQAAMAEVLTLATEPDNTSHITAGKRTADGSEFEKRTADGSEFESPKKKAKVE

SEQ ID NO: 2021 - protein, 2097 aa, synthetic construct
MPAAKRVKLDGGDKKYSIGLDIGTNSVGWAVITDEYKVPSKKFKVLGNTDRHSIKKNLIGALLFDSGETAEATRLKRTARRRYTRRKNRICYLQEIFSNEMAKVDDSFFHRLEESFLVEEDKKHERHPIFGNIVDEVAYHEKYPTIYHLRKKLVDSTDKADLRLIYLALAHMIKFRGHFLIEGDLNPDNSDVDKLFIQLVQTYNQLFEENPINASGVDAKAILSARLSKSRRLENLIAQLPGEKKNGLFGNLIALSLGLTPNFKSNFDLAEDAKLQLSKDTYDDDLDNLLAQIGDQYADLFLAAKNLSDAILLSDILRVNTEITKAPLSASMIKRYDEHHQDLTLLKALVRQQLPEKYKEIFFDQSKNGYAGYIDGGASQEEFYKFIKPILEKMDGTEELLVKLNREDLLRKQRTFDNGSIPHQIHLGELHAILRRQEDFYPFLKDNREKIEKILTFRIPYYVGPLARGNSRFAWMTRKSEETITPWNFEEVVDKGASAQSFIERMTNFDKNLPNEKVLPKHSLLYEYFTVYNELTKVKYVTEGMRKPAFLSGEQKKAIVDLLFKTNRKVTVKQLKEDYFKKIECFDSVEISGVEDRFNASLGTYHDLLKIIKDKDFLDNEENEDILEDIVLTLTLFEDREMIEERLKTYAHLFDDKVMKQLKRRRYTGWGRLSRKLINGIRDKQSGKTILDFLKSDGFANRNFMQLIHDDSLTFKEDIQKAQVSGQGDSLHEHIANLAGSPAIKKGILQTVKVVDELVKVMGRHKPENIVIEMARENQTTQKGQKNSRERMKRIEEGIKELGSQILKEHPVENTQLQNEKLYLYYLQNGRDMYVDQELDINRLSDYDVDHIVPQSFLKDDSIDNKVLTRSDKARGKSDNVPSEEVVKKMKNYWRQLLNAKLITQRKFDNLTKAERGGLSELDKAGFIKRQLVETRQITKHVAQILDSRMNTKYDENDKLIREVKVITLKSKLVSDFRKDFQFYKVREINNYHHAHDAYLNAVVGTALIKKYPKLESEFVYGDYKVYDVRKMIAKSEQEIGKATAKYFFYSNIMNFFKTEITLANGEIRKRPLIETNGETGEIVWDKGRDFATVRKVLSMPQVNIVKKTEVQTGGFSKESILPKRNSDKLIARKKDWDPKKYGGFDSPTVAYSVLVVAKVEKGKSKKLKSVKELLGITIMERSSFEKNPIDFLEAKGYKEVKKDLIIKLPKYSLFELENGRKRMLASAGELQKGNELALPSKYVNFLYLASHYEKLKGSPEDNEQKQLFVEQHKHYLDEIIEQISEFSKRVILADANLDKVLSAYNKHRDKPIREQAENIIHLFTLTNLGAPAAFKYFDTTIDRKRYTSTKEVLDATLIHQSITGLYETRIDLSQLGGDGGGGSPAPGGTVSLQDEHRLFDIPVTTSLPDVWLQDFPQAWAETGGLGRAKCQAPIIIDLKPTAVPVSIKQYPMSLEAHMGIRQHIIKFLELGVLRPCRSPWNTPLLPVKKPGTQDYRPVQDLREINKRTVDIHPTVPNPYNLLSTLKPDYSWYTVLDLKDAFFCLPLAPQSQELFAFEWKDPERGISGQLTWTRLPQGFKNSPTLFNEALHRDLTDFRTQHPEVTLLQYVDDLLLAAPTKKACTQGTRHLLQELGEKGYRASAKKAQICQTKVTYLGYILSEGKRWLTPGRIETVARIPPPRNPREVREFLGKAGFCRLFIPGFAELAAPLYALTKPSTPFTWQTEHQLAFEALKKALLSAPALGLPDTSKPFTLFLDERQGIAKGVLTQKLGPWKRPVAYLSKKLDPVAAGWPPCLRIMAATAMLVKDSAKLTLGQPLTVITPHTLEAIVRQPPDRWITNARLTHYQALLLDTDRVQFGPPVTLNPATLLPVPENQPSPHDCRQVLAETHGTREDLKDQELPDADHTWYTDGSSYLDSGTRRAGAAVVDGHNTIWAQSLPPGTSAQKAELIALTKALELSKGKKANIYTDSRYAFATAHTHGSIYERRGWLTSEGKEIKNKAEIIALLKALFLPQEVAIIHCPGHQKGQDPVAVGNRQADRVARQAAMAEVLTLATEPDNTSHITAGKRTADGSEFEKRTADGSEFESPKKKAKVE

SEQ ID NO: 2022 - protein, 2102 aa, synthetic construct
MPAAKRVKLDGGDKKYSIGLDIGTNSVGWAVITDEYKVPSKKFKVLGNTDRHSIKKNLIGALLFDSGETAEATRLKRTARRRYTRRKNRICYLQEIFSNEMAKVDDSFFHRLEESFLVEEDKKHERHPIFGNIVDEVAYHEKYPTIYHLRKKLVDSTDKADLRLIYLALAHMIKFRGHFLIEGDLNPDNSDVDKLFIQLVQTYNQLFEENPINASGVDAKAILSARLSKSRRLENLIAQLPGEKKNGLFGNLIALSLGLTPNFKSNFDLAEDAKLQLSKDTYDDDLDNLLAQIGDQYADLFLAAKNLSDAILLSDILRVNTEITKAPLSASMIKRYDEHHQDLTLLKALVRQQLPEKYKEIFFDQSKNGYAGYIDGGASQEEFYKFIKPILEKMDGTEELLVKLNREDLLRKQRTFDNGSIPHQIHLGELHAILRRQEDFYPFLKDNREKIEKILTFRIPYYVGPLARGNSRFAWMTRKSEETITPWNFEEVVDKGASAQSFIERMTNFDKNLPNEKVLPKHSLLYEYFTVYNELTKVKYVTEGMRKPAFLSGEQKKAIVDLLFKTNRKVTVKQLKEDYFKKIECFDSVEISGVEDRFNASLGTYHDLLKIIKDKDFLDNEENEDILEDIVLTLTLFEDREMIEERLKTYAHLFDDKVMKQLKRRRYTGWGRLSRKLINGIRDKQSGKTILDFLKSDGFANRNFMQLIHDDSLTFKEDIQKAQVSGQGDSLHEHIANLAGSPAIKKGILQTVKVVDELVKVMGRHKPENIVIEMARENQTTQKGQKNSRERMKRIEEGIKELGSQILKEHPVENTQLQNEKLYLYYLQNGRDMYVDQELDINRLSDYDVDHIVPQSFLKDDSIDNKVLTRSDKARGKSDNVPSEEVVKKMKNYWRQLLNAKLITQRKFDNLTKAERGGLSELDKAGFIKRQLVETRQITKHVAQILDSRMNTKYDENDKLIREVKVITLKSKLVSDFRKDFQFYKVREINNYHHAHDAYLNAVVGTALIKKYPKLESEFVYGDYKVYDVRKMIAKSEQEIGKATAKYFFYSNIMNFFKTEITLANGEIRKRPLIETNGETGEIVWDKGRDFATVRKVLSMPQVNIVKKTEVQTGGFSKESILPKRNSDKLIARKKDWDPKKYGGFDSPTVAYSVLVVAKVEKGKSKKLKSVKELLGITIMERSSFEKNPIDFLEAKGYKEVKKDLIIKLPKYSLFELENGRKRMLASAGELQKGNELALPSKYVNFLYLASHYEKLKGSPEDNEQKQLFVEQHKHYLDEIIEQISEFSKRVILADANLDKVLSAYNKHRDKPIREQAENIIHLFTLTNLGAPAAFKYFDTTIDRKRYTSTKEVLDATLIHQSITGLYETRIDLSQLGGDGGEAAAKPAPGSSGGTVSLQDEHRLFDIPVTTSLPDVWLQDFPQAWAETGGLGRAKCQAPIIIDLKPTAVPVSIKQYPMSLEAHMGIRQHIIKFLELGVLRPCRSPWNTPLLPVKKPGTQDYRPVQDLREINKRTVDIHPTVPNPYNLLSTLKPDYSWYTVLDLKDAFFCLPLAPQSQELFAFEWKDPERGISGQLTWTRLPQGFKNSPTLFNEALHRDLTDFRTQHPEVTLLQYVDDLLLAAPTKKACTQGTRHLLQELGEKGYRASAKKAQICQTKVTYLGYILSEGKRWLTPGRIETVARIPPPRNPREVREFLGKAGFCRLFIPGFAELAAPLYALTKPSTPFTWQTEHQLAFEALKKALLSAPALGLPDTSKPFTLFLDERQGIAKGVLTQKLGPWKRPVAYLSKKLDPVAAGWPPCLRIMAATAMLVKDSAKLTLGQPLTVITPHTLEAIVRQPPDRWITNARLTHYQALLLDTDRVQFGPPVTLNPATLLPVPENQPSPHDCRQVLAETHGTREDLKDQELPDADHTWYTDGSSYLDSGTRRAGAAVVDGHNTIWAQSLPPGTSAQKAELIALTKALELSKGKKANIYTDSRYAFATAHTHGSIYERRGWLTSEGKEIKNKAEIIALLKALFLPQEVAIIHCPGHQKGQDPVAVGNRQADRVARQAAMAEVLTLATEPDNTSHITAGKRTADGSEFEKRTADGSEFESPKKKAKVE

SEQ ID NO: 2023 - protein, 2094 aa, synthetic construct
MPAAKRVKLDGGDKKYSIGLDIGTNSVGWAVITDEYKVPSKKFKVLGNTDRHSIKKNLIGALLFDSGETAEATRLKRTARRRYTRRKNRICYLQEIFSNEMAKVDDSFFHRLEESFLVEEDKKHERHPIFGNIVDEVAYHEKYPTIYHLRKKLVDSTDKADLRLIYLALAHMIKFRGHFLIEGDLNPDNSDVDKLFIQLVQTYNQLFEENPINASGVDAKAILSARLSKSRRLENLIAQLPGEKKNGLFGNLIALSLGLTPNFKSNFDLAEDAKLQLSKDTYDDDLDNLLAQIGDQYADLFLAAKNLSDAILLSDILRVNTEITKAPLSASMIKRYDEHHQDLTLLKALVRQQLPEKYKEIFFDQSKNGYAGYIDGGASQEEFYKFIKPILEKMDGTEELLVKLNREDLLRKQRTFDNGSIPHQIHLGELHAILRRQEDFYPFLKDNREKIEKILTFRIPYYVGPLARGNSRFAWMTRKSEETITPWNFEEVVDKGASAQSFIERMTNFDKNLPNEKVLPKHSLLYEYFTVYNELTKVKYVTEGMRKPAFLSGEQKKAIVDLLFKTNRKVTVKQLKEDYFKKIECFDSVEISGVEDRFNASLGTYHDLLKIIKDKDFLDNEENEDILEDIVLTLTLFEDREMIEERLKTYAHLFDDKVMKQLKRRRYTGWGRLSRKLINGIRDKQSGKTILDFLKSDGFANRNFMQLIHDDSLTFKEDIQKAQVSGQGDSLHEHIANLAGSPAIKKGILQTVKVVDELVKVMGRHKPENIVIEMARENQTTQKGQKNSRERMKRIEEGIKELGSQILKEHPVENTQLQNEKLYLYYLQNGRDMYVDQELDINRLSDYDVDHIVPQSFLKDDSIDNKVLTRSDKARGKSDNVPSEEVVKKMKNYWRQLLNAKLITQRKFDNLTKAERGGLSELDKAGFIKRQLVETRQITKHVAQILDSRMNTKYDENDKLIREVKVITLKSKLVSDFRKDFQFYKVREINNYHHAHDAYLNAVVGTALIKKYPKLESEFVYGDYKVYDVRKMIAKSEQEIGKATAKYFFYSNIMNFFKTEITLANGEIRKRPLIETNGETGEIVWDKGRDFATVRKVLSMPQVNIVKKTEVQTGGFSKESILPKRNSDKLIARKKDWDPKKYGGFDSPTVAYSVLVVAKVEKGKSKKLKSVKELLGITIMERSSFEKNPIDFLEAKGYKEVKKDLIIKLPKYSLFELENGRKRMLASAGELQKGNELALPSKYVNFLYLASHYEKLKGSPEDNEQKQLFVEQHKHYLDEIIEQISEFSKRVILADANLDKVLSAYNKHRDKPIREQAENIIHLFTLTNLGAPAAFKYFDTTIDRKRYTSTKEVLDATLIHQSITGLYETRIDLSQLGGDGGPAPGGTVSLQDEHRLFDIPVTTSLPDVWLQDFPQAWAETGGLGRAKCQAPIIIDLKPTAVPVSIKQYPMSLEAHMGIRQHIIKFLELGVLRPCRSPWNTPLLPVKKPGTQDYRPVQDLREINKRTVDIHPTVPNPYNLLSTLKPDYSWYTVLDLKDAFFCLPLAPQSQELFAFEWKDPERGISGQLTWTRLPQGFKNSPTLFNEALHRDLTDFRTQHPEVTLLQYVDDLLLAAPTKKACTQGTRHLLQELGEKGYRASAKKAQICQTKVTYLGYILSEGKRWLTPGRIETVARIPPPRNPREVREFLGKAGFCRLFIPGFAELAAPLYALTKPSTPFTWQTEHQLAFEALKKALLSAPALGLPDTSKPFTLFLDERQGIAKGVLTQKLGPWKRPVAYLSKKLDPVAAGWPPCLRIMAATAMLVKDSAKLTLGQPLTVITPHTLEAIVRQPPDRWITNARLTHYQALLLDTDRVQFGPPVTLNPATLLPVPENQPSPHDCRQVLAETHGTREDLKDQELPDADHTWYTDGSSYLDSGTRRAGAAVVDGHNTIWAQSLPPGTSAQKAELIALTKALELSKGKKANIYTDSRYAFATAHTHGSIYERRGWLTSEGKEIKNKAEIIALLKALFLPQEVAIIHCPGHQKGQDPVAVGNRQADRVARQAAMAEVLTLATEPDNTSHITAGKRTADGSEFEKRTADGSEFESPKKKAKVE

SEQ ID NO: 2024 - protein, 2097 aa, synthetic construct
MPAAKRVKLDGGDKKYSIGLDIGTNSVGWAVITDEYKVPSKKFKVLGNTDRHSIKKNLIGALLFDSGETAEATRLKRTARRRYTRRKNRICYLQEIFSNEMAKVDDSFFHRLEESFLVEEDKKHERHPIFGNIVDEVAYHEKYPTIYHLRKKLVDSTDKADLRLIYLALAHMIKFRGHFLIEGDLNPDNSDVDKLFIQLVQTYNQLFEENPINASGVDAKAILSARLSKSRRLENLIAQLPGEKKNGLFGNLIALSLGLTPNFKSNFDLAEDAKLQLSKDTYDDDLDNLLAQIGDQYADLFLAAKNLSDAILLSDILRVNTEITKAPLSASMIKRYDEHHQDLTLLKALVRQQLPEKYKEIFFDQSKNGYAGYIDGGASQEEFYKFIKPILEKMDGTEELLVKLNREDLLRKQRTFDNGSIPHQIHLGELHAILRRQEDFYPFLKDNREKIEKILTFRIPYYVGPLARGNSRFAWMTRKSEETITPWNFEEVVDKGASAQSFIERMTNFDKNLPNEKVLPKHSLLYEYFTVYNELTKVKYVTEGMRKPAFLSGEQKKAIVDLLFKTNRKVTVKQLKEDYFKKIECFDSVEISGVEDRFNASLGTYHDLLKIIKDKDFLDNEENEDILEDIVLTLTLFEDREMIEERLKTYAHLFDDKVMKQLKRRRYTGWGRLSRKLINGIRDKQSGKTILDFLKSDGFANRNFMQLIHDDSLTFKEDIQKAQVSGQGDSLHEHIANLAGSPAIKKGILQTVKVVDELVKVMGRHKPENIVIEMARENQTTQKGQKNSRERMKRIEEGIKELGSQILKEHPVENTQLQNEKLYLYYLQNGRDMYVDQELDINRLSDYDVDHIVPQSFLKDDSIDNKVLTRSDKARGKSDNVPSEEVVKKMKNYWRQLLNAKLITQRKFDNLTKAERGGLSELDKAGFIKRQLVETRQITKHVAQILDSRMNTKYDENDKLIREVKVITLKSKLVSDFRKDFQFYKVREINNYHHAHDAYLNAVVGTALIKKYPKLESEFVYGDYKVYDVRKMIAKSEQEIGKATAKYFFYSNIMNFFKTEITLANGEIRKRPLIETNGETGEIVWDKGRDFATVRKVLSMPQVNIVKKTEVQTGGFSKESILPKRNSDKLIARKKDWDPKKYGGFDSPTVAYSVLVVAKVEKGKSKKLKSVKELLGITIMERSSFEKNPIDFLEAKGYKEVKKDLIIKLPKYSLFELENGRKRMLASAGELQKGNELALPSKYVNFLYLASHYEKLKGSPEDNEQKQLFVEQHKHYLDEIIEQISEFSKRVILADANLDKVLSAYNKHRDKPIREQAENIIHLFTLTNLGAPAAFKYFDTTIDRKRYTSTKEVLDATLIHQSITGLYETRIDLSQLGGDGGGGSGGSGGTVSLQDEHRLFDIPVTTSLPDVWLQDFPQAWAETGGLGRAKCQAPIIIDLKPTAVPVSIKQYPMSLEAHMGIRQHIIKFLELGVLRPCRSPWNTPLLPVKKPGTQDYRPVQDLREINKRTVDIHPTVPNPYNLLSTLKPDYSWYTVLDLKDAFFCLPLAPQSQELFAFEWKDPERGISGQLTWTRLPQGFKNSPTLFNEALHRDLTDFRTQHPEVTLLQYVDDLLLAAPTKKACTQGTRHLLQELGEKGYRASAKKAQICQTKVTYLGYILSEGKRWLTPGRIETVARIPPPRNPREVREFLGKAGFCRLFIPGFAELAAPLYALTKPSTPFTWQTEHQLAFEALKKALLSAPALGLPDTSKPFTLFLDERQGIAKGVLTQKLGPWKRPVAYLSKKLDPVAAGWPPCLRIMAATAMLVKDSAKLTLGQPLTVITPHTLEAIVRQPPDRWITNARLTHYQALLLDTDRVQFGPPVTLNPATLLPVPENQPSPHDCRQVLAETHGTREDLKDQELPDADHTWYTDGSSYLDSGTRRAGAAVVDGHNTIWAQSLPPGTSAQKAELIALTKALELSKGKKANIYTDSRYAFATAHTHGSIYERRGWLTSEGKEIKNKAEIIALLKALFLPQEVAIIHCPGHQKGQDPVAVGNRQADRVARQAAMAEVLTLATEPDNTSHITAGKRTADGSEFEKRTADGSEFESPKKKAKVE

SEQ ID NO: 2025 - protein, 2102 aa, synthetic construct
MPAAKRVKLDGGDKKYSIGLDIGTNSVGWAVITDEYKVPSKKFKVLGNTDRHSIKKNLIGALLFDSGETAEATRLKRTARRRYTRRKNRICYLQEIFSNEMAKVDDSFFHRLEESFLVEEDKKHERHPIFGNIVDEVAYHEKYPTIYHLRKKLVDSTDKADLRLIYLALAHMIKFRGHFLIEGDLNPDNSDVDKLFIQLVQTYNQLFEENPINASGVDAKAILSARLSKSRRLENLIAQLPGEKKNGLFGNLIALSLGLTPNFKSNFDLAEDAKLQLSKDTYDDDLDNLLAQIGDQYADLFLAAKNLSDAILLSDILRVNTEITKAPLSASMIKRYDEHHQDLTLLKALVRQQLPEKYKEIFFDQSKNGYAGYIDGGASQEEFYKFIKPILEKMDGTEELLVKLNREDLLRKQRTFDNGSIPHQIHLGELHAILRRQEDFYPFLKDNREKIEKILTFRIPYYVGPLARGNSRFAWMTRKSEETITPWNFEEVVDKGASAQSFIERMTNFDKNLPNEKVLPKHSLLYEYFTVYNELTKVKYVTEGMRKPAFLSGEQKKAIVDLLFKTNRKVTVKQLKEDYFKKIECFDSVEISGVEDRFNASLGTYHDLLKIIKDKDFLDNEENEDILEDIVLTLTLFEDREMIEERLKTYAHLFDDKVMKQLKRRRYTGWGRLSRKLINGIRDKQSGKTILDFLKSDGFANRNFMQLIHDDSLTFKEDIQKAQVSGQGDSLHEHIANLAGSPAIKKGILQTVKVVDELVKVMGRHKPENIVIEMARENQTTQKGQKNSRERMKRIEEGIKELGSQILKEHPVENTQLQNEKLYLYYLQNGRDMYVDQELDINRLSDYDVDHIVPQSFLKDDSIDNKVLTRSDKARGKSDNVPSEEVVKKMKNYWRQLLNAKLITQRKFDNLTKAERGGLSELDKAGFIKRQLVETRQITKHVAQILDSRMNTKYDENDKLIREVKVITLKSKLVSDFRKDFQFYKVREINNYHHAHDAYLNAVVGTALIKKYPKLESEFVYGDYKVYDVRKMIAKSEQEIGKATAKYFFYSNIMNFFKTEITLANGEIRKRPLIETNGETGEIVWDKGRDFATVRKVLSMPQVNIVKKTEVQTGGFSKESILPKRNSDKLIARKKDWDPKKYGGFDSPTVAYSVLVVAKVEKGKSKKLKSVKELLGITIMERSSFEKNPIDFLEAKGYKEVKKDLIIKLPKYSLFELENGRKRMLASAGELQKGNELALPSKYVNFLYLASHYEKLKGSPEDNEQKQLFVEQHKHYLDEIIEQISEFSKRVILADANLDKVLSAYNKHRDKPIREQAENIIHLFTLTNLGAPAAFKYFDTTIDRKRYTSTKEVLDATLIHQSITGLYETRIDLSQLGGDGGGSSGGSEAAAKGGTVSLQDEHRLFDIPVTTSLPDVWLQDFPQAWAETGGLGRAKCQAPIIIDLKPTAVPVSIKQYPMSLEAHMGIRQHIIKFLELGVLRPCRSPWNTPLLPVKKPGTQDYRPVQDLREINKRTVDIHPTVPNPYNLLSTLKPDYSWYTVLDLKDAFFCLPLAPQSQELFAFEWKDPERGISGQLTWTRLPQGFKNSPTLFNEALHRDLTDFRTQHPEVTLLQYVDDLLLAAPTKKACTQGTRHLLQELGEKGYRASAKKAQICQTKVTYLGYILSEGKRWLTPGRIETVARIPPPRNPREVREFLGKAGFCRLFIPGFAELAAPLYALTKPSTPFTWQTEHQLAFEALKKALLSAPALGLPDTSKPFTLFLDERQGIAKGVLTQKLGPWKRPVAYLSKKLDPVAAGWPPCLRIMAATAMLVKDSAKLTLGQPLTVITPHTLEAIVRQPPDRWITNARLTHYQALLLDTDRVQFGPPVTLNPATLLPVPENQPSPHDCRQVLAETHGTREDLKDQELPDADHTWYTDGSSYLDSGTRRAGAAVVDGHNTIWAQSLPPGTSAQKAELIALTKALELSKGKKANIYTDSRYAFATAHTHGSIYERRGWLTSEGKEIKNKAEIIALLKALFLPQEVAIIHCPGHQKGQDPVAVGNRQADRVARQAAMAEVLTLATEPDNTSHITAGKRTADGSEFEKRTADGSEFESPKKKAKVE

SEQ ID NO: 2026 - protein, 2100 aa, synthetic construct
MPAAKRVKLDGGDKKYSIGLDIGTNSVGWAVITDEYKVPSKKFKVLGNTDRHSIKKNLIGALLFDSGETAEATRLKRTARRRYTRRKNRICYLQEIFSNEMAKVDDSFFHRLEESFLVEEDKKHERHPIFGNIVDEVAYHEKYPTIYHLRKKLVDSTDKADLRLIYLALAHMIKFRGHFLIEGDLNPDNSDVDKLFIQLVQTYNQLFEENPINASGVDAKAILSARLSKSRRLENLIAQLPGEKKNGLFGNLIALSLGLTPNFKSNFDLAEDAKLQLSKDTYDDDLDNLLAQIGDQYADLFLAAKNLSDAILLSDILRVNTEITKAPLSASMIKRYDEHHQDLTLLKALVRQQLPEKYKEIFFDQSKNGYAGYIDGGASQEEFYKFIKPILEKMDGTEELLVKLNREDLLRKQRTFDNGSIPHQIHLGELHAILRRQEDFYPFLKDNREKIEKILTFRIPYYVGPLARGNSRFAWMTRKSEETITPWNFEEVVDKGASAQSFIERMTNFDKNLPNEKVLPKHSLLYEYFTVYNELTKVKYVTEGMRKPAFLSGEQKKAIVDLLFKTNRKVTVKQLKEDYFKKIECFDSVEISGVEDRFNASLGTYHDLLKIIKDKDFLDNEENEDILEDIVLTLTLFEDREMIEERLKTYAHLFDDKVMKQLKRRRYTGWGRLSRKLINGIRDKQSGKTILDFLKSDGFANRNFMQLIHDDSLTFKEDIQKAQVSGQGDSLHEHIANLAGSPAIKKGILQTVKVVDELVKVMGRHKPENIVIEMARENQTTQKGQKNSRERMKRIEEGIKELGSQILKEHPVENTQLQNEKLYLYYLQNGRDMYVDQELDINRLSDYDVDHIVPQSFLKDDSIDNKVLTRSDKARGKSDNVPSEEVVKKMKNYWRQLLNAKLITQRKFDNLTKAERGGLSELDKAGFIKRQLVETRQITKHVAQILDSRMNTKYDENDKLIREVKVITLKSKLVSDFRKDFQFYKVREINNYHHAHDAYLNAVVGTALIKKYPKLESEFVYGDYKVYDVRKMIAKSEQEIGKATAKYFFYSNIMNFFKTEITLANGEIRKRPLIETNGETGEIVWDKGRDFATVRKVLSMPQVNIVKKTEVQTGGFSKESILPKRNSDKLIARKKDWDPKKYGGFDSPTVAYSVLVVAKVEKGKSKKLKSVKELLGITIMERSSFEKNPIDFLEAKGYKEVKKDLIIKLPKYSLFELENGRKRMLASAGELQKGNELALPSKYVNFLYLASHYEKLKGSPEDNEQKQLFVEQHKHYLDEIIEQISEFSKRVILADANLDKVLSAYNKHRDKPIREQAENIIHLFTLTNLGAPAAFKYFDTTIDRKRYTSTKEVLDATLIHQSITGLYETRIDLSQLGGDGGGGGGGSGSSGGTVSLQDEHRLFDIPVTTSLPDVWLQDFPQAWAETGGLGRAKCQAPIIIDLKPTAVPVSIKQYPMSLEAHMGIRQHIIKFLELGVLRPCRSPWNTPLLPVKKPGTQDYRPVQDLREINKRTVDIHPTVPNPYNLLSTLKPDYSWYTVLDLKDAFFCLPLAPQSQELFAFEWKDPERGISGQLTWTRLPQGFKNSPTLFNEALHRDLTDFRTQHPEVTLLQYVDDLLLAAPTKKACTQGTRHLLQELGEKGYRASAKKAQICQTKVTYLGYILSEGKRWLTPGRIETVARIPPPRNPREVREFLGKAGFCRLFIPGFAELAAPLYALTKPSTPFTWQTEHQLAFEALKKALLSAPALGLPDTSKPFTLFLDERQGIAKGVLTQKLGPWKRPVAYLSKKLDPVAAGWPPCLRIMAATAMLVKDSAKLTLGQPLTVITPHTLEAIVRQPPDRWITNARLTHYQALLLDTDRVQFGPPVTLNPATLLPVPENQPSPHDCRQVLAETHGTREDLKDQELPDADHTWYTDGSSYLDSGTRRAGAAVVDGHNTIWAQSLPPGTSAQKAELIALTKALELSKGKKANIYTDSRYAFATAHTHGSIYERRGWLTSEGKEIKNKAEIIALLKALFLPQEVAIIHCPGHQKGQDPVAVGNRQADRVARQAAMAEVLTLATEPDNTSHITAGKRTADGSEFEKRTADGSEFESPKKKAKVE

SEQ ID NO: 2027 - protein, 2102 aa, synthetic construct
MPAAKRVKLDGGDKKYSIGLDIGTNSVGWAVITDEYKVPSKKFKVLGNTDRHSIKKNLIGALLFDSGETAEATRLKRTARRRYTRRKNRICYLQEIFSNEMAKVDDSFFHRLEESFLVEEDKKHERHPIFGNIVDEVAYHEKYPTIYHLRKKLVDSTDKADLRLIYLALAHMIKFRGHFLIEGDLNPDNSDVDKLFIQLVQTYNQLFEENPINASGVDAKAILSARLSKSRRLENLIAQLPGEKKNGLFGNLIALSLGLTPNFKSNFDLAEDAKLQLSKDTYDDDLDNLLAQIGDQYADLFLAAKNLSDAILLSDILRVNTEITKAPLSASMIKRYDEHHQDLTLLKALVRQQLPEKYKEIFFDQSKNGYAGYIDGGASQEEFYKFIKPILEKMDGTEELLVKLNREDLLRKQRTFDNGSIPHQIHLGELHAILRRQEDFYPFLKDNREKIEKILTFRIPYYVGPLARGNSRFAWMTRKSEETITPWNFEEVVDKGASAQSFIERMTNFDKNLPNEKVLPKHSLLYEYFTVYNELTKVKYVTEGMRKPAFLSGEQKKAIVDLLFKTNRKVTVKQLKEDYFKKIECFDSVEISGVEDRFNASLGTYHDLLKIIKDKDFLDNEENEDILEDIVLTLTLFEDREMIEERLKTYAHLFDDKVMKQLKRRRYTGWGRLSRKLINGIRDKQSGKTILDFLKSDGFANRNFMQLIHDDSLTFKEDIQKAQVSGQGDSLHEHIANLAGSPAIKKGILQTVKVVDELVKVMGRHKPENIVIEMARENQTTQKGQKNSRERMKRIEEGIKELGSQILKEHPVENTQLQNEKLYLYYLQNGRDMYVDQELDINRLSDYDVDHIVPQSFLKDDSIDNKVLTRSDKARGKSDNVPSEEVVKKMKNYWRQLLNAKLITQRKFDNLTKAERGGLSELDKAGFIKRQLVETRQITKHVAQILDSRMNTKYDENDKLIREVKVITLKSKLVSDFRKDFQFYKVREINNYHHAHDAYLNAVVGTALIKKYPKLESEFVYGDYKVYDVRKMIAKSEQEIGKATAKYFFYSNIMNFFKTEITLANGEIRKRPLIETNGETGEIVWDKGRDFATVRKVLSMPQVNIVKKTEVQTGGFSKESILPKRNSDKLIARKKDWDPKKYGGFDSPTVAYSVLVVAKVEKGKSKKLKSVKELLGITIMERSSFEKNPIDFLEAKGYKEVKKDLIIKLPKYSLFELENGRKRMLASAGELQKGNELALPSKYVNFLYLASHYEKLKGSPEDNEQKQLFVEQHKHYLDEIIEQISEFSKRVILADANLDKVLSAYNKHRDKPIREQAENIIHLFTLTNLGAPAAFKYFDTTIDRKRYTSTKEVLDATLIHQSITGLYETRIDLSQLGGDGGEAAAKGGSPAPGGTVSLQDEHRLFDIPVTTSLPDVWLQDFPQAWAETGGLGRAKCQAPIIIDLKPTAVPVSIKQYPMSLEAHMGIRQHIIKFLELGVLRPCRSPWNTPLLPVKKPGTQDYRPVQDLREINKRTVDIHPTVPNPYNLLSTLKPDYSWYTVLDLKDAFFCLPLAPQSQELFAFEWKDPERGISGQLTWTRLPQGFKNSPTLFNEALHRDLTDFRTQHPEVTLLQYVDDLLLAAPTKKACTQGTRHLLQELGEKGYRASAKKAQICQTKVTYLGYILSEGKRWLTPGRIETVARIPPPRNPREVREFLGKAGFCRLFIPGFAELAAPLYALTKPSTPFTWQTEHQLAFEALKKALLSAPALGLPDTSKPFTLFLDERQGIAKGVLTQKLGPWKRPVAYLSKKLDPVAAGWPPCLRIMAATAMLVKDSAKLTLGQPLTVITPHTLEAIVRQPPDRWITNARLTHYQALLLDTDRVQFGPPVTLNPATLLPVPENQPSPHDCRQVLAETHGTREDLKDQELPDADHTWYTDGSSYLDSGTRRAGAAVVDGHNTIWAQSLPPGTSAQKAELIALTKALELSKGKKANIYTDSRYAFATAHTHGSIYERRGWLTSEGKEIKNKAEIIALLKALFLPQEVAIIHCPGHQKGQDPVAVGNRQADRVARQAAMAEVLTLATEPDNTSHITAGKRTADGSEFEKRTADGSEFESPKKKAKVE

SEQ ID NO: 2028 - protein, 2102 aa, synthetic construct
MPAAKRVKLDGGDKKYSIGLDIGTNSVGWAVITDEYKVPSKKFKVLGNTDRHSIKKNLIGALLFDSGETAEATRLKRTARRRYTRRKNRICYLQEIFSNEMAKVDDSFFHRLEESFLVEEDKKHERHPIFGNIVDEVAYHEKYPTIYHLRKKLVDSTDKADLRLIYLALAHMIKFRGHFLIEGDLNPDNSDVDKLFIQLVQTYNQLFEENPINASGVDAKAILSARLSKSRRLENLIAQLPGEKKNGLFGNLIALSLGLTPNFKSNFDLAEDAKLQLSKDTYDDDLDNLLAQIGDQYADLFLAAKNLSDAILLSDILRVNTEITKAPLSASMIKRYDEHHQDLTLLKALVRQQLPEKYKEIFFDQSKNGYAGYIDGGASQEEFYKFIKPILEKMDGTEELLVKLNREDLLRKQRTFDNGSIPHQIHLGELHAILRRQEDFYPFLKDNREKIEKILTFRIPYYVGPLARGNSRFAWMTRKSEETITPWNFEEVVDKGASAQSFIERMTNFDKNLPNEKVLPKHSLLYEYFTVYNELTKVKYVTEGMRKPAFLSGEQKKAIVDLLFKTNRKVTVKQLKEDYFKKIECFDSVEISGVEDRFNASLGTYHDLLKIIKDKDFLDNEENEDILEDIVLTLTLFEDREMIEERLKTYAHLFDDKVMKQLKRRRYTGWGRLSRKLINGIRDKQSGKTILDFLKSDGFANRNFMQLIHDDSLTFKEDIQKAQVSGQGDSLHEHIANLAGSPAIKKGILQTVKVVDELVKVMGRHKPENIVIEMARENQTTQKGQKNSRERMKRIEEGIKELGSQILKEHPVENTQLQNEKLYLYYLQNGRDMYVDQELDINRLSDYDVDHIVPQSFLKDDSIDNKVLTRSDKARGKSDNVPSEEVVKKMKNYWRQLLNAKLITQRKFDNLTKAERGGLSELDKAGFIKRQLVETRQITKHVAQILDSRMNTKYDENDKLIREVKVITLKSKLVSDFRKDFQFYKVREINNYHHAHDAYLNAVVGTALIKKYPKLESEFVYGDYKVYDVRKMIAKSEQEIGKATAKYFFYSNIMNFFKTEITLANGEIRKRPLIETNGETGEIVWDKGRDFATVRKVLSMPQVNIVKKTEVQTGGFSKESILPKRNSDKLIARKKDWDPKKYGGFDSPTVAYSVLVVAKVEKGKSKKLKSVKELLGITIMERSSFEKNPIDFLEAKGYKEVKKDLIIKLPKYSLFELENGRKRMLASAGELQKGNELALPSKYVNFLYLASHYEKLKGSPEDNEQKQLFVEQHKHYLDEIIEQISEFSKRVILADANLDKVLSAYNKHRDKPIREQAENIIHLFTLTNLGAPAAFKYFDTTIDRKRYTSTKEVLDATLIHQSITGLYETRIDLSQLGGDGGEAAAKPAPGGSGGTVSLQDEHRLFDIPVTTSLPDVWLQDFPQAWAETGGLGRAKCQAPIIIDLKPTAVPVSIKQYPMSLEAHMGIRQHIIKFLELGVLRPCRSPWNTPLLPVKKPGTQDYRPVQDLREINKRTVDIHPTVPNPYNLLSTLKPDYSWYTVLDLKDAFFCLPLAPQSQELFAFEWKDPERGISGQLTWTRLPQGFKNSPTLFNEALHRDLTDFRTQHPEVTLLQYVDDLLLAAPTKKACTQGTRHLLQELGEKGYRASAKKAQICQTKVTYLGYILSEGKRWLTPGRIETVARIPPPRNPREVREFLGKAGFCRLFIPGFAELAAPLYALTKPSTPFTWQTEHQLAFEALKKALLSAPALGLPDTSKPFTLFLDERQGIAKGVLTQKLGPWKRPVAYLSKKLDPVAAGWPPCLRIMAATAMLVKDSAKLTLGQPLTVITPHTLEAIVRQPPDRWITNARLTHYQALLLDTDRVQFGPPVTLNPATLLPVPENQPSPHDCRQVLAETHGTREDLKDQELPDADHTWYTDGSSYLDSGTRRAGAAVVDGHNTIWAQSLPPGTSAQKAELIALTKALELSKGKKANIYTDSRYAFATAHTHGSIYERRGWLTSEGKEIKNKAEIIALLKALFLPQEVAIIHCPGHQKGQDPVAVGNRQADRVARQAAMAEVLTLATEPDNTSHITAGKRTADGSEFEKRTADGSEFESPKKKAKVE

SEQ ID NO: 2029 - protein, 2097 aa, synthetic construct
MPAAKRVKLDGGDKKYSIGLDIGTNSVGWAVITDEYKVPSKKFKVLGNTDRHSIKKNLIGALLFDSGETAEATRLKRTARRRYTRRKNRICYLQEIFSNEMAKVDDSFFHRLEESFLVEEDKKHERHPIFGNIVDEVAYHEKYPTIYHLRKKLVDSTDKADLRLIYLALAHMIKFRGHFLIEGDLNPDNSDVDKLFIQLVQTYNQLFEENPINASGVDAKAILSARLSKSRRLENLIAQLPGEKKNGLFGNLIALSLGLTPNFKSNFDLAEDAKLQLSKDTYDDDLDNLLAQIGDQYADLFLAAKNLSDAILLSDILRVNTEITKAPLSASMIKRYDEHHQDLTLLKALVRQQLPEKYKEIFFDQSKNGYAGYIDGGASQEEFYKFIKPILEKMDGTEELLVKLNREDLLRKQRTFDNGSIPHQIHLGELHAILRRQEDFYPFLKDNREKIEKILTFRIPYYVGPLARGNSRFAWMTRKSEETITPWNFEEVVDKGASAQSFIERMTNFDKNLPNEKVLPKHSLLYEYFTVYNELTKVKYVTEGMRKPAFLSGEQKKAIVDLLFKTNRKVTVKQLKEDYFKKIECFDSVEISGVEDRFNASLGTYHDLLKIIKDKDFLDNEENEDILEDIVLTLTLFEDREMIEERLKTYAHLFDDKVMKQLKRRRYTGWGRLSRKLINGIRDKQSGKTILDFLKSDGFANRNFMQLIHDDSLTFKEDIQKAQVSGQGDSLHEHIANLAGSPAIKKGILQTVKVVDELVKVMGRHKPENIVIEMARENQTTQKGQKNSRERMKRIEEGIKELGSQILKEHPVENTQLQNEKLYLYYLQNGRDMYVDQELDINRLSDYDVDHIVPQSFLKDDSIDNKVLTRSDKARGKSDNVPSEEVVKKMKNYWRQLLNAKLITQRKFDNLTKAERGGLSELDKAGFIKRQLVETRQITKHVAQILDSRMNTKYDENDKLIREVKVITLKSKLVSDFRKDFQFYKVREINNYHHAHDAYLNAVVGTALIKKYPKLESEFVYGDYKVYDVRKMIAKSEQEIGKATAKYFFYSNIMNFFKTEITLANGEIRKRPLIETNGETGEIVWDKGRDFATVRKVLSMPQVNIVKKTEVQTGGFSKESILPKRNSDKLIARKKDWDPKKYGGFDSPTVAYSVLVVAKVEKGKSKKLKSVKELLGITIMERSSFEKNPIDFLEAKGYKEVKKDLIIKLPKYSLFELENGRKRMLASAGELQKGNELALPSKYVNFLYLASHYEKLKGSPEDNEQKQLFVEQHKHYLDEIIEQISEFSKRVILADANLDKVLSAYNKHRDKPIREQAENIIHLFTLTNLGAPAAFKYFDTTIDRKRYTSTKEVLDATLIHQSITGLYETRIDLSQLGGDGGGGGGGSGGTVSLQDEHRLFDIPVTTSLPDVWLQDFPQAWAETGGLGRAKCQAPIIIDLKPTAVPVSIKQYPMSLEAHMGIRQHIIKFLELGVLRPCRSPWNTPLLPVKKPGTQDYRPVQDLREINKRTVDIHPTVPNPYNLLSTLKPDYSWYTVLDLKDAFFCLPLAPQSQELFAFEWKDPERGISGQLTWTRLPQGFKNSPTLFNEALHRDLTDFRTQHPEVTLLQYVDDLLLAAPTKKACTQGTRHLLQELGEKGYRASAKKAQICQTKVTYLGYILSEGKRWLTPGRIETVARIPPPRNPREVREFLGKAGFCRLFIPGFAELAAPLYALTKPSTPFTWQTEHQLAFEALKKALLSAPALGLPDTSKPFTLFLDERQGIAKGVLTQKLGPWKRPVAYLSKKLDPVAAGWPPCLRIMAATAMLVKDSAKLTLGQPLTVITPHTLEAIVRQPPDRWITNARLTHYQALLLDTDRVQFGPPVTLNPATLLPVPENQPSPHDCRQVLAETHGTREDLKDQELPDADHTWYTDGSSYLDSGTRRAGAAVVDGHNTIWAQSLPPGTSAQKAELIALTKALELSKGKKANIYTDSRYAFATAHTHGSIYERRGWLTSEGKEIKNKAEIIALLKALFLPQEVAIIHCPGHQKGQDPVAVGNRQADRVARQAAMAEVLTLATEPDNTSHITAGKRTADGSEFEKRTADGSEFESPKKKAKVE

SEQ ID NO: 2030 - protein, 2100 aa, synthetic construct
MPAAKRVKLDGGDKKYSIGLDIGTNSVGWAVITDEYKVPSKKFKVLGNTDRHSIKKNLIGALLFDSGETAEATRLKRTARRRYTRRKNRICYLQEIFSNEMAKVDDSFFHRLEESFLVEEDKKHERHPIFGNIVDEVAYHEKYPTIYHLRKKLVDSTDKADLRLIYLALAHMIKFRGHFLIEGDLNPDNSDVDKLFIQLVQTYNQLFEENPINASGVDAKAILSARLSKSRRLENLIAQLPGEKKNGLFGNLIALSLGLTPNFKSNFDLAEDAKLQLSKDTYDDDLDNLLAQIGDQYADLFLAAKNLSDAILLSDILRVNTEITKAPLSASMIKRYDEHHQDLTLLKALVRQQLPEKYKEIFFDQSKNGYAGYIDGGASQEEFYKFIKPILEKMDGTEELLVKLNREDLLRKQRTFDNGSIPHQIHLGELHAILRRQEDFYPFLKDNREKIEKILTFRIPYYVGPLARGNSRFAWMTRKSEETITPWNFEEVVDKGASAQSFIERMTNFDKNLPNEKVLPKHSLLYEYFTVYNELTKVKYVTEGMRKPAFLSGEQKKAIVDLLFKTNRKVTVKQLKEDYFKKIECFDSVEISGVEDRFNASLGTYHDLLKIIKDKDFLDNEENEDILEDIVLTLTLFEDREMIEERLKTYAHLFDDKVMKQLKRRRYTGWGRLSRKLINGIRDKQSGKTILDFLKSDGFANRNFMQLIHDDSLTFKEDIQKAQVSGQGDSLHEHIANLAGSPAIKKGILQTVKVVDELVKVMGRHKPENIVIEMARENQTTQKGQKNSRERMKRIEEGIKELGSQILKEHPVENTQLQNEKLYLYYLQNGRDMYVDQELDINRLSDYDVDHIVPQSFLKDDSIDNKVLTRSDKARGKSDNVPSEEVVKKMKNYWRQLLNAKLITQRKFDNLTKAERGGLSELDKAGFIKRQLVETRQITKHVAQILDSRMNTKYDENDKLIREVKVITLKSKLVSDFRKDFQFYKVREINNYHHAHDAYLNAVVGTALIKKYPKLESEFVYGDYKVYDVRKMIAKSEQEIGKATAKYFFYSNIMNFFKTEITLANGEIRKRPLIETNGETGEIVWDKGRDFATVRKVLSMPQVNIVKKTEVQTGGFSKESILPKRNSDKLIARKKDWDPKKYGGFDSPTVAYSVLVVAKVEKGKSKKLKSVKELLGITIMERSSFEKNPIDFLEAKGYKEVKKDLIIKLPKYSLFELENGRKRMLASAGELQKGNELALPSKYVNFLYLASHYEKLKGSPEDNEQKQLFVEQHKHYLDEIIEQISEFSKRVILADANLDKVLSAYNKHRDKPIREQAENIIHLFTLTNLGAPAAFKYFDTTIDRKRYTSTKEVLDATLIHQSITGLYETRIDLSQLGGDGGGGSGGSGGSGGTVSLQDEHRLFDIPVTTSLPDVWLQDFPQAWAETGGLGRAKCQAPIIIDLKPTAVPVSIKQYPMSLEAHMGIRQHIIKFLELGVLRPCRSPWNTPLLPVKKPGTQDYRPVQDLREINKRTVDIHPTVPNPYNLLSTLKPDYSWYTVLDLKDAFFCLPLAPQSQELFAFEWKDPERGISGQLTWTRLPQGFKNSPTLFNEALHRDLTDFRTQHPEVTLLQYVDDLLLAAPTKKACTQGTRHLLQELGEKGYRASAKKAQICQTKVTYLGYILSEGKRWLTPGRIETVARIPPPRNPREVREFLGKAGFCRLFIPGFAELAAPLYALTKPSTPFTWQTEHQLAFEALKKALLSAPALGLPDTSKPFTLFLDERQGIAKGVLTQKLGPWKRPVAYLSKKLDPVAAGWPPCLRIMAATAMLVKDSAKLTLGQPLTVITPHTLEAIVRQPPDRWITNARLTHYQALLLDTDRVQFGPPVTLNPATLLPVPENQPSPHDCRQVLAETHGTREDLKDQELPDADHTWYTDGSSYLDSGTRRAGAAVVDGHNTIWAQSLPPGTSAQKAELIALTKALELSKGKKANIYTDSRYAFATAHTHGSIYERRGWLTSEGKEIKNKAEIIALLKALFLPQEVAIIHCPGHQKGQDPVAVGNRQADRVARQAAMAEVLTLATEPDNTSHITAGKRTADGSEFEKRTADGSEFESPKKKAKVE

SEQ ID NO: 2031 - protein, 2097 aa, synthetic construct
MPAAKRVKLDGGDKKYSIGLDIGTNSVGWAVITDEYKVPSKKFKVLGNTDRHSIKKNLIGALLFDSGETAEATRLKRTARRRYTRRKNRICYLQEIFSNEMAKVDDSFFHRLEESFLVEEDKKHERHPIFGNIVDEVAYHEKYPTIYHLRKKLVDSTDKADLRLIYLALAHMIKFRGHFLIEGDLNPDNSDVDKLFIQLVQTYNQLFEENPINASGVDAKAILSARLSKSRRLENLIAQLPGEKKNGLFGNLIALSLGLTPNFKSNFDLAEDAKLQLSKDTYDDDLDNLLAQIGDQYADLFLAAKNLSDAILLSDILRVNTEITKAPLSASMIKRYDEHHQDLTLLKALVRQQLPEKYKEIFFDQSKNGYAGYIDGGASQEEFYKFIKPILEKMDGTEELLVKLNREDLLRKQRTFDNGSIPHQIHLGELHAILRRQEDFYPFLKDNREKIEKILTFRIPYYVGPLARGNSRFAWMTRKSEETITPWNFEEVVDKGASAQSFIERMTNFDKNLPNEKVLPKHSLLYEYFTVYNELTKVKYVTEGMRKPAFLSGEQKKAIVDLLFKTNRKVTVKQLKEDYFKKIECFDSVEISGVEDRFNASLGTYHDLLKIIKDKDFLDNEENEDILEDIVLTLTLFEDREMIEERLKTYAHLFDDKVMKQLKRRRYTGWGRLSRKLINGIRDKQSGKTILDFLKSDGFANRNFMQLIHDDSLTFKEDIQKAQVSGQGDSLHEHIANLAGSPAIKKGILQTVKVVDELVKVMGRHKPENIVIEMARENQTTQKGQKNSRERMKRIEEGIKELGSQILKEHPVENTQLQNEKLYLYYLQNGRDMYVDQELDINRLSDYDVDHIVPQSFLKDDSIDNKVLTRSDKARGKSDNVPSEEVVKKMKNYWRQLLNAKLITQRKFDNLTKAERGGLSELDKAGFIKRQLVETRQITKHVAQILDSRMNTKYDENDKLIREVKVITLKSKLVSDFRKDFQFYKVREINNYHHAHDAYLNAVVGTALIKKYPKLESEFVYGDYKVYDVRKMIAKSEQEIGKATAKYFFYSNIMNFFKTEITLANGEIRKRPLIETNGETGEIVWDKGRDFATVRKVLSMPQVNIVKKTEVQTGGFSKESILPKRNSDKLIARKKDWDPKKYGGFDSPTVAYSVLVVAKVEKGKSKKLKSVKELLGITIMERSSFEKNPIDFLEAKGYKEVKKDLIIKLPKYSLFELENGRKRMLASAGELQKGNELALPSKYVNFLYLASHYEKLKGSPEDNEQKQLFVEQHKHYLDEIIEQISEFSKRVILADANLDKVLSAYNKHRDKPIREQAENIIHLFTLTNLGAPAAFKYFDTTIDRKRYTSTKEVLDATLIHQSITGLYETRIDLSQLGGDGGGGSGSSGGTVSLQDEHRLFDIPVTTSLPDVWLQDFPQAWAETGGLGRAKCQAPIIIDLKPTAVPVSIKQYPMSLEAHMGIRQHIIKFLELGVLRPCRSPWNTPLLPVKKPGTQDYRPVQDLREINKRTVDIHPTVPNPYNLLSTLKPDYSWYTVLDLKDAFFCLPLAPQSQELFAFEWKDPERGISGQLTWTRLPQGFKNSPTLFNEALHRDLTDFRTQHPEVTLLQYVDDLLLAAPTKKACTQGTRHLLQELGEKGYRASAKKAQICQTKVTYLGYILSEGKRWLTPGRIETVARIPPPRNPREVREFLGKAGFCRLFIPGFAELAAPLYALTKPSTPFTWQTEHQLAFEALKKALLSAPALGLPDTSKPFTLFLDERQGIAKGVLTQKLGPWKRPVAYLSKKLDPVAAGWPPCLRIMAATAMLVKDSAKLTLGQPLTVITPHTLEAIVRQPPDRWITNARLTHYQALLLDTDRVQFGPPVTLNPATLLPVPENQPSPHDCRQVLAETHGTREDLKDQELPDADHTWYTDGSSYLDSGTRRAGAAVVDGHNTIWAQSLPPGTSAQKAELIALTKALELSKGKKANIYTDSRYAFATAHTHGSIYERRGWLTSEGKEIKNKAEIIALLKALFLPQEVAIIHCPGHQKGQDPVAVGNRQADRVARQAAMAEVLTLATEPDNTSHITAGKRTADGSEFEKRTADGSEFESPKKKAKVE

SEQ ID NO: 2032 - protein, 2097 aa, synthetic construct
MPAAKRVKLDGGDKKYSIGLDIGTNSVGWAVITDEYKVPSKKFKVLGNTDRHSIKKNLIGALLFDSGETAEATRLKRTARRRYTRRKNRICYLQEIFSNEMAKVDDSFFHRLEESFLVEEDKKHERHPIFGNIVDEVAYHEKYPTIYHLRKKLVDSTDKADLRLIYLALAHMIKFRGHFLIEGDLNPDNSDVDKLFIQLVQTYNQLFEENPINASGVDAKAILSARLSKSRRLENLIAQLPGEKKNGLFGNLIALSLGLTPNFKSNFDLAEDAKLQLSKDTYDDDLDNLLAQIGDQYADLFLAAKNLSDAILLSDILRVNTEITKAPLSASMIKRYDEHHQDLTLLKALVRQQLPEKYKEIFFDQSKNGYAGYIDGGASQEEFYKFIKPILEKMDGTEELLVKLNREDLLRKQRTFDNGSIPHQIHLGELHAILRRQEDFYPFLKDNREKIEKILTFRIPYYVGPLARGNSRFAWMTRKSEETITPWNFEEVVDKGASAQSFIERMTNFDKNLPNEKVLPKHSLLYEYFTVYNELTKVKYVTEGMRKPAFLSGEQKKAIVDLLFKTNRKVTVKQLKEDYFKKIECFDSVEISGVEDRFNASLGTYHDLLKIIKDKDFLDNEENEDILEDIVLTLTLFEDREMIEERLKTYAHLFDDKVMKQLKRRRYTGWGRLSRKLINGIRDKQSGKTILDFLKSDGFANRNFMQLIHDDSLTFKEDIQKAQVSGQGDSLHEHIANLAGSPAIKKGILQTVKVVDELVKVMGRHKPENIVIEMARENQTTQKGQKNSRERMKRIEEGIKELGSQILKEHPVENTQLQNEKLYLYYLQNGRDMYVDQELDINRLSDYDVDHIVPQSFLKDDSIDNKVLTRSDKARGKSDNVPSEEVVKKMKNYWRQLLNAKLITQRKFDNLTKAERGGLSELDKAGFIKRQLVETRQITKHVAQILDSRMNTKYDENDKLIREVKVITLKSKLVSDFRKDFQFYKVREINNYHHAHDAYLNAVVGTALIKKYPKLESEFVYGDYKVYDVRKMIAKSEQEIGKATAKYFFYSNIMNFFKTEITLANGEIRKRPLIETNGETGEIVWDKGRDFATVRKVLSMPQVNIVKKTEVQTGGFSKESILPKRNSDKLIARKKDWDPKKYGGFDSPTVAYSVLVVAKVEKGKSKKLKSVKELLGITIMERSSFEKNPIDFLEAKGYKEVKKDLIIKLPKYSLFELENGRKRMLASAGELQKGNELALPSKYVNFLYLASHYEKLKGSPEDNEQKQLFVEQHKHYLDEIIEQISEFSKRVILADANLDKVLSAYNKHRDKPIREQAENIIHLFTLTNLGAPAAFKYFDTTIDRKRYTSTKEVLDATLIHQSITGLYETRIDLSQLGGDGGPAPGGSGGTVSLQDEHRLFDIPVTTSLPDVWLQDFPQAWAETGGLGRAKCQAPIIIDLKPTAVPVSIKQYPMSLEAHMGIRQHIIKFLELGVLRPCRSPWNTPLLPVKKPGTQDYRPVQDLREINKRTVDIHPTVPNPYNLLSTLKPDYSWYTVLDLKDAFFCLPLAPQSQELFAFEWKDPERGISGQLTWTRLPQGFKNSPTLFNEALHRDLTDFRTQHPEVTLLQYVDDLLLAAPTKKACTQGTRHLLQELGEKGYRASAKKAQICQTKVTYLGYILSEGKRWLTPGRIETVARIPPPRNPREVREFLGKAGFCRLFIPGFAELAAPLYALTKPSTPFTWQTEHQLAFEALKKALLSAPALGLPDTSKPFTLFLDERQGIAKGVLTQKLGPWKRPVAYLSKKLDPVAAGWPPCLRIMAATAMLVKDSAKLTLGQPLTVITPHTLEAIVRQPPDRWITNARLTHYQALLLDTDRVQFGPPVTLNPATLLPVPENQPSPHDCRQVLAETHGTREDLKDQELPDADHTWYTDGSSYLDSGTRRAGAAVVDGHNTIWAQSLPPGTSAQKAELIALTKALELSKGKKANIYTDSRYAFATAHTHGSIYERRGWLTSEGKEIKNKAEIIALLKALFLPQEVAIIHCPGHQKGQDPVAVGNRQADRVARQAAMAEVLTLATEPDNTSHITAGKRTADGSEFEKRTADGSEFESPKKKAKVE

SEQ ID NO: 2033 - protein, 2094 aa, synthetic construct
MPAAKRVKLDGGDKKYSIGLDIGTNSVGWAVITDEYKVPSKKFKVLGNTDRHSIKKNLIGALLFDSGETAEATRLKRTARRRYTRRKNRICYLQEIFSNEMAKVDDSFFHRLEESFLVEEDKKHERHPIFGNIVDEVAYHEKYPTIYHLRKKLVDSTDKADLRLIYLALAHMIKFRGHFLIEGDLNPDNSDVDKLFIQLVQTYNQLFEENPINASGVDAKAILSARLSKSRRLENLIAQLPGEKKNGLFGNLIALSLGLTPNFKSNFDLAEDAKLQLSKDTYDDDLDNLLAQIGDQYADLFLAAKNLSDAILLSDILRVNTEITKAPLSASMIKRYDEHHQDLTLLKALVRQQLPEKYKEIFFDQSKNGYAGYIDGGASQEEFYKFIKPILEKMDGTEELLVKLNREDLLRKQRTFDNGSIPHQIHLGELHAILRRQEDFYPFLKDNREKIEKILTFRIPYYVGPLARGNSRFAWMTRKSEETITPWNFEEVVDKGASAQSFIERMTNFDKNLPNEKVLPKHSLLYEYFTVYNELTKVKYVTEGMRKPAFLSGEQKKAIVDLLFKTNRKVTVKQLKEDYFKKIECFDSVEISGVEDRFNASLGTYHDLLKIIKDKDFLDNEENEDILEDIVLTLTLFEDREMIEERLKTYAHLFDDKVMKQLKRRRYTGWGRLSRKLINGIRDKQSGKTILDFLKSDGFANRNFMQLIHDDSLTFKEDIQKAQVSGQGDSLHEHIANLAGSPAIKKGILQTVKVVDELVKVMGRHKPENIVIEMARENQTTQKGQKNSRERMKRIEEGIKELGSQILKEHPVENTQLQNEKLYLYYLQNGRDMYVDQELDINRLSDYDVDHIVPQSFLKDDSIDNKVLTRSDKARGKSDNVPSEEVVKKMKNYWRQLLNAKLITQRKFDNLTKAERGGLSELDKAGFIKRQLVETRQITKHVAQILDSRMNTKYDENDKLIREVKVITLKSKLVSDFRKDFQFYKVREINNYHHAHDAYLNAVVGTALIKKYPKLESEFVYGDYKVYDVRKMIAKSEQEIGKATAKYFFYSNIMNFFKTEITLANGEIRKRPLIETNGETGEIVWDKGRDFATVRKVLSMPQVNIVKKTEVQTGGFSKESILPKRNSDKLIARKKDWDPKKYGGFDSPTVAYSVLVVAKVEKGKSKKLKSVKELLGITIMERSSFEKNPIDFLEAKGYKEVKKDLIIKLPKYSLFELENGRKRMLASAGELQKGNELALPSKYVNFLYLASHYEKLKGSPEDNEQKQLFVEQHKHYLDEIIEQISEFSKRVILADANLDKVLSAYNKHRDKPIREQAENIIHLFTLTNLGAPAAFKYFDTTIDRKRYTSTKEVLDATLIHQSITGLYETRIDLSQLGGDGGGSSGGTVSLQDEHRLFDIPVTTSLPDVWLQDFPQAWAETGGLGRAKCQAPIIIDLKPTAVPVSIKQYPMSLEAHMGIRQHIIKFLELGVLRPCRSPWNTPLLPVKKPGTQDYRPVQDLREINKRTVDIHPTVPNPYNLLSTLKPDYSWYTVLDLKDAFFCLPLAPQSQELFAFEWKDPERGISGQLTWTRLPQGFKNSPTLFNEALHRDLTDFRTQHPEVTLLQYVDDLLLAAPTKKACTQGTRHLLQELGEKGYRASAKKAQICQTKVTYLGYILSEGKRWLTPGRIETVARIPPPRNPREVREFLGKAGFCRLFIPGFAELAAPLYALTKPSTPFTWQTEHQLAFEALKKALLSAPALGLPDTSKPFTLFLDERQGIAKGVLTQKLGPWKRPVAYLSKKLDPVAAGWPPCLRIMAATAMLVKDSAKLTLGQPLTVITPHTLEAIVRQPPDRWITNARLTHYQALLLDTDRVQFGPPVTLNPATLLPVPENQPSPHDCRQVLAETHGTREDLKDQELPDADHTWYTDGSSYLDSGTRRAGAAVVDGHNTIWAQSLPPGTSAQKAELIALTKALELSKGKKANIYTDSRYAFATAHTHGSIYERRGWLTSEGKEIKNKAEIIALLKALFLPQEVAIIHCPGHQKGQDPVAVGNRQADRVARQAAMAEVLTLATEPDNTSHITAGKRTADGSEFEKRTADGSEFESPKKKAKVE

SEQ ID NO: 2034 - protein, 2100 aa, synthetic construct
MPAAKRVKLDGGDKKYSIGLDIGTNSVGWAVITDEYKVPSKKFKVLGNTDRHSIKKNLIGALLFDSGETAEATRLKRTARRRYTRRKNRICYLQEIFSNEMAKVDDSFFHRLEESFLVEEDKKHERHPIFGNIVDEVAYHEKYPTIYHLRKKLVDSTDKADLRLIYLALAHMIKFRGHFLIEGDLNPDNSDVDKLFIQLVQTYNQLFEENPINASGVDAKAILSARLSKSRRLENLIAQLPGEKKNGLFGNLIALSLGLTPNFKSNFDLAEDAKLQLSKDTYDDDLDNLLAQIGDQYADLFLAAKNLSDAILLSDILRVNTEITKAPLSASMIKRYDEHHQDLTLLKALVRQQLPEKYKEIFFDQSKNGYAGYIDGGASQEEFYKFIKPILEKMDGTEELLVKLNREDLLRKQRTFDNGSIPHQIHLGELHAILRRQEDFYPFLKDNREKIEKILTFRIPYYVGPLARGNSRFAWMTRKSEETITPWNFEEVVDKGASAQSFIERMTNFDKNLPNEKVLPKHSLLYEYFTVYNELTKVKYVTEGMRKPAFLSGEQKKAIVDLLFKTNRKVTVKQLKEDYFKKIECFDSVEISGVEDRFNASLGTYHDLLKIIKDKDFLDNEENEDILEDIVLTLTLFEDREMIEERLKTYAHLFDDKVMKQLKRRRYTGWGRLSRKLINGIRDKQSGKTILDFLKSDGFANRNFMQLIHDDSLTFKEDIQKAQVSGQGDSLHEHIANLAGSPAIKKGILQTVKVVDELVKVMGRHKPENIVIEMARENQTTQKGQKNSRERMKRIEEGIKELGSQILKEHPVENTQLQNEKLYLYYLQNGRDMYVDQELDINRLSDYDVDHIVPQSFLKDDSIDNKVLTRSDKARGKSDNVPSEEVVKKMKNYWRQLLNAKLITQRKFDNLTKAERGGLSELDKAGFIKRQLVETRQITKHVAQILDSRMNTKYDENDKLIREVKVITLKSKLVSDFRKDFQFYKVREINNYHHAHDAYLNAVVGTALIKKYPKLESEFVYGDYKVYDVRKMIAKSEQEIGKATAKYFFYSNIMNFFKTEITLANGEIRKRPLIETNGETGEIVWDKGRDFATVRKVLSMPQVNIVKKTEVQTGGFSKESILPKRNSDKLIARKKDWDPKKYGGFDSPTVAYSVLVVAKVEKGKSKKLKSVKELLGITIMERSSFEKNPIDFLEAKGYKEVKKDLIIKLPKYSLFELENGRKRMLASAGELQKGNELALPSKYVNFLYLASHYEKLKGSPEDNEQKQLFVEQHKHYLDEIIEQISEFSKRVILADANLDKVLSAYNKHRDKPIREQAENIIHLFTLTNLGAPAAFKYFDTTIDRKRYTSTKEVLDATLIHQSITGLYETRIDLSQLGGDGGGGGGGSPAPGGTVSLQDEHRLFDIPVTTSLPDVWLQDFPQAWAETGGLGRAKCQAPIIIDLKPTAVPVSIKQYPMSLEAHMGIRQHIIKFLELGVLRPCRSPWNTPLLPVKKPGTQDYRPVQDLREINKRTVDIHPTVPNPYNLLSTLKPDYSWYTVLDLKDAFFCLPLAPQSQELFAFEWKDPERGISGQLTWTRLPQGFKNSPTLFNEALHRDLTDFRTQHPEVTLLQYVDDLLLAAPTKKACTQGTRHLLQELGEKGYRASAKKAQICQTKVTYLGYILSEGKRWLTPGRIETVARIPPPRNPREVREFLGKAGFCRLFIPGFAELAAPLYALTKPSTPFTWQTEHQLAFEALKKALLSAPALGLPDTSKPFTLFLDERQGIAKGVLTQKLGPWKRPVAYLSKKLDPVAAGWPPCLRIMAATAMLVKDSAKLTLGQPLTVITPHTLEAIVRQPPDRWITNARLTHYQALLLDTDRVQFGPPVTLNPATLLPVPENQPSPHDCRQVLAETHGTREDLKDQELPDADHTWYTDGSSYLDSGTRRAGAAVVDGHNTIWAQSLPPGTSAQKAELIALTKALELSKGKKANIYTDSRYAFATAHTHGSIYERRGWLTSEGKEIKNKAEIIALLKALFLPQEVAIIHCPGHQKGQDPVAVGNRQADRVARQAAMAEVLTLATEPDNTSHITAGKRTADGSEFEKRTADGSEFESPKKKAKVE

SEQ ID NO: 2035 - protein, 2109 aa, synthetic construct
MPAAKRVKLDGGDKKYSIGLDIGTNSVGWAVITDEYKVPSKKFKVLGNTDRHSIKKNLIGALLFDSGETAEATRLKRTARRRYTRRKNRICYLQEIFSNEMAKVDDSFFHRLEESFLVEEDKKHERHPIFGNIVDEVAYHEKYPTIYHLRKKLVDSTDKADLRLIYLALAHMIKFRGHFLIEGDLNPDNSDVDKLFIQLVQTYNQLFEENPINASGVDAKAILSARLSKSRRLENLIAQLPGEKKNGLFGNLIALSLGLTPNFKSNFDLAEDAKLQLSKDTYDDDLDNLLAQIGDQYADLFLAAKNLSDAILLSDILRVNTEITKAPLSASMIKRYDEHHQDLTLLKALVRQQLPEKYKEIFFDQSKNGYAGYIDGGASQEEFYKFIKPILEKMDGTEELLVKLNREDLLRKQRTFDNGSIPHQIHLGELHAILRRQEDFYPFLKDNREKIEKILTFRIPYYVGPLARGNSRFAWMTRKSEETITPWNFEEVVDKGASAQSFIERMTNFDKNLPNEKVLPKHSLLYEYFTVYNELTKVKYVTEGMRKPAFLSGEQKKAIVDLLFKTNRKVTVKQLKEDYFKKIECFDSVEISGVEDRFNASLGTYHDLLKIIKDKDFLDNEENEDILEDIVLTLTLFEDREMIEERLKTYAHLFDDKVMKQLKRRRYTGWGRLSRKLINGIRDKQSGKTILDFLKSDGFANRNFMQLIHDDSLTFKEDIQKAQVSGQGDSLHEHIANLAGSPAIKKGILQTVKVVDELVKVMGRHKPENIVIEMARENQTTQKGQKNSRERMKRIEEGIKELGSQILKEHPVENTQLQNEKLYLYYLQNGRDMYVDQELDINRLSDYDVDHIVPQSFLKDDSIDNKVLTRSDKARGKSDNVPSEEVVKKMKNYWRQLLNAKLITQRKFDNLTKAERGGLSELDKAGFIKRQLVETRQITKHVAQILDSRMNTKYDENDKLIREVKVITLKSKLVSDFRKDFQFYKVREINNYHHAHDAYLNAVVGTALIKKYPKLESEFVYGDYKVYDVRKMIAKSEQEIGKATAKYFFYSNIMNFFKTEITLANGEIRKRPLIETNGETGEIVWDKGRDFATVRKVLSMPQVNIVKKTEVQTGGFSKESILPKRNSDKLIARKKDWDPKKYGGFDSPTVAYSVLVVAKVEKGKSKKLKSVKELLGITIMERSSFEKNPIDFLEAKGYKEVKKDLIIKLPKYSLFELENGRKRMLASAGELQKGNELALPSKYVNFLYLASHYEKLKGSPEDNEQKQLFVEQHKHYLDEIIEQISEFSKRVILADANLDKVLSAYNKHRDKPIREQAENIIHLFTLTNLGAPAAFKYFDTTIDRKRYTSTKEVLDATLIHQSITGLYETRIDLSQLGGDGGGSSGSSGSSGSSGSSGSSGGTVSLQDEHRLFDIPVTTSLPDVWLQDFPQAWAETGGLGRAKCQAPIIIDLKPTAVPVSIKQYPMSLEAHMGIRQHIIKFLELGVLRPCRSPWNTPLLPVKKPGTQDYRPVQDLREINKRTVDIHPTVPNPYNLLSTLKPDYSWYTVLDLKDAFFCLPLAPQSQELFAFEWKDPERGISGQLTWTRLPQGFKNSPTLFNEALHRDLTDFRTQHPEVTLLQYVDDLLLAAPTKKACTQGTRHLLQELGEKGYRASAKKAQICQTKVTYLGYILSEGKRWLTPGRIETVARIPPPRNPREVREFLGKAGFCRLFIPGFAELAAPLYALTKPSTPFTWQTEHQLAFEALKKALLSAPALGLPDTSKPFTLFLDERQGIAKGVLTQKLGPWKRPVAYLSKKLDPVAAGWPPCLRIMAATAMLVKDSAKLTLGQPLTVITPHTLEAIVRQPPDRWITNARLTHYQALLLDTDRVQFGPPVTLNPATLLPVPENQPSPHDCRQVLAETHGTREDLKDQELPDADHTWYTDGSSYLDSGTRRAGAAVVDGHNTIWAQSLPPGTSAQKAELIALTKALELSKGKKANIYTDSRYAFATAHTHGSIYERRGWLTSEGKEIKNKAEIIALLKALFLPQEVAIIHCPGHQKGQDPVAVGNRQADRVARQAAMAEVLTLATEPDNTSHITAGKRTADGSEFEKRTADGSEFESPKKKAKVE

SEQ ID NO: 2036 - protein, 2097 aa, synthetic construct
MPAAKRVKLDGGDKKYSIGLDIGTNSVGWAVITDEYKVPSKKFKVLGNTDRHSIKKNLIGALLFDSGETAEATRLKRTARRRYTRRKNRICYLQEIFSNEMAKVDDSFFHRLEESFLVEEDKKHERHPIFGNIVDEVAYHEKYPTIYHLRKKLVDSTDKADLRLIYLALAHMIKFRGHFLIEGDLNPDNSDVDKLFIQLVQTYNQLFEENPINASGVDAKAILSARLSKSRRLENLIAQLPGEKKNGLFGNLIALSLGLTPNFKSNFDLAEDAKLQLSKDTYDDDLDNLLAQIGDQYADLFLAAKNLSDAILLSDILRVNTEITKAPLSASMIKRYDEHHQDLTLLKALVRQQLPEKYKEIFFDQSKNGYAGYIDGGASQEEFYKFIKPILEKMDGTEELLVKLNREDLLRKQRTFDNGSIPHQIHLGELHAILRRQEDFYPFLKDNREKIEKILTFRIPYYVGPLARGNSRFAWMTRKSEETITPWNFEEVVDKGASAQSFIERMTNFDKNLPNEKVLPKHSLLYEYFTVYNELTKVKYVTEGMRKPAFLSGEQKKAIVDLLFKTNRKVTVKQLKEDYFKKIECFDSVEISGVEDRFNASLGTYHDLLKIIKDKDFLDNEENEDILEDIVLTLTLFEDREMIEERLKTYAHLFDDKVMKQLKRRRYTGWGRLSRKLINGIRDKQSGKTILDFLKSDGFANRNFMQLIHDDSLTFKEDIQKAQVSGQGDSLHEHIANLAGSPAIKKGILQTVKVVDELVKVMGRHKPENIVIEMARENQTTQKGQKNSRERMKRIEEGIKELGSQILKEHPVENTQLQNEKLYLYYLQNGRDMYVDQELDINRLSDYDVDHIVPQSFLKDDSIDNKVLTRSDKARGKSDNVPSEEVVKKMKNYWRQLLNAKLITQRKFDNLTKAERGGLSELDKAGFIKRQLVETRQITKHVAQILDSRMNTKYDENDKLIREVKVITLKSKLVSDFRKDFQFYKVREINNYHHAHDAYLNAVVGTALIKKYPKLESEFVYGDYKVYDVRKMIAKSEQEIGKATAKYFFYSNIMNFFKTEITLANGEIRKRPLIETNGETGEIVWDKGRDFATVRKVLSMPQVNIVKKTEVQTGGFSKESILPKRNSDKLIARKKDWDPKKYGGFDSPTVAYSVLVVAKVEKGKSKKLKSVKELLGITIMERSSFEKNPIDFLEAKGYKEVKKDLIIKLPKYSLFELENGRKRMLASAGELQKGNELALPSKYVNFLYLASHYEKLKGSPEDNEQKQLFVEQHKHYLDEIIEQISEFSKRVILADANLDKVLSAYNKHRDKPIREQAENIIHLFTLTNLGAPAAFKYFDTTIDRKRYTSTKEVLDATLIHQSITGLYETRIDLSQLGGDGGPAPGSSGGTVSLQDEHRLFDIPVTTSLPDVWLQDFPQAWAETGGLGRAKCQAPIIIDLKPTAVPVSIKQYPMSLEAHMGIRQHIIKFLELGVLRPCRSPWNTPLLPVKKPGTQDYRPVQDLREINKRTVDIHPTVPNPYNLLSTLKPDYSWYTVLDLKDAFFCLPLAPQSQELFAFEWKDPERGISGQLTWTRLPQGFKNSPTLFNEALHRDLTDFRTQHPEVTLLQYVDDLLLAAPTKKACTQGTRHLLQELGEKGYRASAKKAQICQTKVTYLGYILSEGKRWLTPGRIETVARIPPPRNPREVREFLGKAGFCRLFIPGFAELAAPLYALTKPSTPFTWQTEHQLAFEALKKALLSAPALGLPDTSKPFTLFLDERQGIAKGVLTQKLGPWKRPVAYLSKKLDPVAAGWPPCLRIMAATAMLVKDSAKLTLGQPLTVITPHTLEAIVRQPPDRWITNARLTHYQALLLDTDRVQFGPPVTLNPATLLPVPENQPSPHDCRQVLAETHGTREDLKDQELPDADHTWYTDGSSYLDSGTRRAGAAVVDGHNTIWAQSLPPGTSAQKAELIALTKALELSKGKKANIYTDSRYAFATAHTHGSIYERRGWLTSEGKEIKNKAEIIALLKALFLPQEVAIIHCPGHQKGQDPVAVGNRQADRVARQAAMAEVLTLATEPDNTSHITAGKRTADGSEFEKRTADGSEFESPKKKAKVE

SEQ ID NO: 2037 - protein, 2102 aa, synthetic construct
MPAAKRVKLDGGDKKYSIGLDIGTNSVGWAVITDEYKVPSKKFKVLGNTDRHSIKKNLIGALLFDSGETAEATRLKRTARRRYTRRKNRICYLQEIFSNEMAKVDDSFFHRLEESFLVEEDKKHERHPIFGNIVDEVAYHEKYPTIYHLRKKLVDSTDKADLRLIYLALAHMIKFRGHFLIEGDLNPDNSDVDKLFIQLVQTYNQLFEENPINASGVDAKAILSARLSKSRRLENLIAQLPGEKKNGLFGNLIALSLGLTPNFKSNFDLAEDAKLQLSKDTYDDDLDNLLAQIGDQYADLFLAAKNLSDAILLSDILRVNTEITKAPLSASMIKRYDEHHQDLTLLKALVRQQLPEKYKEIFFDQSKNGYAGYIDGGASQEEFYKFIKPILEKMDGTEELLVKLNREDLLRKQRTFDNGSIPHQIHLGELHAILRRQEDFYPFLKDNREKIEKILTFRIPYYVGPLARGNSRFAWMTRKSEETITPWNFEEVVDKGASAQSFIERMTNFDKNLPNEKVLPKHSLLYEYFTVYNELTKVKYVTEGMRKPAFLSGEQKKAIVDLLFKTNRKVTVKQLKEDYFKKIECFDSVEISGVEDRFNASLGTYHDLLKIIKDKDFLDNEENEDILEDIVLTLTLFEDREMIEERLKTYAHLFDDKVMKQLKRRRYTGWGRLSRKLINGIRDKQSGKTILDFLKSDGFANRNFMQLIHDDSLTFKEDIQKAQVSGQGDSLHEHIANLAGSPAIKKGILQTVKVVDELVKVMGRHKPENIVIEMARENQTTQKGQKNSRERMKRIEEGIKELGSQILKEHPVENTQLQNEKLYLYYLQNGRDMYVDQELDINRLSDYDVDHIVPQSFLKDDSIDNKVLTRSDKARGKSDNVPSEEVVKKMKNYWRQLLNAKLITQRKFDNLTKAERGGLSELDKAGFIKRQLVETRQITKHVAQILDSRMNTKYDENDKLIREVKVITLKSKLVSDFRKDFQFYKVREINNYHHAHDAYLNAVVGTALIKKYPKLESEFVYGDYKVYDVRKMIAKSEQEIGKATAKYFFYSNIMNFFKTEITLANGEIRKRPLIETNGETGEIVWDKGRDFATVRKVLSMPQVNIVKKTEVQTGGFSKESILPKRNSDKLIARKKDWDPKKYGGFDSPTVAYSVLVVAKVEKGKSKKLKSVKELLGITIMERSSFEKNPIDFLEAKGYKEVKKDLIIKLPKYSLFELENGRKRMLASAGELQKGNELALPSKYVNFLYLASHYEKLKGSPEDNEQKQLFVEQHKHYLDEIIEQISEFSKRVILADANLDKVLSAYNKHRDKPIREQAENIIHLFTLTNLGAPAAFKYFDTTIDRKRYTSTKEVLDATLIHQSITGLYETRIDLSQLGGDGGGSSEAAAKPAPGGTVSLQDEHRLFDIPVTTSLPDVWLQDFPQAWAETGGLGRAKCQAPIIIDLKPTAVPVSIKQYPMSLEAHMGIRQHIIKFLELGVLRPCRSPWNTPLLPVKKPGTQDYRPVQDLREINKRTVDIHPTVPNPYNLLSTLKPDYSWYTVLDLKDAFFCLPLAPQSQELFAFEWKDPERGISGQLTWTRLPQGFKNSPTLFNEALHRDLTDFRTQHPEVTLLQYVDDLLLAAPTKKACTQGTRHLLQELGEKGYRASAKKAQICQTKVTYLGYILSEGKRWLTPGRIETVARIPPPRNPREVREFLGKAGFCRLFIPGFAELAAPLYALTKPSTPFTWQTEHQLAFEALKKALLSAPALGLPDTSKPFTLFLDERQGIAKGVLTQKLGPWKRPVAYLSKKLDPVAAGWPPCLRIMAATAMLVKDSAKLTLGQPLTVITPHTLEAIVRQPPDRWITNARLTHYQALLLDTDRVQFGPPVTLNPATLLPVPENQPSPHDCRQVLAETHGTREDLKDQELPDADHTWYTDGSSYLDSGTRRAGAAVVDGHNTIWAQSLPPGTSAQKAELIALTKALELSKGKKANIYTDSRYAFATAHTHGSIYERRGWLTSEGKEIKNKAEIIALLKALFLPQEVAIIHCPGHQKGQDPVAVGNRQADRVARQAAMAEVLTLATEPDNTSHITAGKRTADGSEFEKRTADGSEFESPKKKAKVE

SEQ ID NO: 2038 - protein, 2100 aa, synthetic construct
MPAAKRVKLDGGDKKYSIGLDIGTNSVGWAVITDEYKVPSKKFKVLGNTDRHSIKKNLIGALLFDSGETAEATRLKRTARRRYTRRKNRICYLQEIFSNEMAKVDDSFFHRLEESFLVEEDKKHERHPIFGNIVDEVAYHEKYPTIYHLRKKLVDSTDKADLRLIYLALAHMIKFRGHFLIEGDLNPDNSDVDKLFIQLVQTYNQLFEENPINASGVDAKAILSARLSKSRRLENLIAQLPGEKKNGLFGNLIALSLGLTPNFKSNFDLAEDAKLQLSKDTYDDDLDNLLAQIGDQYADLFLAAKNLSDAILLSDILRVNTEITKAPLSASMIKRYDEHHQDLTLLKALVRQQLPEKYKEIFFDQSKNGYAGYIDGGASQEEFYKFIKPILEKMDGTEELLVKLNREDLLRKQRTFDNGSIPHQIHLGELHAILRRQEDFYPFLKDNREKIEKILTFRIPYYVGPLARGNSRFAWMTRKSEETITPWNFEEVVDKGASAQSFIERMTNFDKNLPNEKVLPKHSLLYEYFTVYNELTKVKYVTEGMRKPAFLSGEQKKAIVDLLFKTNRKVTVKQLKEDYFKKIECFDSVEISGVEDRFNASLGTYHDLLKIIKDKDFLDNEENEDILEDIVLTLTLFEDREMIEERLKTYAHLFDDKVMKQLKRRRYTGWGRLSRKLINGIRDKQSGKTILDFLKSDGFANRNFMQLIHDDSLTFKEDIQKAQVSGQGDSLHEHIANLAGSPAIKKGILQTVKVVDELVKVMGRHKPENIVIEMARENQTTQKGQKNSRERMKRIEEGIKELGSQILKEHPVENTQLQNEKLYLYYLQNGRDMYVDQELDINRLSDYDVDHIVPQSFLKDDSIDNKVLTRSDKARGKSDNVPSEEVVKKMKNYWRQLLNAKLITQRKFDNLTKAERGGLSELDKAGFIKRQLVETRQITKHVAQILDSRMNTKYDENDKLIREVKVITLKSKLVSDFRKDFQFYKVREINNYHHAHDAYLNAVVGTALIKKYPKLESEFVYGDYKVYDVRKMIAKSEQEIGKATAKYFFYSNIMNFFKTEITLANGEIRKRPLIETNGETGEIVWDKGRDFATVRKVLSMPQVNIVKKTEVQTGGFSKESILPKRNSDKLIARKKDWDPKKYGGFDSPTVAYSVLVVAKVEKGKSKKLKSVKELLGITIMERSSFEKNPIDFLEAKGYKEVKKDLIIKLPKYSLFELENGRKRMLASAGELQKGNELALPSKYVNFLYLASHYEKLKGSPEDNEQKQLFVEQHKHYLDEIIEQISEFSKRVILADANLDKVLSAYNKHRDKPIREQAENIIHLFTLTNLGAPAAFKYFDTTIDRKRYTSTKEVLDATLIHQSITGLYETRIDLSQLGGDGGGGSGGGGSSGGTVSLQDEHRLFDIPVTTSLPDVWLQDFPQAWAETGGLGRAKCQAPIIIDLKPTAVPVSIKQYPMSLEAHMGIRQHIIKFLELGVLRPCRSPWNTPLLPVKKPGTQDYRPVQDLREINKRTVDIHPTVPNPYNLLSTLKPDYSWYTVLDLKDAFFCLPLAPQSQELFAFEWKDPERGISGQLTWTRLPQGFKNSPTLFNEALHRDLTDFRTQHPEVTLLQYVDDLLLAAPTKKACTQGTRHLLQELGEKGYRASAKKAQICQTKVTYLGYILSEGKRWLTPGRIETVARIPPPRNPREVREFLGKAGFCRLFIPGFAELAAPLYALTKPSTPFTWQTEHQLAFEALKKALLSAPALGLPDTSKPFTLFLDERQGIAKGVLTQKLGPWKRPVAYLSKKLDPVAAGWPPCLRIMAATAMLVKDSAKLTLGQPLTVITPHTLEAIVRQPPDRWITNARLTHYQALLLDTDRVQFGPPVTLNPATLLPVPENQPSPHDCRQVLAETHGTREDLKDQELPDADHTWYTDGSSYLDSGTRRAGAAVVDGHNTIWAQSLPPGTSAQKAELIALTKALELSKGKKANIYTDSRYAFATAHTHGSIYERRGWLTSEGKEIKNKAEIIALLKALFLPQEVAIIHCPGHQKGQDPVAVGNRQADRVARQAAMAEVLTLATEPDNTSHITAGKRTADGSEFEKRTADGSEFESPKKKAKVE

SEQ ID NO: 2039 - protein, 2102 aa, synthetic construct
MPAAKRVKLDGGDKKYSIGLDIGTNSVGWAVITDEYKVPSKKFKVLGNTDRHSIKKNLIGALLFDSGETAEATRLKRTARRRYTRRKNRICYLQEIFSNEMAKVDDSFFHRLEESFLVEEDKKHERHPIFGNIVDEVAYHEKYPTIYHLRKKLVDSTDKADLRLIYLALAHMIKFRGHFLIEGDLNPDNSDVDKLFIQLVQTYNQLFEENPINASGVDAKAILSARLSKSRRLENLIAQLPGEKKNGLFGNLIALSLGLTPNFKSNFDLAEDAKLQLSKDTYDDDLDNLLAQIGDQYADLFLAAKNLSDAILLSDILRVNTEITKAPLSASMIKRYDEHHQDLTLLKALVRQQLPEKYKEIFFDQSKNGYAGYIDGGASQEEFYKFIKPILEKMDGTEELLVKLNREDLLRKQRTFDNGSIPHQIHLGELHAILRRQEDFYPFLKDNREKIEKILTFRIPYYVGPLARGNSRFAWMTRKSEETITPWNFEEVVDKGASAQSFIERMTNFDKNLPNEKVLPKHSLLYEYFTVYNELTKVKYVTEGMRKPAFLSGEQKKAIVDLLFKTNRKVTVKQLKEDYFKKIECFDSVEISGVEDRFNASLGTYHDLLKIIKDKDFLDNEENEDILEDIVLTLTLFEDREMIEERLKTYAHLFDDKVMKQLKRRRYTGWGRLSRKLINGIRDKQSGKTILDFLKSDGFANRNFMQLIHDDSLTFKEDIQKAQVSGQGDSLHEHIANLAGSPAIKKGILQTVKVVDELVKVMGRHKPENIVIEMARENQTTQKGQKNSRERMKRIEEGIKELGSQILKEHPVENTQLQNEKLYLYYLQNGRDMYVDQELDINRLSDYDVDHIVPQSFLKDDSIDNKVLTRSDKARGKSDNVPSEEVVKKMKNYWRQLLNAKLITQRKFDNLTKAERGGLSELDKAGFIKRQLVETRQITKHVAQILDSRMNTKYDENDKLIREVKVITLKSKLVSDFRKDFQFYKVREINNYHHAHDAYLNAVVGTALIKKYPKLESEFVYGDYKVYDVRKMIAKSEQEIGKATAKYFFYSNIMNFFKTEITLANGEIRKRPLIETNGETGEIVWDKGRDFATVRKVLSMPQVNIVKKTEVQTGGFSKESILPKRNSDKLIARKKDWDPKKYGGFDSPTVAYSVLVVAKVEKGKSKKLKSVKELLGITIMERSSFEKNPIDFLEAKGYKEVKKDLIIKLPKYSLFELENGRKRMLASAGELQKGNELALPSKYVNFLYLASHYEKLKGSPEDNEQKQLFVEQHKHYLDEIIEQISEFSKRVILADANLDKVLSAYNKHRDKPIREQAENIIHLFTLTNLGAPAAFKYFDTTIDRKRYTSTKEVLDATLIHQSITGLYETRIDLSQLGGDGGEAAAKGSSPAPGGTVSLQDEHRLFDIPVTTSLPDVWLQDFPQAWAETGGLGRAKCQAPIIIDLKPTAVPVSIKQYPMSLEAHMGIRQHIIKFLELGVLRPCRSPWNTPLLPVKKPGTQDYRPVQDLREINKRTVDIHPTVPNPYNLLSTLKPDYSWYTVLDLKDAFFCLPLAPQSQELFAFEWKDPERGISGQLTWTRLPQGFKNSPTLFNEALHRDLTDFRTQHPEVTLLQYVDDLLLAAPTKKACTQGTRHLLQELGEKGYRASAKKAQICQTKVTYLGYILSEGKRWLTPGRIETVARIPPPRNPREVREFLGKAGFCRLFIPGFAELAAPLYALTKPSTPFTWQTEHQLAFEALKKALLSAPALGLPDTSKPFTLFLDERQGIAKGVLTQKLGPWKRPVAYLSKKLDPVAAGWPPCLRIMAATAMLVKDSAKLTLGQPLTVITPHTLEAIVRQPPDRWITNARLTHYQALLLDTDRVQFGPPVTLNPATLLPVPENQPSPHDCRQVLAETHGTREDLKDQELPDADHTWYTDGSSYLDSGTRRAGAAVVDGHNTIWAQSLPPGTSAQKAELIALTKALELSKGKKANIYTDSRYAFATAHTHGSIYERRGWLTSEGKEIKNKAEIIALLKALFLPQEVAIIHCPGHQKGQDPVAVGNRQADRVARQAAMAEVLTLATEPDNTSHITAGKRTADGSEFEKRTADGSEFESPKKKAKVE

SEQ ID NO: 2040 - protein, 2102 aa, synthetic construct
MPAAKRVKLDGGDKKYSIGLDIGTNSVGWAVITDEYKVPSKKFKVLGNTDRHSIKKNLIGALLFDSGETAEATRLKRTARRRYTRRKNRICYLQEIFSNEMAKVDDSFFHRLEESFLVEEDKKHERHPIFGNIVDEVAYHEKYPTIYHLRKKLVDSTDKADLRLIYLALAHMIKFRGHFLIEGDLNPDNSDVDKLFIQLVQTYNQLFEENPINASGVDAKAILSARLSKSRRLENLIAQLPGEKKNGLFGNLIALSLGLTPNFKSNFDLAEDAKLQLSKDTYDDDLDNLLAQIGDQYADLFLAAKNLSDAILLSDILRVNTEITKAPLSASMIKRYDEHHQDLTLLKALVRQQLPEKYKEIFFDQSKNGYAGYIDGGASQEEFYKFIKPILEKMDGTEELLVKLNREDLLRKQRTFDNGSIPHQIHLGELHAILRRQEDFYPFLKDNREKIEKILTFRIPYYVGPLARGNSRFAWMTRKSEETITPWNFEEVVDKGASAQSFIERMTNFDKNLPNEKVLPKHSLLYEYFTVYNELTKVKYVTEGMRKPAFLSGEQKKAIVDLLFKTNRKVTVKQLKEDYFKKIECFDSVEISGVEDRFNASLGTYHDLLKIIKDKDFLDNEENEDILEDIVLTLTLFEDREMIEERLKTYAHLFDDKVMKQLKRRRYTGWGRLSRKLINGIRDKQSGKTILDFLKSDGFANRNFMQLIHDDSLTFKEDIQKAQVSGQGDSLHEHIANLAGSPAIKKGILQTVKVVDELVKVMGRHKPENIVIEMARENQTTQKGQKNSRERMKRIEEGIKELGSQILKEHPVENTQLQNEKLYLYYLQNGRDMYVDQELDINRLSDYDVDHIVPQSFLKDDSIDNKVLTRSDKARGKSDNVPSEEVVKKMKNYWRQLLNAKLITQRKFDNLTKAERGGLSELDKAGFIKRQLVETRQITKHVAQILDSRMNTKYDENDKLIREVKVITLKSKLVSDFRKDFQFYKVREINNYHHAHDAYLNAVVGTALIKKYPKLESEFVYGDYKVYDVRKMIAKSEQEIGKATAKYFFYSNIMNFFKTEITLANGEIRKRPLIETNGETGEIVWDKGRDFATVRKVLSMPQVNIVKKTEVQTGGFSKESILPKRNSDKLIARKKDWDPKKYGGFDSPTVAYSVLVVAKVEKGKSKKLKSVKELLGITIMERSSFEKNPIDFLEAKGYKEVKKDLIIKLPKYSLFELENGRKRMLASAGELQKGNELALPSKYVNFLYLASHYEKLKGSPEDNEQKQLFVEQHKHYLDEIIEQISEFSKRVILADANLDKVLSAYNKHRDKPIREQAENIIHLFTLTNLGAPAAFKYFDTTIDRKRYTSTKEVLDATLIHQSITGLYETRIDLSQLGGDGGPAPEAAAKGSSGGTVSLQDEHRLFDIPVTTSLPDVWLQDFPQAWAETGGLGRAKCQAPIIIDLKPTAVPVSIKQYPMSLEAHMGIRQHIIKFLELGVLRPCRSPWNTPLLPVKKPGTQDYRPVQDLREINKRTVDIHPTVPNPYNLLSTLKPDYSWYTVLDLKDAFFCLPLAPQSQELFAFEWKDPERGISGQLTWTRLPQGFKNSPTLFNEALHRDLTDFRTQHPEVTLLQYVDDLLLAAPTKKACTQGTRHLLQELGEKGYRASAKKAQICQTKVTYLGYILSEGKRWLTPGRIETVARIPPPRNPREVREFLGKAGFCRLFIPGFAELAAPLYALTKPSTPFTWQTEHQLAFEALKKALLSAPALGLPDTSKPFTLFLDERQGIAKGVLTQKLGPWKRPVAYLSKKLDPVAAGWPPCLRIMAATAMLVKDSAKLTLGQPLTVITPHTLEAIVRQPPDRWITNARLTHYQALLLDTDRVQFGPPVTLNPATLLPVPENQPSPHDCRQVLAETHGTREDLKDQELPDADHTWYTDGSSYLDSGTRRAGAAVVDGHNTIWAQSLPPGTSAQKAELIALTKALELSKGKKANIYTDSRYAFATAHTHGSIYERRGWLTSEGKEIKNKAEIIALLKALFLPQEVAIIHCPGHQKGQDPVAVGNRQADRVARQAAMAEVLTLATEPDNTSHITAGKRTADGSEFEKRTADGSEFESPKKKAKVE

SEQ ID NO: 2041 - protein, 2102 aa, synthetic construct
MPAAKRVKLDGGDKKYSIGLDIGTNSVGWAVITDEYKVPSKKFKVLGNTDRHSIKKNLIGALLFDSGETAEATRLKRTARRRYTRRKNRICYLQEIFSNEMAKVDDSFFHRLEESFLVEEDKKHERHPIFGNIVDEVAYHEKYPTIYHLRKKLVDSTDKADLRLIYLALAHMIKFRGHFLIEGDLNPDNSDVDKLFIQLVQTYNQLFEENPINASGVDAKAILSARLSKSRRLENLIAQLPGEKKNGLFGNLIALSLGLTPNFKSNFDLAEDAKLQLSKDTYDDDLDNLLAQIGDQYADLFLAAKNLSDAILLSDILRVNTEITKAPLSASMIKRYDEHHQDLTLLKALVRQQLPEKYKEIFFDQSKNGYAGYIDGGASQEEFYKFIKPILEKMDGTEELLVKLNREDLLRKQRTFDNGSIPHQIHLGELHAILRRQEDFYPFLKDNREKIEKILTFRIPYYVGPLARGNSRFAWMTRKSEETITPWNFEEVVDKGASAQSFIERMTNFDKNLPNEKVLPKHSLLYEYFTVYNELTKVKYVTEGMRKPAFLSGEQKKAIVDLLFKTNRKVTVKQLKEDYFKKIECFDSVEISGVEDRFNASLGTYHDLLKIIKDKDFLDNEENEDILEDIVLTLTLFEDREMIEERLKTYAHLFDDKVMKQLKRRRYTGWGRLSRKLINGIRDKQSGKTILDFLKSDGFANRNFMQLIHDDSLTFKEDIQKAQVSGQGDSLHEHIANLAGSPAIKKGILQTVKVVDELVKVMGRHKPENIVIEMARENQTTQKGQKNSRERMKRIEEGIKELGSQILKEHPVENTQLQNEKLYLYYLQNGRDMYVDQELDINRLSDYDVDHIVPQSFLKDDSIDNKVLTRSDKARGKSDNVPSEEVVKKMKNYWRQLLNAKLITQRKFDNLTKAERGGLSELDKAGFIKRQLVETRQITKHVAQILDSRMNTKYDENDKLIREVKVITLKSKLVSDFRKDFQFYKVREINNYHHAHDAYLNAVVGTALIKKYPKLESEFVYGDYKVYDVRKMIAKSEQEIGKATAKYFFYSNIMNFFKTEITLANGEIRKRPLIETNGETGEIVWDKGRDFATVRKVLSMPQVNIVKKTEVQTGGFSKESILPKRNSDKLIARKKDWDPKKYGGFDSPTVAYSVLVVAKVEKGKSKKLKSVKELLGITIMERSSFEKNPIDFLEAKGYKEVKKDLIIKLPKYSLFELENGRKRMLASAGELQKGNELALPSKYVNFLYLASHYEKLKGSPEDNEQKQLFVEQHKHYLDEIIEQISEFSKRVILADANLDKVLSAYNKHRDKPIREQAENIIHLFTLTNLGAPAAFKYFDTTIDRKRYTSTKEVLDATLIHQSITGLYETRIDLSQLGGDGGEAAAKGGGPAPGGTVSLQDEHRLFDIPVTTSLPDVWLQDFPQAWAETGGLGRAKCQAPIIIDLKPTAVPVSIKQYPMSLEAHMGIRQHIIKFLELGVLRPCRSPWNTPLLPVKKPGTQDYRPVQDLREINKRTVDIHPTVPNPYNLLSTLKPDYSWYTVLDLKDAFFCLPLAPQSQELFAFEWKDPERGISGQLTWTRLPQGFKNSPTLFNEALHRDLTDFRTQHPEVTLLQYVDDLLLAAPTKKACTQGTRHLLQELGEKGYRASAKKAQICQTKVTYLGYILSEGKRWLTPGRIETVARIPPPRNPREVREFLGKAGFCRLFIPGFAELAAPLYALTKPSTPFTWQTEHQLAFEALKKALLSAPALGLPDTSKPFTLFLDERQGIAKGVLTQKLGPWKRPVAYLSKKLDPVAAGWPPCLRIMAATAMLVKDSAKLTLGQPLTVITPHTLEAIVRQPPDRWITNARLTHYQALLLDTDRVQFGPPVTLNPATLLPVPENQPSPHDCRQVLAETHGTREDLKDQELPDADHTWYTDGSSYLDSGTRRAGAAVVDGHNTIWAQSLPPGTSAQKAELIALTKALELSKGKKANIYTDSRYAFATAHTHGSIYERRGWLTSEGKEIKNKAEIIALLKALFLPQEVAIIHCPGHQKGQDPVAVGNRQADRVARQAAMAEVLTLATEPDNTSHITAGKRTADGSEFEKRTADGSEFESPKKKAKVE

SEQ ID NO: 2042 - protein, 2100 aa, synthetic construct
MPAAKRVKLDGGDKKYSIGLDIGTNSVGWAVITDEYKVPSKKFKVLGNTDRHSIKKNLIGALLFDSGETAEATRLKRTARRRYTRRKNRICYLQEIFSNEMAKVDDSFFHRLEESFLVEEDKKHERHPIFGNIVDEVAYHEKYPTIYHLRKKLVDSTDKADLRLIYLALAHMIKFRGHFLIEGDLNPDNSDVDKLFIQLVQTYNQLFEENPINASGVDAKAILSARLSKSRRLENLIAQLPGEKKNGLFGNLIALSLGLTPNFKSNFDLAEDAKLQLSKDTYDDDLDNLLAQIGDQYADLFLAAKNLSDAILLSDILRVNTEITKAPLSASMIKRYDEHHQDLTLLKALVRQQLPEKYKEIFFDQSKNGYAGYIDGGASQEEFYKFIKPILEKMDGTEELLVKLNREDLLRKQRTFDNGSIPHQIHLGELHAILRRQEDFYPFLKDNREKIEKILTFRIPYYVGPLARGNSRFAWMTRKSEETITPWNFEEVVDKGASAQSFIERMTNFDKNLPNEKVLPKHSLLYEYFTVYNELTKVKYVTEGMRKPAFLSGEQKKAIVDLLFKTNRKVTVKQLKEDYFKKIECFDSVEISGVEDRFNASLGTYHDLLKIIKDKDFLDNEENEDILEDIVLTLTLFEDREMIEERLKTYAHLFDDKVMKQLKRRRYTGWGRLSRKLINGIRDKQSGKTILDFLKSDGFANRNFMQLIHDDSLTFKEDIQKAQVSGQGDSLHEHIANLAGSPAIKKGILQTVKVVDELVKVMGRHKPENIVIEMARENQTTQKGQKNSRERMKRIEEGIKELGSQILKEHPVENTQLQNEKLYLYYLQNGRDMYVDQELDINRLSDYDVDHIVPQSFLKDDSIDNKVLTRSDKARGKSDNVPSEEVVKKMKNYWRQLLNAKLITQRKFDNLTKAERGGLSELDKAGFIKRQLVETRQITKHVAQILDSRMNTKYDENDKLIREVKVITLKSKLVSDFRKDFQFYKVREINNYHHAHDAYLNAVVGTALIKKYPKLESEFVYGDYKVYDVRKMIAKSEQEIGKATAKYFFYSNIMNFFKTEITLANGEIRKRPLIETNGETGEIVWDKGRDFATVRKVLSMPQVNIVKKTEVQTGGFSKESILPKRNSDKLIARKKDWDPKKYGGFDSPTVAYSVLVVAKVEKGKSKKLKSVKELLGITIMERSSFEKNPIDFLEAKGYKEVKKDLIIKLPKYSLFELENGRKRMLASAGELQKGNELALPSKYVNFLYLASHYEKLKGSPEDNEQKQLFVEQHKHYLDEIIEQISEFSKRVILADANLDKVLSAYNKHRDKPIREQAENIIHLFTLTNLGAPAAFKYFDTTIDRKRYTSTKEVLDATLIHQSITGLYETRIDLSQLGGDGGGSSGSSGSSGGTVSLQDEHRLFDIPVTTSLPDVWLQDFPQAWAETGGLGRAKCQAPIIIDLKPTAVPVSIKQYPMSLEAHMGIRQHIIKFLELGVLRPCRSPWNTPLLPVKKPGTQDYRPVQDLREINKRTVDIHPTVPNPYNLLSTLKPDYSWYTVLDLKDAFFCLPLAPQSQELFAFEWKDPERGISGQLTWTRLPQGFKNSPTLFNEALHRDLTDFRTQHPEVTLLQYVDDLLLAAPTKKACTQGTRHLLQELGEKGYRASAKKAQICQTKVTYLGYILSEGKRWLTPGRIETVARIPPPRNPREVREFLGKAGFCRLFIPGFAELAAPLYALTKPSTPFTWQTEHQLAFEALKKALLSAPALGLPDTSKPFTLFLDERQGIAKGVLTQKLGPWKRPVAYLSKKLDPVAAGWPPCLRIMAATAMLVKDSAKLTLGQPLTVITPHTLEAIVRQPPDRWITNARLTHYQALLLDTDRVQFGPPVTLNPATLLPVPENQPSPHDCRQVLAETHGTREDLKDQELPDADHTWYTDGSSYLDSGTRRAGAAVVDGHNTIWAQSLPPGTSAQKAELIALTKALELSKGKKANIYTDSRYAFATAHTHGSIYERRGWLTSEGKEIKNKAEIIALLKALFLPQEVAIIHCPGHQKGQDPVAVGNRQADRVARQAAMAEVLTLATEPDNTSHITAGKRTADGSEFEKRTADGSEFESPKKKAKVE

SEQ ID NO: 2043 - protein, 2106 aa, synthetic construct
MPAAKRVKLDGGDKKYSIGLDIGTNSVGWAVITDEYKVPSKKFKVLGNTDRHSIKKNLIGALLFDSGETAEATRLKRTARRRYTRRKNRICYLQEIFSNEMAKVDDSFFHRLEESFLVEEDKKHERHPIFGNIVDEVAYHEKYPTIYHLRKKLVDSTDKADLRLIYLALAHMIKFRGHFLIEGDLNPDNSDVDKLFIQLVQTYNQLFEENPINASGVDAKAILSARLSKSRRLENLIAQLPGEKKNGLFGNLIALSLGLTPNFKSNFDLAEDAKLQLSKDTYDDDLDNLLAQIGDQYADLFLAAKNLSDAILLSDILRVNTEITKAPLSASMIKRYDEHHQDLTLLKALVRQQLPEKYKEIFFDQSKNGYAGYIDGGASQEEFYKFIKPILEKMDGTEELLVKLNREDLLRKQRTFDNGSIPHQIHLGELHAILRRQEDFYPFLKDNREKIEKILTFRIPYYVGPLARGNSRFAWMTRKSEETITPWNFEEVVDKGASAQSFIERMTNFDKNLPNEKVLPKHSLLYEYFTVYNELTKVKYVTEGMRKPAFLSGEQKKAIVDLLFKTNRKVTVKQLKEDYFKKIECFDSVEISGVEDRFNASLGTYHDLLKIIKDKDFLDNEENEDILEDIVLTLTLFEDREMIEERLKTYAHLFDDKVMKQLKRRRYTGWGRLSRKLINGIRDKQSGKTILDFLKSDGFANRNFMQLIHDDSLTFKEDIQKAQVSGQGDSLHEHIANLAGSPAIKKGILQTVKVVDELVKVMGRHKPENIVIEMARENQTTQKGQKNSRERMKRIEEGIKELGSQILKEHPVENTQLQNEKLYLYYLQNGRDMYVDQELDINRLSDYDVDHIVPQSFLKDDSIDNKVLTRSDKARGKSDNVPSEEVVKKMKNYWRQLLNAKLITQRKFDNLTKAERGGLSELDKAGFIKRQLVETRQITKHVAQILDSRMNTKYDENDKLIREVKVITLKSKLVSDFRKDFQFYKVREINNYHHAHDAYLNAVVGTALIKKYPKLESEFVYGDYKVYDVRKMIAKSEQEIGKATAKYFFYSNIMNFFKTEITLANGEIRKRPLIETNGETGEIVWDKGRDFATVRKVLSMPQVNIVKKTEVQTGGFSKESILPKRNSDKLIARKKDWDPKKYGGFDSPTVAYSVLVVAKVEKGKSKKLKSVKELLGITIMERSSFEKNPIDFLEAKGYKEVKKDLIIKLPKYSLFELENGRKRMLASAGELQKGNELALPSKYVNFLYLASHYEKLKGSPEDNEQKQLFVEQHKHYLDEIIEQISEFSKRVILADANLDKVLSAYNKHRDKPIREQAENIIHLFTLTNLGAPAAFKYFDTTIDRKRYTSTKEVLDATLIHQSITGLYETRIDLSQLGGDGGEAAAKEAAAKEAAAKGGTVSLQDEHRLFDIPVTTSLPDVWLQDFPQAWAETGGLGRAKCQAPIIIDLKPTAVPVSIKQYPMSLEAHMGIRQHIIKFLELGVLRPCRSPWNTPLLPVKKPGTQDYRPVQDLREINKRTVDIHPTVPNPYNLLSTLKPDYSWYTVLDLKDAFFCLPLAPQSQELFAFEWKDPERGISGQLTWTRLPQGFKNSPTLFNEALHRDLTDFRTQHPEVTLLQYVDDLLLAAPTKKACTQGTRHLLQELGEKGYRASAKKAQICQTKVTYLGYILSEGKRWLTPGRIETVARIPPPRNPREVREFLGKAGFCRLFIPGFAELAAPLYALTKPSTPFTWQTEHQLAFEALKKALLSAPALGLPDTSKPFTLFLDERQGIAKGVLTQKLGPWKRPVAYLSKKLDPVAAGWPPCLRIMAATAMLVKDSAKLTLGQPLTVITPHTLEAIVRQPPDRWITNARLTHYQALLLDTDRVQFGPPVTLNPATLLPVPENQPSPHDCRQVLAETHGTREDLKDQELPDADHTWYTDGSSYLDSGTRRAGAAVVDGHNTIWAQSLPPGTSAQKAELIALTKALELSKGKKANIYTDSRYAFATAHTHGSIYERRGWLTSEGKEIKNKAEIIALLKALFLPQEVAIIHCPGHQKGQDPVAVGNRQADRVARQAAMAEVLTLATEPDNTSHITAGKRTADGSEFEKRTADGSEFESPKKKAKVE

SEQ ID NO: 2044 - protein, 2102 aa, synthetic construct
MPAAKRVKLDGGDKKYSIGLDIGTNSVGWAVITDEYKVPSKKFKVLGNTDRHSIKKNLIGALLFDSGETAEATRLKRTARRRYTRRKNRICYLQEIFSNEMAKVDDSFFHRLEESFLVEEDKKHERHPIFGNIVDEVAYHEKYPTIYHLRKKLVDSTDKADLRLIYLALAHMIKFRGHFLIEGDLNPDNSDVDKLFIQLVQTYNQLFEENPINASGVDAKAILSARLSKSRRLENLIAQLPGEKKNGLFGNLIALSLGLTPNFKSNFDLAEDAKLQLSKDTYDDDLDNLLAQIGDQYADLFLAAKNLSDAILLSDILRVNTEITKAPLSASMIKRYDEHHQDLTLLKALVRQQLPEKYKEIFFDQSKNGYAGYIDGGASQEEFYKFIKPILEKMDGTEELLVKLNREDLLRKQRTFDNGSIPHQIHLGELHAILRRQEDFYPFLKDNREKIEKILTFRIPYYVGPLARGNSRFAWMTRKSEETITPWNFEEVVDKGASAQSFIERMTNFDKNLPNEKVLPKHSLLYEYFTVYNELTKVKYVTEGMRKPAFLSGEQKKAIVDLLFKTNRKVTVKQLKEDYFKKIECFDSVEISGVEDRFNASLGTYHDLLKIIKDKDFLDNEENEDILEDIVLTLTLFEDREMIEERLKTYAHLFDDKVMKQLKRRRYTGWGRLSRKLINGIRDKQSGKTILDFLKSDGFANRNFMQLIHDDSLTFKEDIQKAQVSGQGDSLHEHIANLAGSPAIKKGILQTVKVVDELVKVMGRHKPENIVIEMARENQTTQKGQKNSRERMKRIEEGIKELGSQILKEHPVENTQLQNEKLYLYYLQNGRDMYVDQELDINRLSDYDVDHIVPQSFLKDDSIDNKVLTRSDKARGKSDNVPSEEVVKKMKNYWRQLLNAKLITQRKFDNLTKAERGGLSELDKAGFIKRQLVETRQITKHVAQILDSRMNTKYDENDKLIREVKVITLKSKLVSDFRKDFQFYKVREINNYHHAHDAYLNAVVGTALIKKYPKLESEFVYGDYKVYDVRKMIAKSEQEIGKATAKYFFYSNIMNFFKTEITLANGEIRKRPLIETNGETGEIVWDKGRDFATVRKVLSMPQVNIVKKTEVQTGGFSKESILPKRNSDKLIARKKDWDPKKYGGFDSPTVAYSVLVVAKVEKGKSKKLKSVKELLGITIMERSSFEKNPIDFLEAKGYKEVKKDLIIKLPKYSLFELENGRKRMLASAGELQKGNELALPSKYVNFLYLASHYEKLKGSPEDNEQKQLFVEQHKHYLDEIIEQISEFSKRVILADANLDKVLSAYNKHRDKPIREQAENIIHLFTLTNLGAPAAFKYFDTTIDRKRYTSTKEVLDATLIHQSITGLYETRIDLSQLGGDGGPAPEAAAKGGSGGTVSLQDEHRLFDIPVTTSLPDVWLQDFPQAWAETGGLGRAKCQAPIIIDLKPTAVPVSIKQYPMSLEAHMGIRQHIIKFLELGVLRPCRSPWNTPLLPVKKPGTQDYRPVQDLREINKRTVDIHPTVPNPYNLLSTLKPDYSWYTVLDLKDAFFCLPLAPQSQELFAFEWKDPERGISGQLTWTRLPQGFKNSPTLFNEALHRDLTDFRTQHPEVTLLQYVDDLLLAAPTKKACTQGTRHLLQELGEKGYRASAKKAQICQTKVTYLGYILSEGKRWLTPGRIETVARIPPPRNPREVREFLGKAGFCRLFIPGFAELAAPLYALTKPSTPFTWQTEHQLAFEALKKALLSAPALGLPDTSKPFTLFLDERQGIAKGVLTQKLGPWKRPVAYLSKKLDPVAAGWPPCLRIMAATAMLVKDSAKLTLGQPLTVITPHTLEAIVRQPPDRWITNARLTHYQALLLDTDRVQFGPPVTLNPATLLPVPENQPSPHDCRQVLAETHGTREDLKDQELPDADHTWYTDGSSYLDSGTRRAGAAVVDGHNTIWAQSLPPGTSAQKAELIALTKALELSKGKKANIYTDSRYAFATAHTHGSIYERRGWLTSEGKEIKNKAEIIALLKALFLPQEVAIIHCPGHQKGQDPVAVGNRQADRVARQAAMAEVLTLATEPDNTSHITAGKRTADGSEFEKRTADGSEFESPKKKAKVE

SEQ ID NO: 2045 - protein, 2124 aa, synthetic construct
MPAAKRVKLDGGDKKYSIGLDIGTNSVGWAVITDEYKVPSKKFKVLGNTDRHSIKKNLIGALLFDSGETAEATRLKRTARRRYTRRKNRICYLQEIFSNEMAKVDDSFFHRLEESFLVEEDKKHERHPIFGNIVDEVAYHEKYPTIYHLRKKLVDSTDKADLRLIYLALAHMIKFRGHFLIEGDLNPDNSDVDKLFIQLVQTYNQLFEENPINASGVDAKAILSARLSKSRRLENLIAQLPGEKKNGLFGNLIALSLGLTPNFKSNFDLAEDAKLQLSKDTYDDDLDNLLAQIGDQYADLFLAAKNLSDAILLSDILRVNTEITKAPLSASMIKRYDEHHQDLTLLKALVRQQLPEKYKEIFFDQSKNGYAGYIDGGASQEEFYKFIKPILEKMDGTEELLVKLNREDLLRKQRTFDNGSIPHQIHLGELHAILRRQEDFYPFLKDNREKIEKILTFRIPYYVGPLARGNSRFAWMTRKSEETITPWNFEEVVDKGASAQSFIERMTNFDKNLPNEKVLPKHSLLYEYFTVYNELTKVKYVTEGMRKPAFLSGEQKKAIVDLLFKTNRKVTVKQLKEDYFKKIECFDSVEISGVEDRFNASLGTYHDLLKIIKDKDFLDNEENEDILEDIVLTLTLFEDREMIEERLKTYAHLFDDKVMKQLKRRRYTGWGRLSRKLINGIRDKQSGKTILDFLKSDGFANRNFMQLIHDDSLTFKEDIQKAQVSGQGDSLHEHIANLAGSPAIKKGILQTVKVVDELVKVMGRHKPENIVIEMARENQTTQKGQKNSRERMKRIEEGIKELGSQILKEHPVENTQLQNEKLYLYYLQNGRDMYVDQELDINRLSDYDVDHIVPQSFLKDDSIDNKVLTRSDKARGKSDNVPSEEVVKKMKNYWRQLLNAKLITQRKFDNLTKAERGGLSELDKAGFIKRQLVETRQITKHVAQILDSRMNTKYDENDKLIREVKVITLKSKLVSDFRKDFQFYKVREINNYHHAHDAYLNAVVGTALIKKYPKLESEFVYGDYKVYDVRKMIAKSEQEIGKATAKYFFYSNIMNFFKTEITLANGEIRKRPLIETNGETGEIVWDKGRDFATVRKVLSMPQVNIVKKTEVQTGGFSKESILPKRNSDKLIARKKDWDPKKYGGFDSPTVAYSVLVVAKVEKGKSKKLKSVKELLGITIMERSSFEKNPIDFLEAKGYKEVKKDLIIKLPKYSLFELENGRKRMLASAGELQKGNELALPSKYVNFLYLASHYEKLKGSPEDNEQKQLFVEQHKHYLDEIIEQISEFSKRVILADANLDKVLSAYNKHRDKPIREQAENIIHLFTLTNLGAPAAFKYFDTTIDRKRYTSTKEVLDATLIHQSITGLYETRIDLSQLGGDGGSGGSSGGSSGSETPGTSESATPESSGGSSGGSSGGTVSLQDEHRLFDIPVTTSLPDVWLQDFPQAWAETGGLGRAKCQAPIIIDLKPTAVPVSIKQYPMSLEAHMGIRQHIIKFLELGVLRPCRSPWNTPLLPVKKPGTQDYRPVQDLREINKRTVDIHPTVPNPYNLLSTLKPDYSWYTVLDLKDAFFCLPLAPQSQELFAFEWKDPERGISGQLTWTRLPQGFKNSPTLFNEALHRDLTDFRTQHPEVTLLQYVDDLLLAAPTKKACTQGTRHLLQELGEKGYRASAKKAQICQTKVTYLGYILSEGKRWLTPGRIETVARIPPPRNPREVREFLGKAGFCRLFIPGFAELAAPLYALTKPSTPFTWQTEHQLAFEALKKALLSAPALGLPDTSKPFTLFLDERQGIAKGVLTQKLGPWKRPVAYLSKKLDPVAAGWPPCLRIMAATAMLVKDSAKLTLGQPLTVITPHTLEAIVRQPPDRWITNARLTHYQALLLDTDRVQFGPPVTLNPATLLPVPENQPSPHDCRQVLAETHGTREDLKDQELPDADHTWYTDGSSYLDSGTRRAGAAVVDGHNTIWAQSLPPGTSAQKAELIALTKALELSKGKKANIYTDSRYAFATAHTHGSIYERRGWLTSEGKEIKNKAEIIALLKALFLPQEVAIIHCPGHQKGQDPVAVGNRQADRVARQAAMAEVLTLATEPDNTSHITAGKRTADGSEFEKRTADGSEFESPKKKAKVE

SEQ ID NO: 2046 - protein, 2102 aa, synthetic construct
MPAAKRVKLDGGDKKYSIGLDIGTNSVGWAVITDEYKVPSKKFKVLGNTDRHSIKKNLIGALLFDSGETAEATRLKRTARRRYTRRKNRICYLQEIFSNEMAKVDDSFFHRLEESFLVEEDKKHERHPIFGNIVDEVAYHEKYPTIYHLRKKLVDSTDKADLRLIYLALAHMIKFRGHFLIEGDLNPDNSDVDKLFIQLVQTYNQLFEENPINASGVDAKAILSARLSKSRRLENLIAQLPGEKKNGLFGNLIALSLGLTPNFKSNFDLAEDAKLQLSKDTYDDDLDNLLAQIGDQYADLFLAAKNLSDAILLSDILRVNTEITKAPLSASMIKRYDEHHQDLTLLKALVRQQLPEKYKEIFFDQSKNGYAGYIDGGASQEEFYKFIKPILEKMDGTEELLVKLNREDLLRKQRTFDNGSIPHQIHLGELHAILRRQEDFYPFLKDNREKIEKILTFRIPYYVGPLARGNSRFAWMTRKSEETITPWNFEEVVDKGASAQSFIERMTNFDKNLPNEKVLPKHSLLYEYFTVYNELTKVKYVTEGMRKPAFLSGEQKKAIVDLLFKTNRKVTVKQLKEDYFKKIECFDSVEISGVEDRFNASLGTYHDLLKIIKDKDFLDNEENEDILEDIVLTLTLFEDREMIEERLKTYAHLFDDKVMKQLKRRRYTGWGRLSRKLINGIRDKQSGKTILDFLKSDGFANRNFMQLIHDDSLTFKEDIQKAQVSGQGDSLHEHIANLAGSPAIKKGILQTVKVVDELVKVMGRHKPENIVIEMARENQTTQKGQKNSRERMKRIEEGIKELGSQILKEHPVENTQLQNEKLYLYYLQNGRDMYVDQELDINRLSDYDVDHIVPQSFLKDDSIDNKVLTRSDKARGKSDNVPSEEVVKKMKNYWRQLLNAKLITQRKFDNLTKAERGGLSELDKAGFIKRQLVETRQITKHVAQILDSRMNTKYDENDKLIREVKVITLKSKLVSDFRKDFQFYKVREINNYHHAHDAYLNAVVGTALIKKYPKLESEFVYGDYKVYDVRKMIAKSEQEIGKATAKYFFYSNIMNFFKTEITLANGEIRKRPLIETNGETGEIVWDKGRDFATVRKVLSMPQVNIVKKTEVQTGGFSKESILPKRNSDKLIARKKDWDPKKYGGFDSPTVAYSVLVVAKVEKGKSKKLKSVKELLGITIMERSSFEKNPIDFLEAKGYKEVKKDLIIKLPKYSLFELENGRKRMLASAGELQKGNELALPSKYVNFLYLASHYEKLKGSPEDNEQKQLFVEQHKHYLDEIIEQISEFSKRVILADANLDKVLSAYNKHRDKPIREQAENIIHLFTLTNLGAPAAFKYFDTTIDRKRYTSTKEVLDATLIHQSITGLYETRIDLSQLGGDGGGGSEAAAKGSSGGTVSLQDEHRLFDIPVTTSLPDVWLQDFPQAWAETGGLGRAKCQAPIIIDLKPTAVPVSIKQYPMSLEAHMGIRQHIIKFLELGVLRPCRSPWNTPLLPVKKPGTQDYRPVQDLREINKRTVDIHPTVPNPYNLLSTLKPDYSWYTVLDLKDAFFCLPLAPQSQELFAFEWKDPERGISGQLTWTRLPQGFKNSPTLFNEALHRDLTDFRTQHPEVTLLQYVDDLLLAAPTKKACTQGTRHLLQELGEKGYRASAKKAQICQTKVTYLGYILSEGKRWLTPGRIETVARIPPPRNPREVREFLGKAGFCRLFIPGFAELAAPLYALTKPSTPFTWQTEHQLAFEALKKALLSAPALGLPDTSKPFTLFLDERQGIAKGVLTQKLGPWKRPVAYLSKKLDPVAAGWPPCLRIMAATAMLVKDSAKLTLGQPLTVITPHTLEAIVRQPPDRWITNARLTHYQALLLDTDRVQFGPPVTLNPATLLPVPENQPSPHDCRQVLAETHGTREDLKDQELPDADHTWYTDGSSYLDSGTRRAGAAVVDGHNTIWAQSLPPGTSAQKAELIALTKALELSKGKKANIYTDSRYAFATAHTHGSIYERRGWLTSEGKEIKNKAEIIALLKALFLPQEVAIIHCPGHQKGQDPVAVGNRQADRVARQAAMAEVLTLATEPDNTSHITAGKRTADGSEFEKRTADGSEFESPKKKAKVE

SEQ ID NO: 2047 - protein, 2097 aa, synthetic construct
MPAAKRVKLDGGDKKYSIGLDIGTNSVGWAVITDEYKVPSKKFKVLGNTDRHSIKKNLIGALLFDSGETAEATRLKRTARRRYTRRKNRICYLQEIFSNEMAKVDDSFFHRLEESFLVEEDKKHERHPIFGNIVDEVAYHEKYPTIYHLRKKLVDSTDKADLRLIYLALAHMIKFRGHFLIEGDLNPDNSDVDKLFIQLVQTYNQLFEENPINASGVDAKAILSARLSKSRRLENLIAQLPGEKKNGLFGNLIALSLGLTPNFKSNFDLAEDAKLQLSKDTYDDDLDNLLAQIGDQYADLFLAAKNLSDAILLSDILRVNTEITKAPLSASMIKRYDEHHQDLTLLKALVRQQLPEKYKEIFFDQSKNGYAGYIDGGASQEEFYKFIKPILEKMDGTEELLVKLNREDLLRKQRTFDNGSIPHQIHLGELHAILRRQEDFYPFLKDNREKIEKILTFRIPYYVGPLARGNSRFAWMTRKSEETITPWNFEEVVDKGASAQSFIERMTNFDKNLPNEKVLPKHSLLYEYFTVYNELTKVKYVTEGMRKPAFLSGEQKKAIVDLLFKTNRKVTVKQLKEDYFKKIECFDSVEISGVEDRFNASLGTYHDLLKIIKDKDFLDNEENEDILEDIVLTLTLFEDREMIEERLKTYAHLFDDKVMKQLKRRRYTGWGRLSRKLINGIRDKQSGKTILDFLKSDGFANRNFMQLIHDDSLTFKEDIQKAQVSGQGDSLHEHIANLAGSPAIKKGILQTVKVVDELVKVMGRHKPENIVIEMARENQTTQKGQKNSRERMKRIEEGIKELGSQILKEHPVENTQLQNEKLYLYYLQNGRDMYVDQELDINRLSDYDVDHIVPQSFLKDDSIDNKVLTRSDKARGKSDNVPSEEVVKKMKNYWRQLLNAKLITQRKFDNLTKAERGGLSELDKAGFIKRQLVETRQITKHVAQILDSRMNTKYDENDKLIREVKVITLKSKLVSDFRKDFQFYKVREINNYHHAHDAYLNAVVGTALIKKYPKLESEFVYGDYKVYDVRKMIAKSEQEIGKATAKYFFYSNIMNFFKTEITLANGEIRKRPLIETNGETGEIVWDKGRDFATVRKVLSMPQVNIVKKTEVQTGGFSKESILPKRNSDKLIARKKDWDPKKYGGFDSPTVAYSVLVVAKVEKGKSKKLKSVKELLGITIMERSSFEKNPIDFLEAKGYKEVKKDLIIKLPKYSLFELENGRKRMLASAGELQKGNELALPSKYVNFLYLASHYEKLKGSPEDNEQKQLFVEQHKHYLDEIIEQISEFSKRVILADANLDKVLSAYNKHRDKPIREQAENIIHLFTLTNLGAPAAFKYFDTTIDRKRYTSTKEVLDATLIHQSITGLYETRIDLSQLGGDGGGSSGGSGGTVSLQDEHRLFDIPVTTSLPDVWLQDFPQAWAETGGLGRAKCQAPIIIDLKPTAVPVSIKQYPMSLEAHMGIRQHIIKFLELGVLRPCRSPWNTPLLPVKKPGTQDYRPVQDLREINKRTVDIHPTVPNPYNLLSTLKPDYSWYTVLDLKDAFFCLPLAPQSQELFAFEWKDPERGISGQLTWTRLPQGFKNSPTLFNEALHRDLTDFRTQHPEVTLLQYVDDLLLAAPTKKACTQGTRHLLQELGEKGYRASAKKAQICQTKVTYLGYILSEGKRWLTPGRIETVARIPPPRNPREVREFLGKAGFCRLFIPGFAELAAPLYALTKPSTPFTWQTEHQLAFEALKKALLSAPALGLPDTSKPFTLFLDERQGIAKGVLTQKLGPWKRPVAYLSKKLDPVAAGWPPCLRIMAATAMLVKDSAKLTLGQPLTVITPHTLEAIVRQPPDRWITNARLTHYQALLLDTDRVQFGPPVTLNPATLLPVPENQPSPHDCRQVLAETHGTREDLKDQELPDADHTWYTDGSSYLDSGTRRAGAAVVDGHNTIWAQSLPPGTSAQKAELIALTKALELSKGKKANIYTDSRYAFATAHTHGSIYERRGWLTSEGKEIKNKAEIIALLKALFLPQEVAIIHCPGHQKGQDPVAVGNRQADRVARQAAMAEVLTLATEPDNTSHITAGKRTADGSEFEKRTADGSEFESPKKKAKVE

SEQ ID NO: 2048 - protein, 2096 aa, synthetic construct
MPAAKRVKLDGGDKKYSIGLDIGTNSVGWAVITDEYKVPSKKFKVLGNTDRHSIKKNLIGALLFDSGETAEATRLKRTARRRYTRRKNRICYLQEIFSNEMAKVDDSFFHRLEESFLVEEDKKHERHPIFGNIVDEVAYHEKYPTIYHLRKKLVDSTDKADLRLIYLALAHMIKFRGHFLIEGDLNPDNSDVDKLFIQLVQTYNQLFEENPINASGVDAKAILSARLSKSRRLENLIAQLPGEKKNGLFGNLIALSLGLTPNFKSNFDLAEDAKLQLSKDTYDDDLDNLLAQIGDQYADLFLAAKNLSDAILLSDILRVNTEITKAPLSASMIKRYDEHHQDLTLLKALVRQQLPEKYKEIFFDQSKNGYAGYIDGGASQEEFYKFIKPILEKMDGTEELLVKLNREDLLRKQRTFDNGSIPHQIHLGELHAILRRQEDFYPFLKDNREKIEKILTFRIPYYVGPLARGNSRFAWMTRKSEETITPWNFEEVVDKGASAQSFIERMTNFDKNLPNEKVLPKHSLLYEYFTVYNELTKVKYVTEGMRKPAFLSGEQKKAIVDLLFKTNRKVTVKQLKEDYFKKIECFDSVEISGVEDRFNASLGTYHDLLKIIKDKDFLDNEENEDILEDIVLTLTLFEDREMIEERLKTYAHLFDDKVMKQLKRRRYTGWGRLSRKLINGIRDKQSGKTILDFLKSDGFANRNFMQLIHDDSLTFKEDIQKAQVSGQGDSLHEHIANLAGSPAIKKGILQTVKVVDELVKVMGRHKPENIVIEMARENQTTQKGQKNSRERMKRIEEGIKELGSQILKEHPVENTQLQNEKLYLYYLQNGRDMYVDQELDINRLSDYDVDHIVPQSFLKDDSIDNKVLTRSDKARGKSDNVPSEEVVKKMKNYWRQLLNAKLITQRKFDNLTKAERGGLSELDKAGFIKRQLVETRQITKHVAQILDSRMNTKYDENDKLIREVKVITLKSKLVSDFRKDFQFYKVREINNYHHAHDAYLNAVVGTALIKKYPKLESEFVYGDYKVYDVRKMIAKSEQEIGKATAKYFFYSNIMNFFKTEITLANGEIRKRPLIETNGETGEIVWDKGRDFATVRKVLSMPQVNIVKKTEVQTGGFSKESILPKRNSDKLIARKKDWDPKKYGGFDSPTVAYSVLVVAKVEKGKSKKLKSVKELLGITIMERSSFEKNPIDFLEAKGYKEVKKDLIIKLPKYSLFELENGRKRMLASAGELQKGNELALPSKYVNFLYLASHYEKLKGSPEDNEQKQLFVEQHKHYLDEIIEQISEFSKRVILADANLDKVLSAYNKHRDKPIREQAENIIHLFTLTNLGAPAAFKYFDTTIDRKRYTSTKEVLDATLIHQSITGLYETRIDLSQLGGDGGPAPGGSEAAAKGGLGIEDEYRLHETSTEPDVSLGSTWLSDFPQAWAETGGMGLAVRQAPLIIPLKATSTPVSIQQYPMSHEARLGIKPHIQRLLDQGILVPCQSPWNTPLLPVKKPGTNDYRPVQDLREVNKRVEDIHPTVPNPYNLLSGLPPSHQWYTVLDLKDAFFCLRLHPTSQPLFAFEWRDPGMGISGQLTWTRLPQGFKNSPTLFNEALHRDLADFRIQHPDLILLQYVDDILLAATSELDCQQGTRALLQTLGDLGYRASAKKAQICQKQVKYLGYLLREGQRWLTEARKETVMGQPVPKTPRQLREFLGKAGFCRLFIPGFAEMAAPLYPLTKPGTLFSWGPDQQKAYQEIKQALLTAPALGLPDLTKPFELFVDEKQGYAKGVLTQKLGPWRRPVAYLSKKLDPVAAGWPPCLRMVAAIAVLTKDAGKLTMGQPLVILAPHAVEALVKQPPDRWLSNARMTHYQAMLLDTDRVQFGPVVALNPATLLPLPEEGAPHDCLEILAETHGTRPDLTDQPIPDADHTWYTDGSSFLQEGQRKAGAAVTTETEVIWAGALPAGTSAQRAELIALTQALKMAEGKRLNVYTDSRYAFATAHIHGEIYRRRGWLTSEGREIKNKSEILALLKALFLPKRLSIIHCLGHQKGDSAEARGNRLADQAAREAAIKTPPDTSTLLIAGKRTADGSEFEKRTADGSEFESPKKKAKVE

SEQ ID NO: 2049 - protein, 2100 aa, synthetic construct
MPAAKRVKLDGGDKKYSIGLDIGTNSVGWAVITDEYKVPSKKFKVLGNTDRHSIKKNLIGALLFDSGETAEATRLKRTARRRYTRRKNRICYLQEIFSNEMAKVDDSFFHRLEESFLVEEDKKHERHPIFGNIVDEVAYHEKYPTIYHLRKKLVDSTDKADLRLIYLALAHMIKFRGHFLIEGDLNPDNSDVDKLFIQLVQTYNQLFEENPINASGVDAKAILSARLSKSRRLENLIAQLPGEKKNGLFGNLIALSLGLTPNFKSNFDLAEDAKLQLSKDTYDDDLDNLLAQIGDQYADLFLAAKNLSDAILLSDILRVNTEITKAPLSASMIKRYDEHHQDLTLLKALVRQQLPEKYKEIFFDQSKNGYAGYIDGGASQEEFYKFIKPILEKMDGTEELLVKLNREDLLRKQRTFDNGSIPHQIHLGELHAILRRQEDFYPFLKDNREKIEKILTFRIPYYVGPLARGNSRFAWMTRKSEETITPWNFEEVVDKGASAQSFIERMTNFDKNLPNEKVLPKHSLLYEYFTVYNELTKVKYVTEGMRKPAFLSGEQKKAIVDLLFKTNRKVTVKQLKEDYFKKIECFDSVEISGVEDRFNASLGTYHDLLKIIKDKDFLDNEENEDILEDIVLTLTLFEDREMIEERLKTYAHLFDDKVMKQLKRRRYTGWGRLSRKLINGIRDKQSGKTILDFLKSDGFANRNFMQLIHDDSLTFKEDIQKAQVSGQGDSLHEHIANLAGSPAIKKGILQTVKVVDELVKVMGRHKPENIVIEMARENQTTQKGQKNSRERMKRIEEGIKELGSQILKEHPVENTQLQNEKLYLYYLQNGRDMYVDQELDINRLSDYDVDHIVPQSFLKDDSIDNKVLTRSDKARGKSDNVPSEEVVKKMKNYWRQLLNAKLITQRKFDNLTKAERGGLSELDKAGFIKRQLVETRQITKHVAQILDSRMNTKYDENDKLIREVKVITLKSKLVSDFRKDFQFYKVREINNYHHAHDAYLNAVVGTALIKKYPKLESEFVYGDYKVYDVRKMIAKSEQEIGKATAKYFFYSNIMNFFKTEITLANGEIRKRPLIETNGETGEIVWDKGRDFATVRKVLSMPQVNIVKKTEVQTGGFSKESILPKRNSDKLIARKKDWDPKKYGGFDSPTVAYSVLVVAKVEKGKSKKLKSVKELLGITIMERSSFEKNPIDFLEAKGYKEVKKDLIIKLPKYSLFELENGRKRMLASAGELQKGNELALPSKYVNFLYLASHYEKLKGSPEDNEQKQLFVEQHKHYLDEIIEQISEFSKRVILADANLDKVLSAYNKHRDKPIREQAENIIHLFTLTNLGAPAAFKYFDTTIDRKRYTSTKEVLDATLIHQSITGLYETRIDLSQLGGDGGEAAAKGGGGSEAAAKGGLGIEDEYRLHETSTEPDVSLGSTWLSDFPQAWAETGGMGLAVRQAPLIIPLKATSTPVSIQQYPMSHEARLGIKPHIQRLLDQGILVPCQSPWNTPLLPVKKPGTNDYRPVQDLREVNKRVEDIHPTVPNPYNLLSGLPPSHQWYTVLDLKDAFFCLRLHPTSQPLFAFEWRDPGMGISGQLTWTRLPQGFKNSPTLFNEALHRDLADFRIQHPDLILLQYVDDILLAATSELDCQQGTRALLQTLGDLGYRASAKKAQICQKQVKYLGYLLREGQRWLTEARKETVMGQPVPKTPRQLREFLGKAGFCRLFIPGFAEMAAPLYPLTKPGTLFSWGPDQQKAYQEIKQALLTAPALGLPDLTKPFELFVDEKQGYAKGVLTQKLGPWRRPVAYLSKKLDPVAAGWPPCLRMVAAIAVLTKDAGKLTMGQPLVILAPHAVEALVKQPPDRWLSNARMTHYQAMLLDTDRVQFGPVVALNPATLLPLPEEGAPHDCLEILAETHGTRPDLTDQPIPDADHTWYTDGSSFLQEGQRKAGAAVTTETEVIWAGALPAGTSAQRAELIALTQALKMAEGKRLNVYTDSRYAFATAHIHGEIYRRRGWLTSEGREIKNKSEILALLKALFLPKRLSIIHCLGHQKGDSAEARGNRLADQAAREAAIKTPPDTSTLLIAGKRTADGSEFEKRTADGSEFESPKKKAKVE

SEQ ID NO: 2050 - protein, 2096 aa, synthetic construct
MPAAKRVKLDGGDKKYSIGLDIGTNSVGWAVITDEYKVPSKKFKVLGNTDRHSIKKNLIGALLFDSGETAEATRLKRTARRRYTRRKNRICYLQEIFSNEMAKVDDSFFHRLEESFLVEEDKKHERHPIFGNIVDEVAYHEKYPTIYHLRKKLVDSTDKADLRLIYLALAHMIKFRGHFLIEGDLNPDNSDVDKLFIQLVQTYNQLFEENPINASGVDAKAILSARLSKSRRLENLIAQLPGEKKNGLFGNLIALSLGLTPNFKSNFDLAEDAKLQLSKDTYDDDLDNLLAQIGDQYADLFLAAKNLSDAILLSDILRVNTEITKAPLSASMIKRYDEHHQDLTLLKALVRQQLPEKYKEIFFDQSKNGYAGYIDGGASQEEFYKFIKPILEKMDGTEELLVKLNREDLLRKQRTFDNGSIPHQIHLGELHAILRRQEDFYPFLKDNREKIEKILTFRIPYYVGPLARGNSRFAWMTRKSEETITPWNFEEVVDKGASAQSFIERMTNFDKNLPNEKVLPKHSLLYEYFTVYNELTKVKYVTEGMRKPAFLSGEQKKAIVDLLFKTNRKVTVKQLKEDYFKKIECFDSVEISGVEDRFNASLGTYHDLLKIIKDKDFLDNEENEDILEDIVLTLTLFEDREMIEERLKTYAHLFDDKVMKQLKRRRYTGWGRLSRKLINGIRDKQSGKTILDFLKSDGFANRNFMQLIHDDSLTFKEDIQKAQVSGQGDSLHEHIANLAGSPAIKKGILQTVKVVDELVKVMGRHKPENIVIEMARENQTTQKGQKNSRERMKRIEEGIKELGSQILKEHPVENTQLQNEKLYLYYLQNGRDMYVDQELDINRLSDYDVDHIVPQSFLKDDSIDNKVLTRSDKARGKSDNVPSEEVVKKMKNYWRQLLNAKLITQRKFDNLTKAERGGLSELDKAGFIKRQLVETRQITKHVAQILDSRMNTKYDENDKLIREVKVITLKSKLVSDFRKDFQFYKVREINNYHHAHDAYLNAVVGTALIKKYPKLESEFVYGDYKVYDVRKMIAKSEQEIGKATAKYFFYSNIMNFFKTEITLANGEIRKRPLIETNGETGEIVWDKGRDFATVRKVLSMPQVNIVKKTEVQTGGFSKESILPKRNSDKLIARKKDWDPKKYGGFDSPTVAYSVLVVAKVEKGKSKKLKSVKELLGITIMERSSFEKNPIDFLEAKGYKEVKKDLIIKLPKYSLFELENGRKRMLASAGELQKGNELALPSKYVNFLYLASHYEKLKGSPEDNEQKQLFVEQHKHYLDEIIEQISEFSKRVILADANLDKVLSAYNKHRDKPIREQAENIIHLFTLTNLGAPAAFKYFDTTIDRKRYTSTKEVLDATLIHQSITGLYETRIDLSQLGGDGGPAPGSSEAAAKGGLGIEDEYRLHETSTEPDVSLGSTWLSDFPQAWAETGGMGLAVRQAPLIIPLKATSTPVSIQQYPMSHEARLGIKPHIQRLLDQGILVPCQSPWNTPLLPVKKPGTNDYRPVQDLREVNKRVEDIHPTVPNPYNLLSGLPPSHQWYTVLDLKDAFFCLRLHPTSQPLFAFEWRDPGMGISGQLTWTRLPQGFKNSPTLFNEALHRDLADFRIQHPDLILLQYVDDILLAATSELDCQQGTRALLQTLGDLGYRASAKKAQICQKQVKYLGYLLREGQRWLTEARKETVMGQPVPKTPRQLREFLGKAGFCRLFIPGFAEMAAPLYPLTKPGTLFSWGPDQQKAYQEIKQALLTAPALGLPDLTKPFELFVDEKQGYAKGVLTQKLGPWRRPVAYLSKKLDPVAAGWPPCLRMVAAIAVLTKDAGKLTMGQPLVILAPHAVEALVKQPPDRWLSNARMTHYQAMLLDTDRVQFGPVVALNPATLLPLPEEGAPHDCLEILAETHGTRPDLTDQPIPDADHTWYTDGSSFLQEGQRKAGAAVTTETEVIWAGALPAGTSAQRAELIALTQALKMAEGKRLNVYTDSRYAFATAHIHGEIYRRRGWLTSEGREIKNKSEILALLKALFLPKRLSIIHCLGHQKGDSAEARGNRLADQAAREAAIKTPPDTSTLLIAGKRTADGSEFEKRTADGSEFESPKKKAKVE

SEQ ID NO: 2051 - protein, 2094 aa, synthetic construct
MPAAKRVKLDGGDKKYSIGLDIGTNSVGWAVITDEYKVPSKKFKVLGNTDRHSIKKNLIGALLFDSGETAEATRLKRTARRRYTRRKNRICYLQEIFSNEMAKVDDSFFHRLEESFLVEEDKKHERHPIFGNIVDEVAYHEKYPTIYHLRKKLVDSTDKADLRLIYLALAHMIKFRGHFLIEGDLNPDNSDVDKLFIQLVQTYNQLFEENPINASGVDAKAILSARLSKSRRLENLIAQLPGEKKNGLFGNLIALSLGLTPNFKSNFDLAEDAKLQLSKDTYDDDLDNLLAQIGDQYADLFLAAKNLSDAILLSDILRVNTEITKAPLSASMIKRYDEHHQDLTLLKALVRQQLPEKYKEIFFDQSKNGYAGYIDGGASQEEFYKFIKPILEKMDGTEELLVKLNREDLLRKQRTFDNGSIPHQIHLGELHAILRRQEDFYPFLKDNREKIEKILTFRIPYYVGPLARGNSRFAWMTRKSEETITPWNFEEVVDKGASAQSFIERMTNFDKNLPNEKVLPKHSLLYEYFTVYNELTKVKYVTEGMRKPAFLSGEQKKAIVDLLFKTNRKVTVKQLKEDYFKKIECFDSVEISGVEDRFNASLGTYHDLLKIIKDKDFLDNEENEDILEDIVLTLTLFEDREMIEERLKTYAHLFDDKVMKQLKRRRYTGWGRLSRKLINGIRDKQSGKTILDFLKSDGFANRNFMQLIHDDSLTFKEDIQKAQVSGQGDSLHEHIANLAGSPAIKKGILQTVKVVDELVKVMGRHKPENIVIEMARENQTTQKGQKNSRERMKRIEEGIKELGSQILKEHPVENTQLQNEKLYLYYLQNGRDMYVDQELDINRLSDYDVDHIVPQSFLKDDSIDNKVLTRSDKARGKSDNVPSEEVVKKMKNYWRQLLNAKLITQRKFDNLTKAERGGLSELDKAGFIKRQLVETRQITKHVAQILDSRMNTKYDENDKLIREVKVITLKSKLVSDFRKDFQFYKVREINNYHHAHDAYLNAVVGTALIKKYPKLESEFVYGDYKVYDVRKMIAKSEQEIGKATAKYFFYSNIMNFFKTEITLANGEIRKRPLIETNGETGEIVWDKGRDFATVRKVLSMPQVNIVKKTEVQTGGFSKESILPKRNSDKLIARKKDWDPKKYGGFDSPTVAYSVLVVAKVEKGKSKKLKSVKELLGITIMERSSFEKNPIDFLEAKGYKEVKKDLIIKLPKYSLFELENGRKRMLASAGELQKGNELALPSKYVNFLYLASHYEKLKGSPEDNEQKQLFVEQHKHYLDEIIEQISEFSKRVILADANLDKVLSAYNKHRDKPIREQAENIIHLFTLTNLGAPAAFKYFDTTIDRKRYTSTKEVLDATLIHQSITGLYETRIDLSQLGGDGGGGSPAPGSSGGLGIEDEYRLHETSTEPDVSLGSTWLSDFPQAWAETGGMGLAVRQAPLIIPLKATSTPVSIQQYPMSHEARLGIKPHIQRLLDQGILVPCQSPWNTPLLPVKKPGTNDYRPVQDLREVNKRVEDIHPTVPNPYNLLSGLPPSHQWYTVLDLKDAFFCLRLHPTSQPLFAFEWRDPGMGISGQLTWTRLPQGFKNSPTLFNEALHRDLADFRIQHPDLILLQYVDDILLAATSELDCQQGTRALLQTLGDLGYRASAKKAQICQKQVKYLGYLLREGQRWLTEARKETVMGQPVPKTPRQLREFLGKAGFCRLFIPGFAEMAAPLYPLTKPGTLFSWGPDQQKAYQEIKQALLTAPALGLPDLTKPFELFVDEKQGYAKGVLTQKLGPWRRPVAYLSKKLDPVAAGWPPCLRMVAAIAVLTKDAGKLTMGQPLVILAPHAVEALVKQPPDRWLSNARMTHYQAMLLDTDRVQFGPVVALNPATLLPLPEEGAPHDCLEILAETHGTRPDLTDQPIPDADHTWYTDGSSFLQEGQRKAGAAVTTETEVIWAGALPAGTSAQRAELIALTQALKMAEGKRLNVYTDSRYAFATAHIHGEIYRRRGWLTSEGREIKNKSEILALLKALFLPKRLSIIHCLGHQKGDSAEARGNRLADQAAREAAIKTPPDTSTLLIAGKRTADGSEFEKRTADGSEFESPKKKAKVE

SEQ ID NO: 2052 - protein, 2096 aa, synthetic construct
MPAAKRVKLDGGDKKYSIGLDIGTNSVGWAVITDEYKVPSKKFKVLGNTDRHSIKKNLIGALLFDSGETAEATRLKRTARRRYTRRKNRICYLQEIFSNEMAKVDDSFFHRLEESFLVEEDKKHERHPIFGNIVDEVAYHEKYPTIYHLRKKLVDSTDKADLRLIYLALAHMIKFRGHFLIEGDLNPDNSDVDKLFIQLVQTYNQLFEENPINASGVDAKAILSARLSKSRRLENLIAQLPGEKKNGLFGNLIALSLGLTPNFKSNFDLAEDAKLQLSKDTYDDDLDNLLAQIGDQYADLFLAAKNLSDAILLSDILRVNTEITKAPLSASMIKRYDEHHQDLTLLKALVRQQLPEKYKEIFFDQSKNGYAGYIDGGASQEEFYKFIKPILEKMDGTEELLVKLNREDLLRKQRTFDNGSIPHQIHLGELHAILRRQEDFYPFLKDNREKIEKILTFRIPYYVGPLARGNSRFAWMTRKSEETITPWNFEEVVDKGASAQSFIERMTNFDKNLPNEKVLPKHSLLYEYFTVYNELTKVKYVTEGMRKPAFLSGEQKKAIVDLLFKTNRKVTVKQLKEDYFKKIECFDSVEISGVEDRFNASLGTYHDLLKIIKDKDFLDNEENEDILEDIVLTLTLFEDREMIEERLKTYAHLFDDKVMKQLKRRRYTGWGRLSRKLINGIRDKQSGKTILDFLKSDGFANRNFMQLIHDDSLTFKEDIQKAQVSGQGDSLHEHIANLAGSPAIKKGILQTVKVVDELVKVMGRHKPENIVIEMARENQTTQKGQKNSRERMKRIEEGIKELGSQILKEHPVENTQLQNEKLYLYYLQNGRDMYVDQELDINRLSDYDVDHIVPQSFLKDDSIDNKVLTRSDKARGKSDNVPSEEVVKKMKNYWRQLLNAKLITQRKFDNLTKAERGGLSELDKAGFIKRQLVETRQITKHVAQILDSRMNTKYDENDKLIREVKVITLKSKLVSDFRKDFQFYKVREINNYHHAHDAYLNAVVGTALIKKYPKLESEFVYGDYKVYDVRKMIAKSEQEIGKATAKYFFYSNIMNFFKTEITLANGEIRKRPLIETNGETGEIVWDKGRDFATVRKVLSMPQVNIVKKTEVQTGGFSKESILPKRNSDKLIARKKDWDPKKYGGFDSPTVAYSVLVVAKVEKGKSKKLKSVKELLGITIMERSSFEKNPIDFLEAKGYKEVKKDLIIKLPKYSLFELENGRKRMLASAGELQKGNELALPSKYVNFLYLASHYEKLKGSPEDNEQKQLFVEQHKHYLDEIIEQISEFSKRVILADANLDKVLSAYNKHRDKPIREQAENIIHLFTLTNLGAPAAFKYFDTTIDRKRYTSTKEVLDATLIHQSITGLYETRIDLSQLGGDGGEAAAKGSSPAPGGLGIEDEYRLHETSTEPDVSLGSTWLSDFPQAWAETGGMGLAVRQAPLIIPLKATSTPVSIQQYPMSHEARLGIKPHIQRLLDQGILVPCQSPWNTPLLPVKKPGTNDYRPVQDLREVNKRVEDIHPTVPNPYNLLSGLPPSHQWYTVLDLKDAFFCLRLHPTSQPLFAFEWRDPGMGISGQLTWTRLPQGFKNSPTLFNEALHRDLADFRIQHPDLILLQYVDDILLAATSELDCQQGTRALLQTLGDLGYRASAKKAQICQKQVKYLGYLLREGQRWLTEARKETVMGQPVPKTPRQLREFLGKAGFCRLFIPGFAEMAAPLYPLTKPGTLFSWGPDQQKAYQEIKQALLTAPALGLPDLTKPFELFVDEKQGYAKGVLTQKLGPWRRPVAYLSKKLDPVAAGWPPCLRMVAAIAVLTKDAGKLTMGQPLVILAPHAVEALVKQPPDRWLSNARMTHYQAMLLDTDRVQFGPVVALNPATLLPLPEEGAPHDCLEILAETHGTRPDLTDQPIPDADHTWYTDGSSFLQEGQRKAGAAVTTETEVIWAGALPAGTSAQRAELIALTQALKMAEGKRLNVYTDSRYAFATAHIHGEIYRRRGWLTSEGREIKNKSEILALLKALFLPKRLSIIHCLGHQKGDSAEARGNRLADQAAREAAIKTPPDTSTLLIAGKRTADGSEFEKRTADGSEFESPKKKAKVE

SEQ ID NO: 2053 - protein, 2088 aa, synthetic construct
MPAAKRVKLDGGDKKYSIGLDIGTNSVGWAVITDEYKVPSKKFKVLGNTDRHSIKKNLIGALLFDSGETAEATRLKRTARRRYTRRKNRICYLQEIFSNEMAKVDDSFFHRLEESFLVEEDKKHERHPIFGNIVDEVAYHEKYPTIYHLRKKLVDSTDKADLRLIYLALAHMIKFRGHFLIEGDLNPDNSDVDKLFIQLVQTYNQLFEENPINASGVDAKAILSARLSKSRRLENLIAQLPGEKKNGLFGNLIALSLGLTPNFKSNFDLAEDAKLQLSKDTYDDDLDNLLAQIGDQYADLFLAAKNLSDAILLSDILRVNTEITKAPLSASMIKRYDEHHQDLTLLKALVRQQLPEKYKEIFFDQSKNGYAGYIDGGASQEEFYKFIKPILEKMDGTEELLVKLNREDLLRKQRTFDNGSIPHQIHLGELHAILRRQEDFYPFLKDNREKIEKILTFRIPYYVGPLARGNSRFAWMTRKSEETITPWNFEEVVDKGASAQSFIERMTNFDKNLPNEKVLPKHSLLYEYFTVYNELTKVKYVTEGMRKPAFLSGEQKKAIVDLLFKTNRKVTVKQLKEDYFKKIECFDSVEISGVEDRFNASLGTYHDLLKIIKDKDFLDNEENEDILEDIVLTLTLFEDREMIEERLKTYAHLFDDKVMKQLKRRRYTGWGRLSRKLINGIRDKQSGKTILDFLKSDGFANRNFMQLIHDDSLTFKEDIQKAQVSGQGDSLHEHIANLAGSPAIKKGILQTVKVVDELVKVMGRHKPENIVIEMARENQTTQKGQKNSRERMKRIEEGIKELGSQILKEHPVENTQLQNEKLYLYYLQNGRDMYVDQELDINRLSDYDVDHIVPQSFLKDDSIDNKVLTRSDKARGKSDNVPSEEVVKKMKNYWRQLLNAKLITQRKFDNLTKAERGGLSELDKAGFIKRQLVETRQITKHVAQILDSRMNTKYDENDKLIREVKVITLKSKLVSDFRKDFQFYKVREINNYHHAHDAYLNAVVGTALIKKYPKLESEFVYGDYKVYDVRKMIAKSEQEIGKATAKYFFYSNIMNFFKTEITLANGEIRKRPLIETNGETGEIVWDKGRDFATVRKVLSMPQVNIVKKTEVQTGGFSKESILPKRNSDKLIARKKDWDPKKYGGFDSPTVAYSVLVVAKVEKGKSKKLKSVKELLGITIMERSSFEKNPIDFLEAKGYKEVKKDLIIKLPKYSLFELENGRKRMLASAGELQKGNELALPSKYVNFLYLASHYEKLKGSPEDNEQKQLFVEQHKHYLDEIIEQISEFSKRVILADANLDKVLSAYNKHRDKPIREQAENIIHLFTLTNLGAPAAFKYFDTTIDRKRYTSTKEVLDATLIHQSITGLYETRIDLSQLGGDGGGSSGGLGIEDEYRLHETSTEPDVSLGSTWLSDFPQAWAETGGMGLAVRQAPLIIPLKATSTPVSIQQYPMSHEARLGIKPHIQRLLDQGILVPCQSPWNTPLLPVKKPGTNDYRPVQDLREVNKRVEDIHPTVPNPYNLLSGLPPSHQWYTVLDLKDAFFCLRLHPTSQPLFAFEWRDPGMGISGQLTWTRLPQGFKNSPTLFNEALHRDLADFRIQHPDLILLQYVDDILLAATSELDCQQGTRALLQTLGDLGYRASAKKAQICQKQVKYLGYLLREGQRWLTEARKETVMGQPVPKTPRQLREFLGKAGFCRLFIPGFAEMAAPLYPLTKPGTLFSWGPDQQKAYQEIKQALLTAPALGLPDLTKPFELFVDEKQGYAKGVLTQKLGPWRRPVAYLSKKLDPVAAGWPPCLRMVAAIAVLTKDAGKLTMGQPLVILAPHAVEALVKQPPDRWLSNARMTHYQAMLLDTDRVQFGPVVALNPATLLPLPEEGAPHDCLEILAETHGTRPDLTDQPIPDADHTWYTDGSSFLQEGQRKAGAAVTTETEVIWAGALPAGTSAQRAELIALTQALKMAEGKRLNVYTDSRYAFATAHIHGEIYRRRGWLTSEGREIKNKSEILALLKALFLPKRLSIIHCLGHQKGDSAEARGNRLADQAAREAAIKTPPDTSTLLIAGKRTADGSEFEKRTADGSEFESPKKKAKVE

SEQ ID NO: 2054 - protein, 2096 aa, synthetic construct
MPAAKRVKLDGGDKKYSIGLDIGTNSVGWAVITDEYKVPSKKFKVLGNTDRHSIKKNLIGALLFDSGETAEATRLKRTARRRYTRRKNRICYLQEIFSNEMAKVDDSFFHRLEESFLVEEDKKHERHPIFGNIVDEVAYHEKYPTIYHLRKKLVDSTDKADLRLIYLALAHMIKFRGHFLIEGDLNPDNSDVDKLFIQLVQTYNQLFEENPINASGVDAKAILSARLSKSRRLENLIAQLPGEKKNGLFGNLIALSLGLTPNFKSNFDLAEDAKLQLSKDTYDDDLDNLLAQIGDQYADLFLAAKNLSDAILLSDILRVNTEITKAPLSASMIKRYDEHHQDLTLLKALVRQQLPEKYKEIFFDQSKNGYAGYIDGGASQEEFYKFIKPILEKMDGTEELLVKLNREDLLRKQRTFDNGSIPHQIHLGELHAILRRQEDFYPFLKDNREKIEKILTFRIPYYVGPLARGNSRFAWMTRKSEETITPWNFEEVVDKGASAQSFIERMTNFDKNLPNEKVLPKHSLLYEYFTVYNELTKVKYVTEGMRKPAFLSGEQKKAIVDLLFKTNRKVTVKQLKEDYFKKIECFDSVEISGVEDRFNASLGTYHDLLKIIKDKDFLDNEENEDILEDIVLTLTLFEDREMIEERLKTYAHLFDDKVMKQLKRRRYTGWGRLSRKLINGIRDKQSGKTILDFLKSDGFANRNFMQLIHDDSLTFKEDIQKAQVSGQGDSLHEHIANLAGSPAIKKGILQTVKVVDELVKVMGRHKPENIVIEMARENQTTQKGQKNSRERMKRIEEGIKELGSQILKEHPVENTQLQNEKLYLYYLQNGRDMYVDQELDINRLSDYDVDHIVPQSFLKDDSIDNKVLTRSDKARGKSDNVPSEEVVKKMKNYWRQLLNAKLITQRKFDNLTKAERGGLSELDKAGFIKRQLVETRQITKHVAQILDSRMNTKYDENDKLIREVKVITLKSKLVSDFRKDFQFYKVREINNYHHAHDAYLNAVVGTALIKKYPKLESEFVYGDYKVYDVRKMIAKSEQEIGKATAKYFFYSNIMNFFKTEITLANGEIRKRPLIETNGETGEIVWDKGRDFATVRKVLSMPQVNIVKKTEVQTGGFSKESILPKRNSDKLIARKKDWDPKKYGGFDSPTVAYSVLVVAKVEKGKSKKLKSVKELLGITIMERSSFEKNPIDFLEAKGYKEVKKDLIIKLPKYSLFELENGRKRMLASAGELQKGNELALPSKYVNFLYLASHYEKLKGSPEDNEQKQLFVEQHKHYLDEIIEQISEFSKRVILADANLDKVLSAYNKHRDKPIREQAENIIHLFTLTNLGAPAAFKYFDTTIDRKRYTSTKEVLDATLIHQSITGLYETRIDLSQLGGDGGEAAAKGGGPAPGGLGIEDEYRLHETSTEPDVSLGSTWLSDFPQAWAETGGMGLAVRQAPLIIPLKATSTPVSIQQYPMSHEARLGIKPHIQRLLDQGILVPCQSPWNTPLLPVKKPGTNDYRPVQDLREVNKRVEDIHPTVPNPYNLLSGLPPSHQWYTVLDLKDAFFCLRLHPTSQPLFAFEWRDPGMGISGQLTWTRLPQGFKNSPTLFNEALHRDLADFRIQHPDLILLQYVDDILLAATSELDCQQGTRALLQTLGDLGYRASAKKAQICQKQVKYLGYLLREGQRWLTEARKETVMGQPVPKTPRQLREFLGKAGFCRLFIPGFAEMAAPLYPLTKPGTLFSWGPDQQKAYQEIKQALLTAPALGLPDLTKPFELFVDEKQGYAKGVLTQKLGPWRRPVAYLSKKLDPVAAGWPPCLRMVAAIAVLTKDAGKLTMGQPLVILAPHAVEALVKQPPDRWLSNARMTHYQAMLLDTDRVQFGPVVALNPATLLPLPEEGAPHDCLEILAETHGTRPDLTDQPIPDADHTWYTDGSSFLQEGQRKAGAAVTTETEVIWAGALPAGTSAQRAELIALTQALKMAEGKRLNVYTDSRYAFATAHIHGEIYRRRGWLTSEGREIKNKSEILALLKALFLPKRLSIIHCLGHQKGDSAEARGNRLADQAAREAAIKTPPDTSTLLIAGKRTADGSEFEKRTADGSEFESPKKKAKVE

SEQ ID NO: 2055 - protein, 2096 aa, synthetic construct
MPAAKRVKLDGGDKKYSIGLDIGTNSVGWAVITDEYKVPSKKFKVLGNTDRHSIKKNLIGALLFDSGETAEATRLKRTARRRYTRRKNRICYLQEIFSNEMAKVDDSFFHRLEESFLVEEDKKHERHPIFGNIVDEVAYHEKYPTIYHLRKKLVDSTDKADLRLIYLALAHMIKFRGHFLIEGDLNPDNSDVDKLFIQLVQTYNQLFEENPINASGVDAKAILSARLSKSRRLENLIAQLPGEKKNGLFGNLIALSLGLTPNFKSNFDLAEDAKLQLSKDTYDDDLDNLLAQIGDQYADLFLAAKNLSDAILLSDILRVNTEITKAPLSASMIKRYDEHHQDLTLLKALVRQQLPEKYKEIFFDQSKNGYAGYIDGGASQEEFYKFIKPILEKMDGTEELLVKLNREDLLRKQRTFDNGSIPHQIHLGELHAILRRQEDFYPFLKDNREKIEKILTFRIPYYVGPLARGNSRFAWMTRKSEETITPWNFEEVVDKGASAQSFIERMTNFDKNLPNEKVLPKHSLLYEYFTVYNELTKVKYVTEGMRKPAFLSGEQKKAIVDLLFKTNRKVTVKQLKEDYFKKIECFDSVEISGVEDRFNASLGTYHDLLKIIKDKDFLDNEENEDILEDIVLTLTLFEDREMIEERLKTYAHLFDDKVMKQLKRRRYTGWGRLSRKLINGIRDKQSGKTILDFLKSDGFANRNFMQLIHDDSLTFKEDIQKAQVSGQGDSLHEHIANLAGSPAIKKGILQTVKVVDELVKVMGRHKPENIVIEMARENQTTQKGQKNSRERMKRIEEGIKELGSQILKEHPVENTQLQNEKLYLYYLQNGRDMYVDQELDINRLSDYDVDHIVPQSFLKDDSIDNKVLTRSDKARGKSDNVPSEEVVKKMKNYWRQLLNAKLITQRKFDNLTKAERGGLSELDKAGFIKRQLVETRQITKHVAQILDSRMNTKYDENDKLIREVKVITLKSKLVSDFRKDFQFYKVREINNYHHAHDAYLNAVVGTALIKKYPKLESEFVYGDYKVYDVRKMIAKSEQEIGKATAKYFFYSNIMNFFKTEITLANGEIRKRPLIETNGETGEIVWDKGRDFATVRKVLSMPQVNIVKKTEVQTGGFSKESILPKRNSDKLIARKKDWDPKKYGGFDSPTVAYSVLVVAKVEKGKSKKLKSVKELLGITIMERSSFEKNPIDFLEAKGYKEVKKDLIIKLPKYSLFELENGRKRMLASAGELQKGNELALPSKYVNFLYLASHYEKLKGSPEDNEQKQLFVEQHKHYLDEIIEQISEFSKRVILADANLDKVLSAYNKHRDKPIREQAENIIHLFTLTNLGAPAAFKYFDTTIDRKRYTSTKEVLDATLIHQSITGLYETRIDLSQLGGDGGEAAAKGGSGSSGGLGIEDEYRLHETSTEPDVSLGSTWLSDFPQAWAETGGMGLAVRQAPLIIPLKATSTPVSIQQYPMSHEARLGIKPHIQRLLDQGILVPCQSPWNTPLLPVKKPGTNDYRPVQDLREVNKRVEDIHPTVPNPYNLLSGLPPSHQWYTVLDLKDAFFCLRLHPTSQPLFAFEWRDPGMGISGQLTWTRLPQGFKNSPTLFNEALHRDLADFRIQHPDLILLQYVDDILLAATSELDCQQGTRALLQTLGDLGYRASAKKAQICQKQVKYLGYLLREGQRWLTEARKETVMGQPVPKTPRQLREFLGKAGFCRLFIPGFAEMAAPLYPLTKPGTLFSWGPDQQKAYQEIKQALLTAPALGLPDLTKPFELFVDEKQGYAKGVLTQKLGPWRRPVAYLSKKLDPVAAGWPPCLRMVAAIAVLTKDAGKLTMGQPLVILAPHAVEALVKQPPDRWLSNARMTHYQAMLLDTDRVQFGPVVALNPATLLPLPEEGAPHDCLEILAETHGTRPDLTDQPIPDADHTWYTDGSSFLQEGQRKAGAAVTTETEVIWAGALPAGTSAQRAELIALTQALKMAEGKRLNVYTDSRYAFATAHIHGEIYRRRGWLTSEGREIKNKSEILALLKALFLPKRLSIIHCLGHQKGDSAEARGNRLADQAAREAAIKTPPDTSTLLIAGKRTADGSEFEKRTADGSEFESPKKKAKVE

SEQ ID NO: 2056 - protein, 2097 aa, synthetic construct
MPAAKRVKLDGGDKKYSIGLDIGTNSVGWAVITDEYKVPSKKFKVLGNTDRHSIKKNLIGALLFDSGETAEATRLKRTARRRYTRRKNRICYLQEIFSNEMAKVDDSFFHRLEESFLVEEDKKHERHPIFGNIVDEVAYHEKYPTIYHLRKKLVDSTDKADLRLIYLALAHMIKFRGHFLIEGDLNPDNSDVDKLFIQLVQTYNQLFEENPINASGVDAKAILSARLSKSRRLENLIAQLPGEKKNGLFGNLIALSLGLTPNFKSNFDLAEDAKLQLSKDTYDDDLDNLLAQIGDQYADLFLAAKNLSDAILLSDILRVNTEITKAPLSASMIKRYDEHHQDLTLLKALVRQQLPEKYKEIFFDQSKNGYAGYIDGGASQEEFYKFIKPILEKMDGTEELLVKLNREDLLRKQRTFDNGSIPHQIHLGELHAILRRQEDFYPFLKDNREKIEKILTFRIPYYVGPLARGNSRFAWMTRKSEETITPWNFEEVVDKGASAQSFIERMTNFDKNLPNEKVLPKHSLLYEYFTVYNELTKVKYVTEGMRKPAFLSGEQKKAIVDLLFKTNRKVTVKQLKEDYFKKIECFDSVEISGVEDRFNASLGTYHDLLKIIKDKDFLDNEENEDILEDIVLTLTLFEDREMIEERLKTYAHLFDDKVMKQLKRRRYTGWGRLSRKLINGIRDKQSGKTILDFLKSDGFANRNFMQLIHDDSLTFKEDIQKAQVSGQGDSLHEHIANLAGSPAIKKGILQTVKVVDELVKVMGRHKPENIVIEMARENQTTQKGQKNSRERMKRIEEGIKELGSQILKEHPVENTQLQNEKLYLYYLQNGRDMYVDQELDINRLSDYDVDHIVPQSFLKDDSIDNKVLTRSDKARGKSDNVPSEEVVKKMKNYWRQLLNAKLITQRKFDNLTKAERGGLSELDKAGFIKRQLVETRQITKHVAQILDSRMNTKYDENDKLIREVKVITLKSKLVSDFRKDFQFYKVREINNYHHAHDAYLNAVVGTALIKKYPKLESEFVYGDYKVYDVRKMIAKSEQEIGKATAKYFFYSNIMNFFKTEITLANGEIRKRPLIETNGETGEIVWDKGRDFATVRKVLSMPQVNIVKKTEVQTGGFSKESILPKRNSDKLIARKKDWDPKKYGGFDSPTVAYSVLVVAKVEKGKSKKLKSVKELLGITIMERSSFEKNPIDFLEAKGYKEVKKDLIIKLPKYSLFELENGRKRMLASAGELQKGNELALPSKYVNFLYLASHYEKLKGSPEDNEQKQLFVEQHKHYLDEIIEQISEFSKRVILADANLDKVLSAYNKHRDKPIREQAENIIHLFTLTNLGAPAAFKYFDTTIDRKRYTSTKEVLDATLIHQSITGLYETRIDLSQLGGDGGGSAGSAAGSGEFGGLGIEDEYRLHETSTEPDVSLGSTWLSDFPQAWAETGGMGLAVRQAPLIIPLKATSTPVSIQQYPMSHEARLGIKPHIQRLLDQGILVPCQSPWNTPLLPVKKPGTNDYRPVQDLREVNKRVEDIHPTVPNPYNLLSGLPPSHQWYTVLDLKDAFFCLRLHPTSQPLFAFEWRDPGMGISGQLTWTRLPQGFKNSPTLFNEALHRDLADFRIQHPDLILLQYVDDILLAATSELDCQQGTRALLQTLGDLGYRASAKKAQICQKQVKYLGYLLREGQRWLTEARKETVMGQPVPKTPRQLREFLGKAGFCRLFIPGFAEMAAPLYPLTKPGTLFSWGPDQQKAYQEIKQALLTAPALGLPDLTKPFELFVDEKQGYAKGVLTQKLGPWRRPVAYLSKKLDPVAAGWPPCLRMVAAIAVLTKDAGKLTMGQPLVILAPHAVEALVKQPPDRWLSNARMTHYQAMLLDTDRVQFGPVVALNPATLLPLPEEGAPHDCLEILAETHGTRPDLTDQPIPDADHTWYTDGSSFLQEGQRKAGAAVTTETEVIWAGALPAGTSAQRAELIALTQALKMAEGKRLNVYTDSRYAFATAHIHGEIYRRRGWLTSEGREIKNKSEILALLKALFLPKRLSIIHCLGHQKGDSAEARGNRLADQAAREAAIKTPPDTSTLLIAGKRTADGSEFEKRTADGSEFESPKKKAKVE

SEQ ID NO: 2057 - protein, 2091 aa, synthetic construct
MPAAKRVKLDGGDKKYSIGLDIGTNSVGWAVITDEYKVPSKKFKVLGNTDRHSIKKNLIGALLFDSGETAEATRLKRTARRRYTRRKNRICYLQEIFSNEMAKVDDSFFHRLEESFLVEEDKKHERHPIFGNIVDEVAYHEKYPTIYHLRKKLVDSTDKADLRLIYLALAHMIKFRGHFLIEGDLNPDNSDVDKLFIQLVQTYNQLFEENPINASGVDAKAILSARLSKSRRLENLIAQLPGEKKNGLFGNLIALSLGLTPNFKSNFDLAEDAKLQLSKDTYDDDLDNLLAQIGDQYADLFLAAKNLSDAILLSDILRVNTEITKAPLSASMIKRYDEHHQDLTLLKALVRQQLPEKYKEIFFDQSKNGYAGYIDGGASQEEFYKFIKPILEKMDGTEELLVKLNREDLLRKQRTFDNGSIPHQIHLGELHAILRRQEDFYPFLKDNREKIEKILTFRIPYYVGPLARGNSRFAWMTRKSEETITPWNFEEVVDKGASAQSFIERMTNFDKNLPNEKVLPKHSLLYEYFTVYNELTKVKYVTEGMRKPAFLSGEQKKAIVDLLFKTNRKVTVKQLKEDYFKKIECFDSVEISGVEDRFNASLGTYHDLLKIIKDKDFLDNEENEDILEDIVLTLTLFEDREMIEERLKTYAHLFDDKVMKQLKRRRYTGWGRLSRKLINGIRDKQSGKTILDFLKSDGFANRNFMQLIHDDSLTFKEDIQKAQVSGQGDSLHEHIANLAGSPAIKKGILQTVKVVDELVKVMGRHKPENIVIEMARENQTTQKGQKNSRERMKRIEEGIKELGSQILKEHPVENTQLQNEKLYLYYLQNGRDMYVDQELDINRLSDYDVDHIVPQSFLKDDSIDNKVLTRSDKARGKSDNVPSEEVVKKMKNYWRQLLNAKLITQRKFDNLTKAERGGLSELDKAGFIKRQLVETRQITKHVAQILDSRMNTKYDENDKLIREVKVITLKSKLVSDFRKDFQFYKVREINNYHHAHDAYLNAVVGTALIKKYPKLESEFVYGDYKVYDVRKMIAKSEQEIGKATAKYFFYSNIMNFFKTEITLANGEIRKRPLIETNGETGEIVWDKGRDFATVRKVLSMPQVNIVKKTEVQTGGFSKESILPKRNSDKLIARKKDWDPKKYGGFDSPTVAYSVLVVAKVEKGKSKKLKSVKELLGITIMERSSFEKNPIDFLEAKGYKEVKKDLIIKLPKYSLFELENGRKRMLASAGELQKGNELALPSKYVNFLYLASHYEKLKGSPEDNEQKQLFVEQHKHYLDEIIEQISEFSKRVILADANLDKVLSAYNKHRDKPIREQAENIIHLFTLTNLGAPAAFKYFDTTIDRKRYTSTKEVLDATLIHQSITGLYETRIDLSQLGGDGGPAPGSSGGLGIEDEYRLHETSTEPDVSLGSTWLSDFPQAWAETGGMGLAVRQAPLIIPLKATSTPVSIQQYPMSHEARLGIKPHIQRLLDQGILVPCQSPWNTPLLPVKKPGTNDYRPVQDLREVNKRVEDIHPTVPNPYNLLSGLPPSHQWYTVLDLKDAFFCLRLHPTSQPLFAFEWRDPGMGISGQLTWTRLPQGFKNSPTLFNEALHRDLADFRIQHPDLILLQYVDDILLAATSELDCQQGTRALLQTLGDLGYRASAKKAQICQKQVKYLGYLLREGQRWLTEARKETVMGQPVPKTPRQLREFLGKAGFCRLFIPGFAEMAAPLYPLTKPGTLFSWGPDQQKAYQEIKQALLTAPALGLPDLTKPFELFVDEKQGYAKGVLTQKLGPWRRPVAYLSKKLDPVAAGWPPCLRMVAAIAVLTKDAGKLTMGQPLVILAPHAVEALVKQPPDRWLSNARMTHYQAMLLDTDRVQFGPVVALNPATLLPLPEEGAPHDCLEILAETHGTRPDLTDQPIPDADHTWYTDGSSFLQEGQRKAGAAVTTETEVIWAGALPAGTSAQRAELIALTQALKMAEGKRLNVYTDSRYAFATAHIHGEIYRRRGWLTSEGREIKNKSEILALLKALFLPKRLSIIHCLGHQKGDSAEARGNRLADQAAREAAIKTPPDTSTLLIAGKRTADGSEFEKRTADGSEFESPKKKAKVE

SEQ ID NO: 2058 - protein, 2094 aa, synthetic construct
MPAAKRVKLDGGDKKYSIGLDIGTNSVGWAVITDEYKVPSKKFKVLGNTDRHSIKKNLIGALLFDSGETAEATRLKRTARRRYTRRKNRICYLQEIFSNEMAKVDDSFFHRLEESFLVEEDKKHERHPIFGNIVDEVAYHEKYPTIYHLRKKLVDSTDKADLRLIYLALAHMIKFRGHFLIEGDLNPDNSDVDKLFIQLVQTYNQLFEENPINASGVDAKAILSARLSKSRRLENLIAQLPGEKKNGLFGNLIALSLGLTPNFKSNFDLAEDAKLQLSKDTYDDDLDNLLAQIGDQYADLFLAAKNLSDAILLSDILRVNTEITKAPLSASMIKRYDEHHQDLTLLKALVRQQLPEKYKEIFFDQSKNGYAGYIDGGASQEEFYKFIKPILEKMDGTEELLVKLNREDLLRKQRTFDNGSIPHQIHLGELHAILRRQEDFYPFLKDNREKIEKILTFRIPYYVGPLARGNSRFAWMTRKSEETITPWNFEEVVDKGASAQSFIERMTNFDKNLPNEKVLPKHSLLYEYFTVYNELTKVKYVTEGMRKPAFLSGEQKKAIVDLLFKTNRKVTVKQLKEDYFKKIECFDSVEISGVEDRFNASLGTYHDLLKIIKDKDFLDNEENEDILEDIVLTLTLFEDREMIEERLKTYAHLFDDKVMKQLKRRRYTGWGRLSRKLINGIRDKQSGKTILDFLKSDGFANRNFMQLIHDDSLTFKEDIQKAQVSGQGDSLHEHIANLAGSPAIKKGILQTVKVVDELVKVMGRHKPENIVIEMARENQTTQKGQKNSRERMKRIEEGIKELGSQILKEHPVENTQLQNEKLYLYYLQNGRDMYVDQELDINRLSDYDVDHIVPQSFLKDDSIDNKVLTRSDKARGKSDNVPSEEVVKKMKNYWRQLLNAKLITQRKFDNLTKAERGGLSELDKAGFIKRQLVETRQITKHVAQILDSRMNTKYDENDKLIREVKVITLKSKLVSDFRKDFQFYKVREINNYHHAHDAYLNAVVGTALIKKYPKLESEFVYGDYKVYDVRKMIAKSEQEIGKATAKYFFYSNIMNFFKTEITLANGEIRKRPLIETNGETGEIVWDKGRDFATVRKVLSMPQVNIVKKTEVQTGGFSKESILPKRNSDKLIARKKDWDPKKYGGFDSPTVAYSVLVVAKVEKGKSKKLKSVKELLGITIMERSSFEKNPIDFLEAKGYKEVKKDLIIKLPKYSLFELENGRKRMLASAGELQKGNELALPSKYVNFLYLASHYEKLKGSPEDNEQKQLFVEQHKHYLDEIIEQISEFSKRVILADANLDKVLSAYNKHRDKPIREQAENIIHLFTLTNLGAPAAFKYFDTTIDRKRYTSTKEVLDATLIHQSITGLYETRIDLSQLGGDGGGGSPAPGGGGGLGIEDEYRLHETSTEPDVSLGSTWLSDFPQAWAETGGMGLAVRQAPLIIPLKATSTPVSIQQYPMSHEARLGIKPHIQRLLDQGILVPCQSPWNTPLLPVKKPGTNDYRPVQDLREVNKRVEDIHPTVPNPYNLLSGLPPSHQWYTVLDLKDAFFCLRLHPTSQPLFAFEWRDPGMGISGQLTWTRLPQGFKNSPTLFNEALHRDLADFRIQHPDLILLQYVDDILLAATSELDCQQGTRALLQTLGDLGYRASAKKAQICQKQVKYLGYLLREGQRWLTEARKETVMGQPVPKTPRQLREFLGKAGFCRLFIPGFAEMAAPLYPLTKPGTLFSWGPDQQKAYQEIKQALLTAPALGLPDLTKPFELFVDEKQGYAKGVLTQKLGPWRRPVAYLSKKLDPVAAGWPPCLRMVAAIAVLTKDAGKLTMGQPLVILAPHAVEALVKQPPDRWLSNARMTHYQAMLLDTDRVQFGPVVALNPATLLPLPEEGAPHDCLEILAETHGTRPDLTDQPIPDADHTWYTDGSSFLQEGQRKAGAAVTTETEVIWAGALPAGTSAQRAELIALTQALKMAEGKRLNVYTDSRYAFATAHIHGEIYRRRGWLTSEGREIKNKSEILALLKALFLPKRLSIIHCLGHQKGDSAEARGNRLADQAAREAAIKTPPDTSTLLIAGKRTADGSEFEKRTADGSEFESPKKKAKVE

SEQ ID NO: 2059 - protein, 2096 aa, synthetic construct
MPAAKRVKLDGGDKKYSIGLDIGTNSVGWAVITDEYKVPSKKFKVLGNTDRHSIKKNLIGALLFDSGETAEATRLKRTARRRYTRRKNRICYLQEIFSNEMAKVDDSFFHRLEESFLVEEDKKHERHPIFGNIVDEVAYHEKYPTIYHLRKKLVDSTDKADLRLIYLALAHMIKFRGHFLIEGDLNPDNSDVDKLFIQLVQTYNQLFEENPINASGVDAKAILSARLSKSRRLENLIAQLPGEKKNGLFGNLIALSLGLTPNFKSNFDLAEDAKLQLSKDTYDDDLDNLLAQIGDQYADLFLAAKNLSDAILLSDILRVNTEITKAPLSASMIKRYDEHHQDLTLLKALVRQQLPEKYKEIFFDQSKNGYAGYIDGGASQEEFYKFIKPILEKMDGTEELLVKLNREDLLRKQRTFDNGSIPHQIHLGELHAILRRQEDFYPFLKDNREKIEKILTFRIPYYVGPLARGNSRFAWMTRKSEETITPWNFEEVVDKGASAQSFIERMTNFDKNLPNEKVLPKHSLLYEYFTVYNELTKVKYVTEGMRKPAFLSGEQKKAIVDLLFKTNRKVTVKQLKEDYFKKIECFDSVEISGVEDRFNASLGTYHDLLKIIKDKDFLDNEENEDILEDIVLTLTLFEDREMIEERLKTYAHLFDDKVMKQLKRRRYTGWGRLSRKLINGIRDKQSGKTILDFLKSDGFANRNFMQLIHDDSLTFKEDIQKAQVSGQGDSLHEHIANLAGSPAIKKGILQTVKVVDELVKVMGRHKPENIVIEMARENQTTQKGQKNSRERMKRIEEGIKELGSQILKEHPVENTQLQNEKLYLYYLQNGRDMYVDQELDINRLSDYDVDHIVPQSFLKDDSIDNKVLTRSDKARGKSDNVPSEEVVKKMKNYWRQLLNAKLITQRKFDNLTKAERGGLSELDKAGFIKRQLVETRQITKHVAQILDSRMNTKYDENDKLIREVKVITLKSKLVSDFRKDFQFYKVREINNYHHAHDAYLNAVVGTALIKKYPKLESEFVYGDYKVYDVRKMIAKSEQEIGKATAKYFFYSNIMNFFKTEITLANGEIRKRPLIETNGETGEIVWDKGRDFATVRKVLSMPQVNIVKKTEVQTGGFSKESILPKRNSDKLIARKKDWDPKKYGGFDSPTVAYSVLVVAKVEKGKSKKLKSVKELLGITIMERSSFEKNPIDFLEAKGYKEVKKDLIIKLPKYSLFELENGRKRMLASAGELQKGNELALPSKYVNFLYLASHYEKLKGSPEDNEQKQLFVEQHKHYLDEIIEQISEFSKRVILADANLDKVLSAYNKHRDKPIREQAENIIHLFTLTNLGAPAAFKYFDTTIDRKRYTSTKEVLDATLIHQSITGLYETRIDLSQLGGDGGGGGGGSEAAAKGGLGIEDEYRLHETSTEPDVSLGSTWLSDFPQAWAETGGMGLAVRQAPLIIPLKATSTPVSIQQYPMSHEARLGIKPHIQRLLDQGILVPCQSPWNTPLLPVKKPGTNDYRPVQDLREVNKRVEDIHPTVPNPYNLLSGLPPSHQWYTVLDLKDAFFCLRLHPTSQPLFAFEWRDPGMGISGQLTWTRLPQGFKNSPTLFNEALHRDLADFRIQHPDLILLQYVDDILLAATSELDCQQGTRALLQTLGDLGYRASAKKAQICQKQVKYLGYLLREGQRWLTEARKETVMGQPVPKTPRQLREFLGKAGFCRLFIPGFAEMAAPLYPLTKPGTLFSWGPDQQKAYQEIKQALLTAPALGLPDLTKPFELFVDEKQGYAKGVLTQKLGPWRRPVAYLSKKLDPVAAGWPPCLRMVAAIAVLTKDAGKLTMGQPLVILAPHAVEALVKQPPDRWLSNARMTHYQAMLLDTDRVQFGPVVALNPATLLPLPEEGAPHDCLEILAETHGTRPDLTDQPIPDADHTWYTDGSSFLQEGQRKAGAAVTTETEVIWAGALPAGTSAQRAELIALTQALKMAEGKRLNVYTDSRYAFATAHIHGEIYRRRGWLTSEGREIKNKSEILALLKALFLPKRLSIIHCLGHQKGDSAEARGNRLADQAAREAAIKTPPDTSTLLIAGKRTADGSEFEKRTADGSEFESPKKKAKVE

SEQ ID NO: 2060 - protein, 2094 aa, synthetic construct
MPAAKRVKLDGGDKKYSIGLDIGTNSVGWAVITDEYKVPSKKFKVLGNTDRHSIKKNLIGALLFDSGETAEATRLKRTARRRYTRRKNRICYLQEIFSNEMAKVDDSFFHRLEESFLVEEDKKHERHPIFGNIVDEVAYHEKYPTIYHLRKKLVDSTDKADLRLIYLALAHMIKFRGHFLIEGDLNPDNSDVDKLFIQLVQTYNQLFEENPINASGVDAKAILSARLSKSRRLENLIAQLPGEKKNGLFGNLIALSLGLTPNFKSNFDLAEDAKLQLSKDTYDDDLDNLLAQIGDQYADLFLAAKNLSDAILLSDILRVNTEITKAPLSASMIKRYDEHHQDLTLLKALVRQQLPEKYKEIFFDQSKNGYAGYIDGGASQEEFYKFIKPILEKMDGTEELLVKLNREDLLRKQRTFDNGSIPHQIHLGELHAILRRQEDFYPFLKDNREKIEKILTFRIPYYVGPLARGNSRFAWMTRKSEETITPWNFEEVVDKGASAQSFIERMTNFDKNLPNEKVLPKHSLLYEYFTVYNELTKVKYVTEGMRKPAFLSGEQKKAIVDLLFKTNRKVTVKQLKEDYFKKIECFDSVEISGVEDRFNASLGTYHDLLKIIKDKDFLDNEENEDILEDIVLTLTLFEDREMIEERLKTYAHLFDDKVMKQLKRRRYTGWGRLSRKLINGIRDKQSGKTILDFLKSDGFANRNFMQLIHDDSLTFKEDIQKAQVSGQGDSLHEHIANLAGSPAIKKGILQTVKVVDELVKVMGRHKPENIVIEMARENQTTQKGQKNSRERMKRIEEGIKELGSQILKEHPVENTQLQNEKLYLYYLQNGRDMYVDQELDINRLSDYDVDHIVPQSFLKDDSIDNKVLTRSDKARGKSDNVPSEEVVKKMKNYWRQLLNAKLITQRKFDNLTKAERGGLSELDKAGFIKRQLVETRQITKHVAQILDSRMNTKYDENDKLIREVKVITLKSKLVSDFRKDFQFYKVREINNYHHAHDAYLNAVVGTALIKKYPKLESEFVYGDYKVYDVRKMIAKSEQEIGKATAKYFFYSNIMNFFKTEITLANGEIRKRPLIETNGETGEIVWDKGRDFATVRKVLSMPQVNIVKKTEVQTGGFSKESILPKRNSDKLIARKKDWDPKKYGGFDSPTVAYSVLVVAKVEKGKSKKLKSVKELLGITIMERSSFEKNPIDFLEAKGYKEVKKDLIIKLPKYSLFELENGRKRMLASAGELQKGNELALPSKYVNFLYLASHYEKLKGSPEDNEQKQLFVEQHKHYLDEIIEQISEFSKRVILADANLDKVLSAYNKHRDKPIREQAENIIHLFTLTNLGAPAAFKYFDTTIDRKRYTSTKEVLDATLIHQSITGLYETRIDLSQLGGDGGGSSPAPGGGGGLGIEDEYRLHETSTEPDVSLGSTWLSDFPQAWAETGGMGLAVRQAPLIIPLKATSTPVSIQQYPMSHEARLGIKPHIQRLLDQGILVPCQSPWNTPLLPVKKPGTNDYRPVQDLREVNKRVEDIHPTVPNPYNLLSGLPPSHQWYTVLDLKDAFFCLRLHPTSQPLFAFEWRDPGMGISGQLTWTRLPQGFKNSPTLFNEALHRDLADFRIQHPDLILLQYVDDILLAATSELDCQQGTRALLQTLGDLGYRASAKKAQICQKQVKYLGYLLREGQRWLTEARKETVMGQPVPKTPRQLREFLGKAGFCRLFIPGFAEMAAPLYPLTKPGTLFSWGPDQQKAYQEIKQALLTAPALGLPDLTKPFELFVDEKQGYAKGVLTQKLGPWRRPVAYLSKKLDPVAAGWPPCLRMVAAIAVLTKDAGKLTMGQPLVILAPHAVEALVKQPPDRWLSNARMTHYQAMLLDTDRVQFGPVVALNPATLLPLPEEGAPHDCLEILAETHGTRPDLTDQPIPDADHTWYTDGSSFLQEGQRKAGAAVTTETEVIWAGALPAGTSAQRAELIALTQALKMAEGKRLNVYTDSRYAFATAHIHGEIYRRRGWLTSEGREIKNKSEILALLKALFLPKRLSIIHCLGHQKGDSAEARGNRLADQAAREAAIKTPPDTSTLLIAGKRTADGSEFEKRTADGSEFESPKKKAKVE

SEQ ID NO: 2061 - protein, 2094 aa, synthetic construct
MPAAKRVKLDGGDKKYSIGLDIGTNSVGWAVITDEYKVPSKKFKVLGNTDRHSIKKNLIGALLFDSGETAEATRLKRTARRRYTRRKNRICYLQEIFSNEMAKVDDSFFHRLEESFLVEEDKKHERHPIFGNIVDEVAYHEKYPTIYHLRKKLVDSTDKADLRLIYLALAHMIKFRGHFLIEGDLNPDNSDVDKLFIQLVQTYNQLFEENPINASGVDAKAILSARLSKSRRLENLIAQLPGEKKNGLFGNLIALSLGLTPNFKSNFDLAEDAKLQLSKDTYDDDLDNLLAQIGDQYADLFLAAKNLSDAILLSDILRVNTEITKAPLSASMIKRYDEHHQDLTLLKALVRQQLPEKYKEIFFDQSKNGYAGYIDGGASQEEFYKFIKPILEKMDGTEELLVKLNREDLLRKQRTFDNGSIPHQIHLGELHAILRRQEDFYPFLKDNREKIEKILTFRIPYYVGPLARGNSRFAWMTRKSEETITPWNFEEVVDKGASAQSFIERMTNFDKNLPNEKVLPKHSLLYEYFTVYNELTKVKYVTEGMRKPAFLSGEQKKAIVDLLFKTNRKVTVKQLKEDYFKKIECFDSVEISGVEDRFNASLGTYHDLLKIIKDKDFLDNEENEDILEDIVLTLTLFEDREMIEERLKTYAHLFDDKVMKQLKRRRYTGWGRLSRKLINGIRDKQSGKTILDFLKSDGFANRNFMQLIHDDSLTFKEDIQKAQVSGQGDSLHEHIANLAGSPAIKKGILQTVKVVDELVKVMGRHKPENIVIEMARENQTTQKGQKNSRERMKRIEEGIKELGSQILKEHPVENTQLQNEKLYLYYLQNGRDMYVDQELDINRLSDYDVDHIVPQSFLKDDSIDNKVLTRSDKARGKSDNVPSEEVVKKMKNYWRQLLNAKLITQRKFDNLTKAERGGLSELDKAGFIKRQLVETRQITKHVAQILDSRMNTKYDENDKLIREVKVITLKSKLVSDFRKDFQFYKVREINNYHHAHDAYLNAVVGTALIKKYPKLESEFVYGDYKVYDVRKMIAKSEQEIGKATAKYFFYSNIMNFFKTEITLANGEIRKRPLIETNGETGEIVWDKGRDFATVRKVLSMPQVNIVKKTEVQTGGFSKESILPKRNSDKLIARKKDWDPKKYGGFDSPTVAYSVLVVAKVEKGKSKKLKSVKELLGITIMERSSFEKNPIDFLEAKGYKEVKKDLIIKLPKYSLFELENGRKRMLASAGELQKGNELALPSKYVNFLYLASHYEKLKGSPEDNEQKQLFVEQHKHYLDEIIEQISEFSKRVILADANLDKVLSAYNKHRDKPIREQAENIIHLFTLTNLGAPAAFKYFDTTIDRKRYTSTKEVLDATLIHQSITGLYETRIDLSQLGGDGGGGSGGGPAPGGLGIEDEYRLHETSTEPDVSLGSTWLSDFPQAWAETGGMGLAVRQAPLIIPLKATSTPVSIQQYPMSHEARLGIKPHIQRLLDQGILVPCQSPWNTPLLPVKKPGTNDYRPVQDLREVNKRVEDIHPTVPNPYNLLSGLPPSHQWYTVLDLKDAFFCLRLHPTSQPLFAFEWRDPGMGISGQLTWTRLPQGFKNSPTLFNEALHRDLADFRIQHPDLILLQYVDDILLAATSELDCQQGTRALLQTLGDLGYRASAKKAQICQKQVKYLGYLLREGQRWLTEARKETVMGQPVPKTPRQLREFLGKAGFCRLFIPGFAEMAAPLYPLTKPGTLFSWGPDQQKAYQEIKQALLTAPALGLPDLTKPFELFVDEKQGYAKGVLTQKLGPWRRPVAYLSKKLDPVAAGWPPCLRMVAAIAVLTKDAGKLTMGQPLVILAPHAVEALVKQPPDRWLSNARMTHYQAMLLDTDRVQFGPVVALNPATLLPLPEEGAPHDCLEILAETHGTRPDLTDQPIPDADHTWYTDGSSFLQEGQRKAGAAVTTETEVIWAGALPAGTSAQRAELIALTQALKMAEGKRLNVYTDSRYAFATAHIHGEIYRRRGWLTSEGREIKNKSEILALLKALFLPKRLSIIHCLGHQKGDSAEARGNRLADQAAREAAIKTPPDTSTLLIAGKRTADGSEFEKRTADGSEFESPKKKAKVE

SEQ ID NO: 2062 - protein, 2096 aa, synthetic construct
MPAAKRVKLDGGDKKYSIGLDIGTNSVGWAVITDEYKVPSKKFKVLGNTDRHSIKKNLIGALLFDSGETAEATRLKRTARRRYTRRKNRICYLQEIFSNEMAKVDDSFFHRLEESFLVEEDKKHERHPIFGNIVDEVAYHEKYPTIYHLRKKLVDSTDKADLRLIYLALAHMIKFRGHFLIEGDLNPDNSDVDKLFIQLVQTYNQLFEENPINASGVDAKAILSARLSKSRRLENLIAQLPGEKKNGLFGNLIALSLGLTPNFKSNFDLAEDAKLQLSKDTYDDDLDNLLAQIGDQYADLFLAAKNLSDAILLSDILRVNTEITKAPLSASMIKRYDEHHQDLTLLKALVRQQLPEKYKEIFFDQSKNGYAGYIDGGASQEEFYKFIKPILEKMDGTEELLVKLNREDLLRKQRTFDNGSIPHQIHLGELHAILRRQEDFYPFLKDNREKIEKILTFRIPYYVGPLARGNSRFAWMTRKSEETITPWNFEEVVDKGASAQSFIERMTNFDKNLPNEKVLPKHSLLYEYFTVYNELTKVKYVTEGMRKPAFLSGEQKKAIVDLLFKTNRKVTVKQLKEDYFKKIECFDSVEISGVEDRFNASLGTYHDLLKIIKDKDFLDNEENEDILEDIVLTLTLFEDREMIEERLKTYAHLFDDKVMKQLKRRRYTGWGRLSRKLINGIRDKQSGKTILDFLKSDGFANRNFMQLIHDDSLTFKEDIQKAQVSGQGDSLHEHIANLAGSPAIKKGILQTVKVVDELVKVMGRHKPENIVIEMARENQTTQKGQKNSRERMKRIEEGIKELGSQILKEHPVENTQLQNEKLYLYYLQNGRDMYVDQELDINRLSDYDVDHIVPQSFLKDDSIDNKVLTRSDKARGKSDNVPSEEVVKKMKNYWRQLLNAKLITQRKFDNLTKAERGGLSELDKAGFIKRQLVETRQITKHVAQILDSRMNTKYDENDKLIREVKVITLKSKLVSDFRKDFQFYKVREINNYHHAHDAYLNAVVGTALIKKYPKLESEFVYGDYKVYDVRKMIAKSEQEIGKATAKYFFYSNIMNFFKTEITLANGEIRKRPLIETNGETGEIVWDKGRDFATVRKVLSMPQVNIVKKTEVQTGGFSKESILPKRNSDKLIARKKDWDPKKYGGFDSPTVAYSVLVVAKVEKGKSKKLKSVKELLGITIMERSSFEKNPIDFLEAKGYKEVKKDLIIKLPKYSLFELENGRKRMLASAGELQKGNELALPSKYVNFLYLASHYEKLKGSPEDNEQKQLFVEQHKHYLDEIIEQISEFSKRVILADANLDKVLSAYNKHRDKPIREQAENIIHLFTLTNLGAPAAFKYFDTTIDRKRYTSTKEVLDATLIHQSITGLYETRIDLSQLGGDGGGSSPAPEAAAKGGTLGIEDEYRLHETSTEPDVSLGSTWLSDFPQAWAETGGMGLAVRQAPLIIPLKATSTPVSIQQYPMSHEARLGIKPHIQRLLDQGILVPCQSPWNTPLLPVKKPGTNDYRPVQDLREVNKRVEDIHPTVPNPYNLLSGLPPSHQWYTVLDLKDAFFCLRLHPTSQPLFAFEWRDPGMGISGQLTWTRLPQGFKNSPTLFDEALHRDLADFRIQHPDLILLQYVDDILLAATSELDCQQGTRALLQTLGDLGYRASAKKAQICQKQVKYLGYLLREGQRWLTEARKETVMGQPVPKTPRQLREFLGTAGFCRLWIPGFAEMAAPLYPLTKTGTLFSWGPDQQKAYQEIKQALLTAPALGLPDLTKPFELFVDEKQGYAKGVLTQKLGPWRRPVAYLSKKLDPVAAGWPPCLRMVAAIAVLTKDAGKLTMGQPLVILAPHAVEALVKQPPDRWLSNARMTHYQAMLLDTDRVQFGPVVALNPATLLPLPEEGAPHDCLEILAETHGTRPDLTDQPIPDADHTWYTDGSSFLQEGQRKAGAAVTTETEVIWAGALPAGTSAQRAELIALTQALKMAEGKRLNVYTDSRYAFATAHIHGEIYRRRGLLTSEGREIKNKSEILALLKALFLPKRLSIIHCLGHQKGDSAEARGNRLADQAAREAAIKTPPDTSTLLAGKRTADGSEFEKRTADGSEFESPKKKAKVE

SEQ ID NO: 2063 - protein, 2105 aa, synthetic construct
MPAAKRVKLDGGDKKYSIGLDIGTNSVGWAVITDEYKVPSKKFKVLGNTDRHSIKKNLIGALLFDSGETAEATRLKRTARRRYTRRKNRICYLQEIFSNEMAKVDDSFFHRLEESFLVEEDKKHERHPIFGNIVDEVAYHEKYPTIYHLRKKLVDSTDKADLRLIYLALAHMIKFRGHFLIEGDLNPDNSDVDKLFIQLVQTYNQLFEENPINASGVDAKAILSARLSKSRRLENLIAQLPGEKKNGLFGNLIALSLGLTPNFKSNFDLAEDAKLQLSKDTYDDDLDNLLAQIGDQYADLFLAAKNLSDAILLSDILRVNTEITKAPLSASMIKRYDEHHQDLTLLKALVRQQLPEKYKEIFFDQSKNGYAGYIDGGASQEEFYKFIKPILEKMDGTEELLVKLNREDLLRKQRTFDNGSIPHQIHLGELHAILRRQEDFYPFLKDNREKIEKILTFRIPYYVGPLARGNSRFAWMTRKSEETITPWNFEEVVDKGASAQSFIERMTNFDKNLPNEKVLPKHSLLYEYFTVYNELTKVKYVTEGMRKPAFLSGEQKKAIVDLLFKTNRKVTVKQLKEDYFKKIECFDSVEISGVEDRFNASLGTYHDLLKIIKDKDFLDNEENEDILEDIVLTLTLFEDREMIEERLKTYAHLFDDKVMKQLKRRRYTGWGRLSRKLINGIRDKQSGKTILDFLKSDGFANRNFMQLIHDDSLTFKEDIQKAQVSGQGDSLHEHIANLAGSPAIKKGILQTVKVVDELVKVMGRHKPENIVIEMARENQTTQKGQKNSRERMKRIEEGIKELGSQILKEHPVENTQLQNEKLYLYYLQNGRDMYVDQELDINRLSDYDVDHIVPQSFLKDDSIDNKVLTRSDKARGKSDNVPSEEVVKKMKNYWRQLLNAKLITQRKFDNLTKAERGGLSELDKAGFIKRQLVETRQITKHVAQILDSRMNTKYDENDKLIREVKVITLKSKLVSDFRKDFQFYKVREINNYHHAHDAYLNAVVGTALIKKYPKLESEFVYGDYKVYDVRKMIAKSEQEIGKATAKYFFYSNIMNFFKTEITLANGEIRKRPLIETNGETGEIVWDKGRDFATVRKVLSMPQVNIVKKTEVQTGGFSKESILPKRNSDKLIARKKDWDPKKYGGFDSPTVAYSVLVVAKVEKGKSKKLKSVKELLGITIMERSSFEKNPIDFLEAKGYKEVKKDLIIKLPKYSLFELENGRKRMLASAGELQKGNELALPSKYVNFLYLASHYEKLKGSPEDNEQKQLFVEQHKHYLDEIIEQISEFSKRVILADANLDKVLSAYNKHRDKPIREQAENIIHLFTLTNLGAPAAFKYFDTTIDRKRYTSTKEVLDATLIHQSITGLYETRIDLSQLGGDGGGGGGSGGGGSGGGGSGGGGSGGTLGIEDEYRLHETSTEPDVSLGSTWLSDFPQAWAETGGMGLAVRQAPLIIPLKATSTPVSIQQYPMSHEARLGIKPHIQRLLDQGILVPCQSPWNTPLLPVKKPGTNDYRPVQDLREVNKRVEDIHPTVPNPYNLLSGLPPSHQWYTVLDLKDAFFCLRLHPTSQPLFAFEWRDPGMGISGQLTWTRLPQGFKNSPTLFDEALHRDLADFRIQHPDLILLQYVDDILLAATSELDCQQGTRALLQTLGDLGYRASAKKAQICQKQVKYLGYLLREGQRWLTEARKETVMGQPVPKTPRQLREFLGTAGFCRLWIPGFAEMAAPLYPLTKTGTLFSWGPDQQKAYQEIKQALLTAPALGLPDLTKPFELFVDEKQGYAKGVLTQKLGPWRRPVAYLSKKLDPVAAGWPPCLRMVAAIAVLTKDAGKLTMGQPLVILAPHAVEALVKQPPDRWLSNARMTHYQAMLLDTDRVQFGPVVALNPATLLPLPEEGAPHDCLEILAETHGTRPDLTDQPIPDADHTWYTDGSSFLQEGQRKAGAAVTTETEVIWAGALPAGTSAQRAELIALTQALKMAEGKRLNVYTDSRYAFATAHIHGEIYRRRGLLTSEGREIKNKSEILALLKALFLPKRLSIIHCLGHQKGDSAEARGNRLADQAAREAAIKTPPDTSTLLAGKRTADGSEFEKRTADGSEFESPKKKAKVE

SEQ ID NO: 2064 - protein, 2095 aa, synthetic construct
MPAAKRVKLDGGDKKYSIGLDIGTNSVGWAVITDEYKVPSKKFKVLGNTDRHSIKKNLIGALLFDSGETAEATRLKRTARRRYTRRKNRICYLQEIFSNEMAKVDDSFFHRLEESFLVEEDKKHERHPIFGNIVDEVAYHEKYPTIYHLRKKLVDSTDKADLRLIYLALAHMIKFRGHFLIEGDLNPDNSDVDKLFIQLVQTYNQLFEENPINASGVDAKAILSARLSKSRRLENLIAQLPGEKKNGLFGNLIALSLGLTPNFKSNFDLAEDAKLQLSKDTYDDDLDNLLAQIGDQYADLFLAAKNLSDAILLSDILRVNTEITKAPLSASMIKRYDEHHQDLTLLKALVRQQLPEKYKEIFFDQSKNGYAGYIDGGASQEEFYKFIKPILEKMDGTEELLVKLNREDLLRKQRTFDNGSIPHQIHLGELHAILRRQEDFYPFLKDNREKIEKILTFRIPYYVGPLARGNSRFAWMTRKSEETITPWNFEEVVDKGASAQSFIERMTNFDKNLPNEKVLPKHSLLYEYFTVYNELTKVKYVTEGMRKPAFLSGEQKKAIVDLLFKTNRKVTVKQLKEDYFKKIECFDSVEISGVEDRFNASLGTYHDLLKIIKDKDFLDNEENEDILEDIVLTLTLFEDREMIEERLKTYAHLFDDKVMKQLKRRRYTGWGRLSRKLINGIRDKQSGKTILDFLKSDGFANRNFMQLIHDDSLTFKEDIQKAQVSGQGDSLHEHIANLAGSPAIKKGILQTVKVVDELVKVMGRHKPENIVIEMARENQTTQKGQKNSRERMKRIEEGIKELGSQILKEHPVENTQLQNEKLYLYYLQNGRDMYVDQELDINRLSDYDVDHIVPQSFLKDDSIDNKVLTRSDKARGKSDNVPSEEVVKKMKNYWRQLLNAKLITQRKFDNLTKAERGGLSELDKAGFIKRQLVETRQITKHVAQILDSRMNTKYDENDKLIREVKVITLKSKLVSDFRKDFQFYKVREINNYHHAHDAYLNAVVGTALIKKYPKLESEFVYGDYKVYDVRKMIAKSEQEIGKATAKYFFYSNIMNFFKTEITLANGEIRKRPLIETNGETGEIVWDKGRDFATVRKVLSMPQVNIVKKTEVQTGGFSKESILPKRNSDKLIARKKDWDPKKYGGFDSPTVAYSVLVVAKVEKGKSKKLKSVKELLGITIMERSSFEKNPIDFLEAKGYKEVKKDLIIKLPKYSLFELENGRKRMLASAGELQKGNELALPSKYVNFLYLASHYEKLKGSPEDNEQKQLFVEQHKHYLDEIIEQISEFSKRVILADANLDKVLSAYNKHRDKPIREQAENIIHLFTLTNLGAPAAFKYFDTTIDRKRYTSTKEVLDATLIHQSITGLYETRIDLSQLGGDGGEAAAKEAAAKGGTLGIEDEYRLHETSTEPDVSLGSTWLSDFPQAWAETGGMGLAVRQAPLIIPLKATSTPVSIQQYPMSHEARLGIKPHIQRLLDQGILVPCQSPWNTPLLPVKKPGTNDYRPVQDLREVNKRVEDIHPTVPNPYNLLSGLPPSHQWYTVLDLKDAFFCLRLHPTSQPLFAFEWRDPGMGISGQLTWTRLPQGFKNSPTLFDEALHRDLADFRIQHPDLILLQYVDDILLAATSELDCQQGTRALLQTLGDLGYRASAKKAQICQKQVKYLGYLLREGQRWLTEARKETVMGQPVPKTPRQLREFLGTAGFCRLWIPGFAEMAAPLYPLTKTGTLFSWGPDQQKAYQEIKQALLTAPALGLPDLTKPFELFVDEKQGYAKGVLTQKLGPWRRPVAYLSKKLDPVAAGWPPCLRMVAAIAVLTKDAGKLTMGQPLVILAPHAVEALVKQPPDRWLSNARMTHYQAMLLDTDRVQFGPVVALNPATLLPLPEEGAPHDCLEILAETHGTRPDLTDQPIPDADHTWYTDGSSFLQEGQRKAGAAVTTETEVIWAGALPAGTSAQRAELIALTQALKMAEGKRLNVYTDSRYAFATAHIHGEIYRRRGLLTSEGREIKNKSEILALLKALFLPKRLSIIHCLGHQKGDSAEARGNRLADQAAREAAIKTPPDTSTLLAGKRTADGSEFEKRTADGSEFESPKKKAKVE

SEQ ID NO: 2065 - protein, 2096 aa, synthetic construct
MPAAKRVKLDGGDKKYSIGLDIGTNSVGWAVITDEYKVPSKKFKVLGNTDRHSIKKNLIGALLFDSGETAEATRLKRTARRRYTRRKNRICYLQEIFSNEMAKVDDSFFHRLEESFLVEEDKKHERHPIFGNIVDEVAYHEKYPTIYHLRKKLVDSTDKADLRLIYLALAHMIKFRGHFLIEGDLNPDNSDVDKLFIQLVQTYNQLFEENPINASGVDAKAILSARLSKSRRLENLIAQLPGEKKNGLFGNLIALSLGLTPNFKSNFDLAEDAKLQLSKDTYDDDLDNLLAQIGDQYADLFLAAKNLSDAILLSDILRVNTEITKAPLSASMIKRYDEHHQDLTLLKALVRQQLPEKYKEIFFDQSKNGYAGYIDGGASQEEFYKFIKPILEKMDGTEELLVKLNREDLLRKQRTFDNGSIPHQIHLGELHAILRRQEDFYPFLKDNREKIEKILTFRIPYYVGPLARGNSRFAWMTRKSEETITPWNFEEVVDKGASAQSFIERMTNFDKNLPNEKVLPKHSLLYEYFTVYNELTKVKYVTEGMRKPAFLSGEQKKAIVDLLFKTNRKVTVKQLKEDYFKKIECFDSVEISGVEDRFNASLGTYHDLLKIIKDKDFLDNEENEDILEDIVLTLTLFEDREMIEERLKTYAHLFDDKVMKQLKRRRYTGWGRLSRKLINGIRDKQSGKTILDFLKSDGFANRNFMQLIHDDSLTFKEDIQKAQVSGQGDSLHEHIANLAGSPAIKKGILQTVKVVDELVKVMGRHKPENIVIEMARENQTTQKGQKNSRERMKRIEEGIKELGSQILKEHPVENTQLQNEKLYLYYLQNGRDMYVDQELDINRLSDYDVDHIVPQSFLKDDSIDNKVLTRSDKARGKSDNVPSEEVVKKMKNYWRQLLNAKLITQRKFDNLTKAERGGLSELDKAGFIKRQLVETRQITKHVAQILDSRMNTKYDENDKLIREVKVITLKSKLVSDFRKDFQFYKVREINNYHHAHDAYLNAVVGTALIKKYPKLESEFVYGDYKVYDVRKMIAKSEQEIGKATAKYFFYSNIMNFFKTEITLANGEIRKRPLIETNGETGEIVWDKGRDFATVRKVLSMPQVNIVKKTEVQTGGFSKESILPKRNSDKLIARKKDWDPKKYGGFDSPTVAYSVLVVAKVEKGKSKKLKSVKELLGITIMERSSFEKNPIDFLEAKGYKEVKKDLIIKLPKYSLFELENGRKRMLASAGELQKGNELALPSKYVNFLYLASHYEKLKGSPEDNEQKQLFVEQHKHYLDEIIEQISEFSKRVILADANLDKVLSAYNKHRDKPIREQAENIIHLFTLTNLGAPAAFKYFDTTIDRKRYTSTKEVLDATLIHQSITGLYETRIDLSQLGGDGGPAPGSSEAAAKGGTLGIEDEYRLHETSTEPDVSLGSTWLSDFPQAWAETGGMGLAVRQAPLIIPLKATSTPVSIQQYPMSHEARLGIKPHIQRLLDQGILVPCQSPWNTPLLPVKKPGTNDYRPVQDLREVNKRVEDIHPTVPNPYNLLSGLPPSHQWYTVLDLKDAFFCLRLHPTSQPLFAFEWRDPGMGISGQLTWTRLPQGFKNSPTLFDEALHRDLADFRIQHPDLILLQYVDDILLAATSELDCQQGTRALLQTLGDLGYRASAKKAQICQKQVKYLGYLLREGQRWLTEARKETVMGQPVPKTPRQLREFLGTAGFCRLWIPGFAEMAAPLYPLTKTGTLFSWGPDQQKAYQEIKQALLTAPALGLPDLTKPFELFVDEKQGYAKGVLTQKLGPWRRPVAYLSKKLDPVAAGWPPCLRMVAAIAVLTKDAGKLTMGQPLVILAPHAVEALVKQPPDRWLSNARMTHYQAMLLDTDRVQFGPVVALNPATLLPLPEEGAPHDCLEILAETHGTRPDLTDQPIPDADHTWYTDGSSFLQEGQRKAGAAVTTETEVIWAGALPAGTSAQRAELIALTQALKMAEGKRLNVYTDSRYAFATAHIHGEIYRRRGLLTSEGREIKNKSEILALLKALFLPKRLSIIHCLGHQKGDSAEARGNRLADQAAREAAIKTPPDTSTLLAGKRTADGSEFEKRTADGSEFESPKKKAKVE

SEQ ID NO: 2066 - protein, 2115 aa, synthetic construct
MPAAKRVKLDGGDKKYSIGLDIGTNSVGWAVITDEYKVPSKKFKVLGNTDRHSIKKNLIGALLFDSGETAEATRLKRTARRRYTRRKNRICYLQEIFSNEMAKVDDSFFHRLEESFLVEEDKKHERHPIFGNIVDEVAYHEKYPTIYHLRKKLVDSTDKADLRLIYLALAHMIKFRGHFLIEGDLNPDNSDVDKLFIQLVQTYNQLFEENPINASGVDAKAILSARLSKSRRLENLIAQLPGEKKNGLFGNLIALSLGLTPNFKSNFDLAEDAKLQLSKDTYDDDLDNLLAQIGDQYADLFLAAKNLSDAILLSDILRVNTEITKAPLSASMIKRYDEHHQDLTLLKALVRQQLPEKYKEIFFDQSKNGYAGYIDGGASQEEFYKFIKPILEKMDGTEELLVKLNREDLLRKQRTFDNGSIPHQIHLGELHAILRRQEDFYPFLKDNREKIEKILTFRIPYYVGPLARGNSRFAWMTRKSEETITPWNFEEVVDKGASAQSFIERMTNFDKNLPNEKVLPKHSLLYEYFTVYNELTKVKYVTEGMRKPAFLSGEQKKAIVDLLFKTNRKVTVKQLKEDYFKKIECFDSVEISGVEDRFNASLGTYHDLLKIIKDKDFLDNEENEDILEDIVLTLTLFEDREMIEERLKTYAHLFDDKVMKQLKRRRYTGWGRLSRKLINGIRDKQSGKTILDFLKSDGFANRNFMQLIHDDSLTFKEDIQKAQVSGQGDSLHEHIANLAGSPAIKKGILQTVKVVDELVKVMGRHKPENIVIEMARENQTTQKGQKNSRERMKRIEEGIKELGSQILKEHPVENTQLQNEKLYLYYLQNGRDMYVDQELDINRLSDYDVDHIVPQSFLKDDSIDNKVLTRSDKARGKSDNVPSEEVVKKMKNYWRQLLNAKLITQRKFDNLTKAERGGLSELDKAGFIKRQLVETRQITKHVAQILDSRMNTKYDENDKLIREVKVITLKSKLVSDFRKDFQFYKVREINNYHHAHDAYLNAVVGTALIKKYPKLESEFVYGDYKVYDVRKMIAKSEQEIGKATAKYFFYSNIMNFFKTEITLANGEIRKRPLIETNGETGEIVWDKGRDFATVRKVLSMPQVNIVKKTEVQTGGFSKESILPKRNSDKLIARKKDWDPKKYGGFDSPTVAYSVLVVAKVEKGKSKKLKSVKELLGITIMERSSFEKNPIDFLEAKGYKEVKKDLIIKLPKYSLFELENGRKRMLASAGELQKGNELALPSKYVNFLYLASHYEKLKGSPEDNEQKQLFVEQHKHYLDEIIEQISEFSKRVILADANLDKVLSAYNKHRDKPIREQAENIIHLFTLTNLGAPAAFKYFDTTIDRKRYTSTKEVLDATLIHQSITGLYETRIDLSQLGGDGGGGGGSGGGGSGGGGSGGGGSGGGGSGGGGSGGTLGIEDEYRLHETSTEPDVSLGSTWLSDFPQAWAETGGMGLAVRQAPLIIPLKATSTPVSIQQYPMSHEARLGIKPHIQRLLDQGILVPCQSPWNTPLLPVKKPGTNDYRPVQDLREVNKRVEDIHPTVPNPYNLLSGLPPSHQWYTVLDLKDAFFCLRLHPTSQPLFAFEWRDPGMGISGQLTWTRLPQGFKNSPTLFDEALHRDLADFRIQHPDLILLQYVDDILLAATSELDCQQGTRALLQTLGDLGYRASAKKAQICQKQVKYLGYLLREGQRWLTEARKETVMGQPVPKTPRQLREFLGTAGFCRLWIPGFAEMAAPLYPLTKTGTLFSWGPDQQKAYQEIKQALLTAPALGLPDLTKPFELFVDEKQGYAKGVLTQKLGPWRRPVAYLSKKLDPVAAGWPPCLRMVAAIAVLTKDAGKLTMGQPLVILAPHAVEALVKQPPDRWLSNARMTHYQAMLLDTDRVQFGPVVALNPATLLPLPEEGAPHDCLEILAETHGTRPDLTDQPIPDADHTWYTDGSSFLQEGQRKAGAAVTTETEVIWAGALPAGTSAQRAELIALTQALKMAEGKRLNVYTDSRYAFATAHIHGEIYRRRGLLTSEGREIKNKSEILALLKALFLPKRLSIIHCLGHQKGDSAEARGNRLADQAAREAAIKTPPDTSTLLAGKRTADGSEFEKRTADGSEFESPKKKAKVE

SEQ ID NO: 2067 - protein, 2093 aa, synthetic construct
MPAAKRVKLDGGDKKYSIGLDIGTNSVGWAVITDEYKVPSKKFKVLGNTDRHSIKKNLIGALLFDSGETAEATRLKRTARRRYTRRKNRICYLQEIFSNEMAKVDDSFFHRLEESFLVEEDKKHERHPIFGNIVDEVAYHEKYPTIYHLRKKLVDSTDKADLRLIYLALAHMIKFRGHFLIEGDLNPDNSDVDKLFIQLVQTYNQLFEENPINASGVDAKAILSARLSKSRRLENLIAQLPGEKKNGLFGNLIALSLGLTPNFKSNFDLAEDAKLQLSKDTYDDDLDNLLAQIGDQYADLFLAAKNLSDAILLSDILRVNTEITKAPLSASMIKRYDEHHQDLTLLKALVRQQLPEKYKEIFFDQSKNGYAGYIDGGASQEEFYKFIKPILEKMDGTEELLVKLNREDLLRKQRTFDNGSIPHQIHLGELHAILRRQEDFYPFLKDNREKIEKILTFRIPYYVGPLARGNSRFAWMTRKSEETITPWNFEEVVDKGASAQSFIERMTNFDKNLPNEKVLPKHSLLYEYFTVYNELTKVKYVTEGMRKPAFLSGEQKKAIVDLLFKTNRKVTVKQLKEDYFKKIECFDSVEISGVEDRFNASLGTYHDLLKIIKDKDFLDNEENEDILEDIVLTLTLFEDREMIEERLKTYAHLFDDKVMKQLKRRRYTGWGRLSRKLINGIRDKQSGKTILDFLKSDGFANRNFMQLIHDDSLTFKEDIQKAQVSGQGDSLHEHIANLAGSPAIKKGILQTVKVVDELVKVMGRHKPENIVIEMARENQTTQKGQKNSRERMKRIEEGIKELGSQILKEHPVENTQLQNEKLYLYYLQNGRDMYVDQELDINRLSDYDVDHIVPQSFLKDDSIDNKVLTRSDKARGKSDNVPSEEVVKKMKNYWRQLLNAKLITQRKFDNLTKAERGGLSELDKAGFIKRQLVETRQITKHVAQILDSRMNTKYDENDKLIREVKVITLKSKLVSDFRKDFQFYKVREINNYHHAHDAYLNAVVGTALIKKYPKLESEFVYGDYKVYDVRKMIAKSEQEIGKATAKYFFYSNIMNFFKTEITLANGEIRKRPLIETNGETGEIVWDKGRDFATVRKVLSMPQVNIVKKTEVQTGGFSKESILPKRNSDKLIARKKDWDPKKYGGFDSPTVAYSVLVVAKVEKGKSKKLKSVKELLGITIMERSSFEKNPIDFLEAKGYKEVKKDLIIKLPKYSLFELENGRKRMLASAGELQKGNELALPSKYVNFLYLASHYEKLKGSPEDNEQKQLFVEQHKHYLDEIIEQISEFSKRVILADANLDKVLSAYNKHRDKPIREQAENIIHLFTLTNLGAPAAFKYFDTTIDRKRYTSTKEVLDATLIHQSITGLYETRIDLSQLGGDGGEAAAKPAPGGTLGIEDEYRLHETSTEPDVSLGSTWLSDFPQAWAETGGMGLAVRQAPLIIPLKATSTPVSIQQYPMSHEARLGIKPHIQRLLDQGILVPCQSPWNTPLLPVKKPGTNDYRPVQDLREVNKRVEDIHPTVPNPYNLLSGLPPSHQWYTVLDLKDAFFCLRLHPTSQPLFAFEWRDPGMGISGQLTWTRLPQGFKNSPTLFDEALHRDLADFRIQHPDLILLQYVDDILLAATSELDCQQGTRALLQTLGDLGYRASAKKAQICQKQVKYLGYLLREGQRWLTEARKETVMGQPVPKTPRQLREFLGTAGFCRLWIPGFAEMAAPLYPLTKTGTLFSWGPDQQKAYQEIKQALLTAPALGLPDLTKPFELFVDEKQGYAKGVLTQKLGPWRRPVAYLSKKLDPVAAGWPPCLRMVAAIAVLTKDAGKLTMGQPLVILAPHAVEALVKQPPDRWLSNARMTHYQAMLLDTDRVQFGPVVALNPATLLPLPEEGAPHDCLEILAETHGTRPDLTDQPIPDADHTWYTDGSSFLQEGQRKAGAAVTTETEVIWAGALPAGTSAQRAELIALTQALKMAEGKRLNVYTDSRYAFATAHIHGEIYRRRGLLTSEGREIKNKSEILALLKALFLPKRLSIIHCLGHQKGDSAEARGNRLADQAAREAAIKTPPDTSTLLAGKRTADGSEFEKRTADGSEFESPKKKAKVE

SEQ ID NO: 2068 - protein, 2096 aa, synthetic construct
MPAAKRVKLDGGDKKYSIGLDIGTNSVGWAVITDEYKVPSKKFKVLGNTDRHSIKKNLIGALLFDSGETAEATRLKRTARRRYTRRKNRICYLQEIFSNEMAKVDDSFFHRLEESFLVEEDKKHERHPIFGNIVDEVAYHEKYPTIYHLRKKLVDSTDKADLRLIYLALAHMIKFRGHFLIEGDLNPDNSDVDKLFIQLVQTYNQLFEENPINASGVDAKAILSARLSKSRRLENLIAQLPGEKKNGLFGNLIALSLGLTPNFKSNFDLAEDAKLQLSKDTYDDDLDNLLAQIGDQYADLFLAAKNLSDAILLSDILRVNTEITKAPLSASMIKRYDEHHQDLTLLKALVRQQLPEKYKEIFFDQSKNGYAGYIDGGASQEEFYKFIKPILEKMDGTEELLVKLNREDLLRKQRTFDNGSIPHQIHLGELHAILRRQEDFYPFLKDNREKIEKILTFRIPYYVGPLARGNSRFAWMTRKSEETITPWNFEEVVDKGASAQSFIERMTNFDKNLPNEKVLPKHSLLYEYFTVYNELTKVKYVTEGMRKPAFLSGEQKKAIVDLLFKTNRKVTVKQLKEDYFKKIECFDSVEISGVEDRFNASLGTYHDLLKIIKDKDFLDNEENEDILEDIVLTLTLFEDREMIEERLKTYAHLFDDKVMKQLKRRRYTGWGRLSRKLINGIRDKQSGKTILDFLKSDGFANRNFMQLIHDDSLTFKEDIQKAQVSGQGDSLHEHIANLAGSPAIKKGILQTVKVVDELVKVMGRHKPENIVIEMARENQTTQKGQKNSRERMKRIEEGIKELGSQILKEHPVENTQLQNEKLYLYYLQNGRDMYVDQELDINRLSDYDVDHIVPQSFLKDDSIDNKVLTRSDKARGKSDNVPSEEVVKKMKNYWRQLLNAKLITQRKFDNLTKAERGGLSELDKAGFIKRQLVETRQITKHVAQILDSRMNTKYDENDKLIREVKVITLKSKLVSDFRKDFQFYKVREINNYHHAHDAYLNAVVGTALIKKYPKLESEFVYGDYKVYDVRKMIAKSEQEIGKATAKYFFYSNIMNFFKTEITLANGEIRKRPLIETNGETGEIVWDKGRDFATVRKVLSMPQVNIVKKTEVQTGGFSKESILPKRNSDKLIARKKDWDPKKYGGFDSPTVAYSVLVVAKVEKGKSKKLKSVKELLGITIMERSSFEKNPIDFLEAKGYKEVKKDLIIKLPKYSLFELENGRKRMLASAGELQKGNELALPSKYVNFLYLASHYEKLKGSPEDNEQKQLFVEQHKHYLDEIIEQISEFSKRVILADANLDKVLSAYNKHRDKPIREQAENIIHLFTLTNLGAPAAFKYFDTTIDRKRYTSTKEVLDATLIHQSITGLYETRIDLSQLGGDGGGGGGGSEAAAKGGTLGIEDEYRLHETSTEPDVSLGSTWLSDFPQAWAETGGMGLAVRQAPLIIPLKATSTPVSIQQYPMSHEARLGIKPHIQRLLDQGILVPCQSPWNTPLLPVKKPGTNDYRPVQDLREVNKRVEDIHPTVPNPYNLLSGLPPSHQWYTVLDLKDAFFCLRLHPTSQPLFAFEWRDPGMGISGQLTWTRLPQGFKNSPTLFDEALHRDLADFRIQHPDLILLQYVDDILLAATSELDCQQGTRALLQTLGDLGYRASAKKAQICQKQVKYLGYLLREGQRWLTEARKETVMGQPVPKTPRQLREFLGTAGFCRLWIPGFAEMAAPLYPLTKTGTLFSWGPDQQKAYQEIKQALLTAPALGLPDLTKPFELFVDEKQGYAKGVLTQKLGPWRRPVAYLSKKLDPVAAGWPPCLRMVAAIAVLTKDAGKLTMGQPLVILAPHAVEALVKQPPDRWLSNARMTHYQAMLLDTDRVQFGPVVALNPATLLPLPEEGAPHDCLEILAETHGTRPDLTDQPIPDADHTWYTDGSSFLQEGQRKAGAAVTTETEVIWAGALPAGTSAQRAELIALTQALKMAEGKRLNVYTDSRYAFATAHIHGEIYRRRGLLTSEGREIKNKSEILALLKALFLPKRLSIIHCLGHQKGDSAEARGNRLADQAAREAAIKTPPDTSTLLAGKRTADGSEFEKRTADGSEFESPKKKAKVE

SEQ ID NO: 2069 - protein, 2096 aa, synthetic construct
MPAAKRVKLDGGDKKYSIGLDIGTNSVGWAVITDEYKVPSKKFKVLGNTDRHSIKKNLIGALLFDSGETAEATRLKRTARRRYTRRKNRICYLQEIFSNEMAKVDDSFFHRLEESFLVEEDKKHERHPIFGNIVDEVAYHEKYPTIYHLRKKLVDSTDKADLRLIYLALAHMIKFRGHFLIEGDLNPDNSDVDKLFIQLVQTYNQLFEENPINASGVDAKAILSARLSKSRRLENLIAQLPGEKKNGLFGNLIALSLGLTPNFKSNFDLAEDAKLQLSKDTYDDDLDNLLAQIGDQYADLFLAAKNLSDAILLSDILRVNTEITKAPLSASMIKRYDEHHQDLTLLKALVRQQLPEKYKEIFFDQSKNGYAGYIDGGASQEEFYKFIKPILEKMDGTEELLVKLNREDLLRKQRTFDNGSIPHQIHLGELHAILRRQEDFYPFLKDNREKIEKILTFRIPYYVGPLARGNSRFAWMTRKSEETITPWNFEEVVDKGASAQSFIERMTNFDKNLPNEKVLPKHSLLYEYFTVYNELTKVKYVTEGMRKPAFLSGEQKKAIVDLLFKTNRKVTVKQLKEDYFKKIECFDSVEISGVEDRFNASLGTYHDLLKIIKDKDFLDNEENEDILEDIVLTLTLFEDREMIEERLKTYAHLFDDKVMKQLKRRRYTGWGRLSRKLINGIRDKQSGKTILDFLKSDGFANRNFMQLIHDDSLTFKEDIQKAQVSGQGDSLHEHIANLAGSPAIKKGILQTVKVVDELVKVMGRHKPENIVIEMARENQTTQKGQKNSRERMKRIEEGIKELGSQILKEHPVENTQLQNEKLYLYYLQNGRDMYVDQELDINRLSDYDVDHIVPQSFLKDDSIDNKVLTRSDKARGKSDNVPSEEVVKKMKNYWRQLLNAKLITQRKFDNLTKAERGGLSELDKAGFIKRQLVETRQITKHVAQILDSRMNTKYDENDKLIREVKVITLKSKLVSDFRKDFQFYKVREINNYHHAHDAYLNAVVGTALIKKYPKLESEFVYGDYKVYDVRKMIAKSEQEIGKATAKYFFYSNIMNFFKTEITLANGEIRKRPLIETNGETGEIVWDKGRDFATVRKVLSMPQVNIVKKTEVQTGGFSKESILPKRNSDKLIARKKDWDPKKYGGFDSPTVAYSVLVVAKVEKGKSKKLKSVKELLGITIMERSSFEKNPIDFLEAKGYKEVKKDLIIKLPKYSLFELENGRKRMLASAGELQKGNELALPSKYVNFLYLASHYEKLKGSPEDNEQKQLFVEQHKHYLDEIIEQISEFSKRVILADANLDKVLSAYNKHRDKPIREQAENIIHLFTLTNLGAPAAFKYFDTTIDRKRYTSTKEVLDATLIHQSITGLYETRIDLSQLGGDGGGGSEAAAKPAPGGTLGIEDEYRLHETSTEPDVSLGSTWLSDFPQAWAETGGMGLAVRQAPLIIPLKATSTPVSIQQYPMSHEARLGIKPHIQRLLDQGILVPCQSPWNTPLLPVKKPGTNDYRPVQDLREVNKRVEDIHPTVPNPYNLLSGLPPSHQWYTVLDLKDAFFCLRLHPTSQPLFAFEWRDPGMGISGQLTWTRLPQGFKNSPTLFDEALHRDLADFRIQHPDLILLQYVDDILLAATSELDCQQGTRALLQTLGDLGYRASAKKAQICQKQVKYLGYLLREGQRWLTEARKETVMGQPVPKTPRQLREFLGTAGFCRLWIPGFAEMAAPLYPLTKTGTLFSWGPDQQKAYQEIKQALLTAPALGLPDLTKPFELFVDEKQGYAKGVLTQKLGPWRRPVAYLSKKLDPVAAGWPPCLRMVAAIAVLTKDAGKLTMGQPLVILAPHAVEALVKQPPDRWLSNARMTHYQAMLLDTDRVQFGPVVALNPATLLPLPEEGAPHDCLEILAETHGTRPDLTDQPIPDADHTWYTDGSSFLQEGQRKAGAAVTTETEVIWAGALPAGTSAQRAELIALTQALKMAEGKRLNVYTDSRYAFATAHIHGEIYRRRGLLTSEGREIKNKSEILALLKALFLPKRLSIIHCLGHQKGDSAEARGNRLADQAAREAAIKTPPDTSTLLAGKRTADGSEFEKRTADGSEFESPKKKAKVE

SEQ ID NO: 2070 - protein, 2105 aa, synthetic construct
MPAAKRVKLDGGDKKYSIGLDIGTNSVGWAVITDEYKVPSKKFKVLGNTDRHSIKKNLIGALLFDSGETAEATRLKRTARRRYTRRKNRICYLQEIFSNEMAKVDDSFFHRLEESFLVEEDKKHERHPIFGNIVDEVAYHEKYPTIYHLRKKLVDSTDKADLRLIYLALAHMIKFRGHFLIEGDLNPDNSDVDKLFIQLVQTYNQLFEENPINASGVDAKAILSARLSKSRRLENLIAQLPGEKKNGLFGNLIALSLGLTPNFKSNFDLAEDAKLQLSKDTYDDDLDNLLAQIGDQYADLFLAAKNLSDAILLSDILRVNTEITKAPLSASMIKRYDEHHQDLTLLKALVRQQLPEKYKEIFFDQSKNGYAGYIDGGASQEEFYKFIKPILEKMDGTEELLVKLNREDLLRKQRTFDNGSIPHQIHLGELHAILRRQEDFYPFLKDNREKIEKILTFRIPYYVGPLARGNSRFAWMTRKSEETITPWNFEEVVDKGASAQSFIERMTNFDKNLPNEKVLPKHSLLYEYFTVYNELTKVKYVTEGMRKPAFLSGEQKKAIVDLLFKTNRKVTVKQLKEDYFKKIECFDSVEISGVEDRFNASLGTYHDLLKIIKDKDFLDNEENEDILEDIVLTLTLFEDREMIEERLKTYAHLFDDKVMKQLKRRRYTGWGRLSRKLINGIRDKQSGKTILDFLKSDGFANRNFMQLIHDDSLTFKEDIQKAQVSGQGDSLHEHIANLAGSPAIKKGILQTVKVVDELVKVMGRHKPENIVIEMARENQTTQKGQKNSRERMKRIEEGIKELGSQILKEHPVENTQLQNEKLYLYYLQNGRDMYVDQELDINRLSDYDVDHIVPQSFLKDDSIDNKVLTRSDKARGKSDNVPSEEVVKKMKNYWRQLLNAKLITQRKFDNLTKAERGGLSELDKAGFIKRQLVETRQITKHVAQILDSRMNTKYDENDKLIREVKVITLKSKLVSDFRKDFQFYKVREINNYHHAHDAYLNAVVGTALIKKYPKLESEFVYGDYKVYDVRKMIAKSEQEIGKATAKYFFYSNIMNFFKTEITLANGEIRKRPLIETNGETGEIVWDKGRDFATVRKVLSMPQVNIVKKTEVQTGGFSKESILPKRNSDKLIARKKDWDPKKYGGFDSPTVAYSVLVVAKVEKGKSKKLKSVKELLGITIMERSSFEKNPIDFLEAKGYKEVKKDLIIKLPKYSLFELENGRKRMLASAGELQKGNELALPSKYVNFLYLASHYEKLKGSPEDNEQKQLFVEQHKHYLDEIIEQISEFSKRVILADANLDKVLSAYNKHRDKPIREQAENIIHLFTLTNLGAPAAFKYFDTTIDRKRYTSTKEVLDATLIHQSITGLYETRIDLSQLGGDGGEAAAKEAAAKEAAAKEAAAKGGTLGIEDEYRLHETSTEPDVSLGSTWLSDFPQAWAETGGMGLAVRQAPLIIPLKATSTPVSIQQYPMSHEARLGIKPHIQRLLDQGILVPCQSPWNTPLLPVKKPGTNDYRPVQDLREVNKRVEDIHPTVPNPYNLLSGLPPSHQWYTVLDLKDAFFCLRLHPTSQPLFAFEWRDPGMGISGQLTWTRLPQGFKNSPTLFNEALHRDLADFRIQHPDLILLQYVDDILLAATSELDCQQGTRALLQTLGDLGYRASAKKAQICQKQVKYLGYLLREGQRWLTEARKETVMGQPVPKTPRQLREFLGTAGFCRLWIPGFAEMAAPLYPLTKPGTLFSWGPDQQKAYQEIKQALLTAPALGLPDLTKPFELFVDEKQGYAKGVLTQKLGPWRRPVAYLSKKLDPVAAGWPPCLRMVAAIAVLTKDAGKLTMGQPLVILAPHAVEALVKQPPDRWLSNARMTHYQAMLLDTDRVQFGPVVALNPATLLPLPEEGAPHDCLEILAETHGTRPDLTDQPIPDADHTWYTDGSSFLQEGQRKAGAAVTTETEVIWAGALPAGTSAQRAELIALTQALKMAEGKRLNVYTDSRYAFATAHIHGEIYRRRGWLTSEGREIKNKSEILALLKALFLPKRLSIIHCLGHQKGDSAEARGNRLADQAAREAAIKTPPDTSTLLAGKRTADGSEFEKRTADGSEFESPKKKAKVE

SEQ ID NO: 2071 - protein, 2096 aa, synthetic construct
MPAAKRVKLDGGDKKYSIGLDIGTNSVGWAVITDEYKVPSKKFKVLGNTDRHSIKKNLIGALLFDSGETAEATRLKRTARRRYTRRKNRICYLQEIFSNEMAKVDDSFFHRLEESFLVEEDKKHERHPIFGNIVDEVAYHEKYPTIYHLRKKLVDSTDKADLRLIYLALAHMIKFRGHFLIEGDLNPDNSDVDKLFIQLVQTYNQLFEENPINASGVDAKAILSARLSKSRRLENLIAQLPGEKKNGLFGNLIALSLGLTPNFKSNFDLAEDAKLQLSKDTYDDDLDNLLAQIGDQYADLFLAAKNLSDAILLSDILRVNTEITKAPLSASMIKRYDEHHQDLTLLKALVRQQLPEKYKEIFFDQSKNGYAGYIDGGASQEEFYKFIKPILEKMDGTEELLVKLNREDLLRKQRTFDNGSIPHQIHLGELHAILRRQEDFYPFLKDNREKIEKILTFRIPYYVGPLARGNSRFAWMTRKSEETITPWNFEEVVDKGASAQSFIERMTNFDKNLPNEKVLPKHSLLYEYFTVYNELTKVKYVTEGMRKPAFLSGEQKKAIVDLLFKTNRKVTVKQLKEDYFKKIECFDSVEISGVEDRFNASLGTYHDLLKIIKDKDFLDNEENEDILEDIVLTLTLFEDREMIEERLKTYAHLFDDKVMKQLKRRRYTGWGRLSRKLINGIRDKQSGKTILDFLKSDGFANRNFMQLIHDDSLTFKEDIQKAQVSGQGDSLHEHIANLAGSPAIKKGILQTVKVVDELVKVMGRHKPENIVIEMARENQTTQKGQKNSRERMKRIEEGIKELGSQILKEHPVENTQLQNEKLYLYYLQNGRDMYVDQELDINRLSDYDVDHIVPQSFLKDDSIDNKVLTRSDKARGKSDNVPSEEVVKKMKNYWRQLLNAKLITQRKFDNLTKAERGGLSELDKAGFIKRQLVETRQITKHVAQILDSRMNTKYDENDKLIREVKVITLKSKLVSDFRKDFQFYKVREINNYHHAHDAYLNAVVGTALIKKYPKLESEFVYGDYKVYDVRKMIAKSEQEIGKATAKYFFYSNIMNFFKTEITLANGEIRKRPLIETNGETGEIVWDKGRDFATVRKVLSMPQVNIVKKTEVQTGGFSKESILPKRNSDKLIARKKDWDPKKYGGFDSPTVAYSVLVVAKVEKGKSKKLKSVKELLGITIMERSSFEKNPIDFLEAKGYKEVKKDLIIKLPKYSLFELENGRKRMLASAGELQKGNELALPSKYVNFLYLASHYEKLKGSPEDNEQKQLFVEQHKHYLDEIIEQISEFSKRVILADANLDKVLSAYNKHRDKPIREQAENIIHLFTLTNLGAPAAFKYFDTTIDRKRYTSTKEVLDATLIHQSITGLYETRIDLSQLGGDGGGGSEAAAKPAPGGTLGIEDEYRLHETSTEPDVSLGSTWLSDFPQAWAETGGMGLAVRQAPLIIPLKATSTPVSIQQYPMSHEARLGIKPHIQRLLDQGILVPCQSPWNTPLLPVKKPGTNDYRPVQDLREVNKRVEDIHPTVPNPYNLLSGLPPSHQWYTVLDLKDAFFCLRLHPTSQPLFAFEWRDPGMGISGQLTWTRLPQGFKNSPTLFNEALHRDLADFRIQHPDLILLQYVDDILLAATSELDCQQGTRALLQTLGDLGYRASAKKAQICQKQVKYLGYLLREGQRWLTEARKETVMGQPVPKTPRQLREFLGTAGFCRLWIPGFAEMAAPLYPLTKPGTLFSWGPDQQKAYQEIKQALLTAPALGLPDLTKPFELFVDEKQGYAKGVLTQKLGPWRRPVAYLSKKLDPVAAGWPPCLRMVAAIAVLTKDAGKLTMGQPLVILAPHAVEALVKQPPDRWLSNARMTHYQAMLLDTDRVQFGPVVALNPATLLPLPEEGAPHDCLEILAETHGTRPDLTDQPIPDADHTWYTDGSSFLQEGQRKAGAAVTTETEVIWAGALPAGTSAQRAELIALTQALKMAEGKRLNVYTDSRYAFATAHIHGEIYRRRGWLTSEGREIKNKSEILALLKALFLPKRLSIIHCLGHQKGDSAEARGNRLADQAAREAAIKTPPDTSTLLAGKRTADGSEFEKRTADGSEFESPKKKAKVE

SEQ ID NO: 2072 - protein, 2105 aa, synthetic construct
MPAAKRVKLDGGDKKYSIGLDIGTNSVGWAVITDEYKVPSKKFKVLGNTDRHSIKKNLIGALLFDSGETAEATRLKRTARRRYTRRKNRICYLQEIFSNEMAKVDDSFFHRLEESFLVEEDKKHERHPIFGNIVDEVAYHEKYPTIYHLRKKLVDSTDKADLRLIYLALAHMIKFRGHFLIEGDLNPDNSDVDKLFIQLVQTYNQLFEENPINASGVDAKAILSARLSKSRRLENLIAQLPGEKKNGLFGNLIALSLGLTPNFKSNFDLAEDAKLQLSKDTYDDDLDNLLAQIGDQYADLFLAAKNLSDAILLSDILRVNTEITKAPLSASMIKRYDEHHQDLTLLKALVRQQLPEKYKEIFFDQSKNGYAGYIDGGASQEEFYKFIKPILEKMDGTEELLVKLNREDLLRKQRTFDNGSIPHQIHLGELHAILRRQEDFYPFLKDNREKIEKILTFRIPYYVGPLARGNSRFAWMTRKSEETITPWNFEEVVDKGASAQSFIERMTNFDKNLPNEKVLPKHSLLYEYFTVYNELTKVKYVTEGMRKPAFLSGEQKKAIVDLLFKTNRKVTVKQLKEDYFKKIECFDSVEISGVEDRFNASLGTYHDLLKIIKDKDFLDNEENEDILEDIVLTLTLFEDREMIEERLKTYAHLFDDKVMKQLKRRRYTGWGRLSRKLINGIRDKQSGKTILDFLKSDGFANRNFMQLIHDDSLTFKEDIQKAQVSGQGDSLHEHIANLAGSPAIKKGILQTVKVVDELVKVMGRHKPENIVIEMARENQTTQKGQKNSRERMKRIEEGIKELGSQILKEHPVENTQLQNEKLYLYYLQNGRDMYVDQELDINRLSDYDVDHIVPQSFLKDDSIDNKVLTRSDKARGKSDNVPSEEVVKKMKNYWRQLLNAKLITQRKFDNLTKAERGGLSELDKAGFIKRQLVETRQITKHVAQILDSRMNTKYDENDKLIREVKVITLKSKLVSDFRKDFQFYKVREINNYHHAHDAYLNAVVGTALIKKYPKLESEFVYGDYKVYDVRKMIAKSEQEIGKATAKYFFYSNIMNFFKTEITLANGEIRKRPLIETNGETGEIVWDKGRDFATVRKVLSMPQVNIVKKTEVQTGGFSKESILPKRNSDKLIARKKDWDPKKYGGFDSPTVAYSVLVVAKVEKGKSKKLKSVKELLGITIMERSSFEKNPIDFLEAKGYKEVKKDLIIKLPKYSLFELENGRKRMLASAGELQKGNELALPSKYVNFLYLASHYEKLKGSPEDNEQKQLFVEQHKHYLDEIIEQISEFSKRVILADANLDKVLSAYNKHRDKPIREQAENIIHLFTLTNLGAPAAFKYFDTTIDRKRYTSTKEVLDATLIHQSITGLYETRIDLSQLGGDGGGGGGSGGGGSGGGGSGGGGSGGTLGIEDEYRLHETSTEPDVSLGSTWLSDFPQAWAETGGMGLAVRQAPLIIPLKATSTPVSIQQYPMSHEARLGIKPHIQRLLDQGILVPCQSPWNTPLLPVKKPGTNDYRPVQDLREVNKRVEDIHPTVPNPYNLLSGLPPSHQWYTVLDLKDAFFCLRLHPTSQPLFAFEWRDPGMGISGQLTWTRLPQGFKNSPTLFNEALHRDLADFRIQHPDLILLQYVDDILLAATSELDCQQGTRALLQTLGDLGYRASAKKAQICQKQVKYLGYLLREGQRWLTEARKETVMGQPVPKTPRQLREFLGTAGFCRLWIPGFAEMAAPLYPLTKPGTLFSWGPDQQKAYQEIKQALLTAPALGLPDLTKPFELFVDEKQGYAKGVLTQKLGPWRRPVAYLSKKLDPVAAGWPPCLRMVAAIAVLTKDAGKLTMGQPLVILAPHAVEALVKQPPDRWLSNARMTHYQAMLLDTDRVQFGPVVALNPATLLPLPEEGAPHDCLEILAETHGTRPDLTDQPIPDADHTWYTDGSSFLQEGQRKAGAAVTTETEVIWAGALPAGTSAQRAELIALTQALKMAEGKRLNVYTDSRYAFATAHIHGEIYRRRGWLTSEGREIKNKSEILALLKALFLPKRLSIIHCLGHQKGDSAEARGNRLADQAAREAAIKTPPDTSTLLAGKRTADGSEFEKRTADGSEFESPKKKAKVE

SEQ ID NO: 2073 - protein, 2093 aa, synthetic construct
MPAAKRVKLDGGDKKYSIGLDIGTNSVGWAVITDEYKVPSKKFKVLGNTDRHSIKKNLIGALLFDSGETAEATRLKRTARRRYTRRKNRICYLQEIFSNEMAKVDDSFFHRLEESFLVEEDKKHERHPIFGNIVDEVAYHEKYPTIYHLRKKLVDSTDKADLRLIYLALAHMIKFRGHFLIEGDLNPDNSDVDKLFIQLVQTYNQLFEENPINASGVDAKAILSARLSKSRRLENLIAQLPGEKKNGLFGNLIALSLGLTPNFKSNFDLAEDAKLQLSKDTYDDDLDNLLAQIGDQYADLFLAAKNLSDAILLSDILRVNTEITKAPLSASMIKRYDEHHQDLTLLKALVRQQLPEKYKEIFFDQSKNGYAGYIDGGASQEEFYKFIKPILEKMDGTEELLVKLNREDLLRKQRTFDNGSIPHQIHLGELHAILRRQEDFYPFLKDNREKIEKILTFRIPYYVGPLARGNSRFAWMTRKSEETITPWNFEEVVDKGASAQSFIERMTNFDKNLPNEKVLPKHSLLYEYFTVYNELTKVKYVTEGMRKPAFLSGEQKKAIVDLLFKTNRKVTVKQLKEDYFKKIECFDSVEISGVEDRFNASLGTYHDLLKIIKDKDFLDNEENEDILEDIVLTLTLFEDREMIEERLKTYAHLFDDKVMKQLKRRRYTGWGRLSRKLINGIRDKQSGKTILDFLKSDGFANRNFMQLIHDDSLTFKEDIQKAQVSGQGDSLHEHIANLAGSPAIKKGILQTVKVVDELVKVMGRHKPENIVIEMARENQTTQKGQKNSRERMKRIEEGIKELGSQILKEHPVENTQLQNEKLYLYYLQNGRDMYVDQELDINRLSDYDVDHIVPQSFLKDDSIDNKVLTRSDKARGKSDNVPSEEVVKKMKNYWRQLLNAKLITQRKFDNLTKAERGGLSELDKAGFIKRQLVETRQITKHVAQILDSRMNTKYDENDKLIREVKVITLKSKLVSDFRKDFQFYKVREINNYHHAHDAYLNAVVGTALIKKYPKLESEFVYGDYKVYDVRKMIAKSEQEIGKATAKYFFYSNIMNFFKTEITLANGEIRKRPLIETNGETGEIVWDKGRDFATVRKVLSMPQVNIVKKTEVQTGGFSKESILPKRNSDKLIARKKDWDPKKYGGFDSPTVAYSVLVVAKVEKGKSKKLKSVKELLGITIMERSSFEKNPIDFLEAKGYKEVKKDLIIKLPKYSLFELENGRKRMLASAGELQKGNELALPSKYVNFLYLASHYEKLKGSPEDNEQKQLFVEQHKHYLDEIIEQISEFSKRVILADANLDKVLSAYNKHRDKPIREQAENIIHLFTLTNLGAPAAFKYFDTTIDRKRYTSTKEVLDATLIHQSITGLYETRIDLSQLGGDGGGSSEAAAKGGTLGIEDEYRLHETSTEPDVSLGSTWLSDFPQAWAETGGMGLAVRQAPLIIPLKATSTPVSIQQYPMSHEARLGIKPHIQRLLDQGILVPCQSPWNTPLLPVKKPGTNDYRPVQDLREVNKRVEDIHPTVPNPYNLLSGLPPSHQWYTVLDLKDAFFCLRLHPTSQPLFAFEWRDPGMGISGQLTWTRLPQGFKNSPTLFNEALHRDLADFRIQHPDLILLQYVDDILLAATSELDCQQGTRALLQTLGDLGYRASAKKAQICQKQVKYLGYLLREGQRWLTEARKETVMGQPVPKTPRQLREFLGTAGFCRLWIPGFAEMAAPLYPLTKPGTLFSWGPDQQKAYQEIKQALLTAPALGLPDLTKPFELFVDEKQGYAKGVLTQKLGPWRRPVAYLSKKLDPVAAGWPPCLRMVAAIAVLTKDAGKLTMGQPLVILAPHAVEALVKQPPDRWLSNARMTHYQAMLLDTDRVQFGPVVALNPATLLPLPEEGAPHDCLEILAETHGTRPDLTDQPIPDADHTWYTDGSSFLQEGQRKAGAAVTTETEVIWAGALPAGTSAQRAELIALTQALKMAEGKRLNVYTDSRYAFATAHIHGEIYRRRGWLTSEGREIKNKSEILALLKALFLPKRLSIIHCLGHQKGDSAEARGNRLADQAAREAAIKTPPDTSTLLAGKRTADGSEFEKRTADGSEFESPKKKAKVE

SEQ ID NO: 2074 - protein, 2096 aa, synthetic construct
MPAAKRVKLDGGDKKYSIGLDIGTNSVGWAVITDEYKVPSKKFKVLGNTDRHSIKKNLIGALLFDSGETAEATRLKRTARRRYTRRKNRICYLQEIFSNEMAKVDDSFFHRLEESFLVEEDKKHERHPIFGNIVDEVAYHEKYPTIYHLRKKLVDSTDKADLRLIYLALAHMIKFRGHFLIEGDLNPDNSDVDKLFIQLVQTYNQLFEENPINASGVDAKAILSARLSKSRRLENLIAQLPGEKKNGLFGNLIALSLGLTPNFKSNFDLAEDAKLQLSKDTYDDDLDNLLAQIGDQYADLFLAAKNLSDAILLSDILRVNTEITKAPLSASMIKRYDEHHQDLTLLKALVRQQLPEKYKEIFFDQSKNGYAGYIDGGASQEEFYKFIKPILEKMDGTEELLVKLNREDLLRKQRTFDNGSIPHQIHLGELHAILRRQEDFYPFLKDNREKIEKILTFRIPYYVGPLARGNSRFAWMTRKSEETITPWNFEEVVDKGASAQSFIERMTNFDKNLPNEKVLPKHSLLYEYFTVYNELTKVKYVTEGMRKPAFLSGEQKKAIVDLLFKTNRKVTVKQLKEDYFKKIECFDSVEISGVEDRFNASLGTYHDLLKIIKDKDFLDNEENEDILEDIVLTLTLFEDREMIEERLKTYAHLFDDKVMKQLKRRRYTGWGRLSRKLINGIRDKQSGKTILDFLKSDGFANRNFMQLIHDDSLTFKEDIQKAQVSGQGDSLHEHIANLAGSPAIKKGILQTVKVVDELVKVMGRHKPENIVIEMARENQTTQKGQKNSRERMKRIEEGIKELGSQILKEHPVENTQLQNEKLYLYYLQNGRDMYVDQELDINRLSDYDVDHIVPQSFLKDDSIDNKVLTRSDKARGKSDNVPSEEVVKKMKNYWRQLLNAKLITQRKFDNLTKAERGGLSELDKAGFIKRQLVETRQITKHVAQILDSRMNTKYDENDKLIREVKVITLKSKLVSDFRKDFQFYKVREINNYHHAHDAYLNAVVGTALIKKYPKLESEFVYGDYKVYDVRKMIAKSEQEIGKATAKYFFYSNIMNFFKTEITLANGEIRKRPLIETNGETGEIVWDKGRDFATVRKVLSMPQVNIVKKTEVQTGGFSKESILPKRNSDKLIARKKDWDPKKYGGFDSPTVAYSVLVVAKVEKGKSKKLKSVKELLGITIMERSSFEKNPIDFLEAKGYKEVKKDLIIKLPKYSLFELENGRKRMLASAGELQKGNELALPSKYVNFLYLASHYEKLKGSPEDNEQKQLFVEQHKHYLDEIIEQISEFSKRVILADANLDKVLSAYNKHRDKPIREQAENIIHLFTLTNLGAPAAFKYFDTTIDRKRYTSTKEVLDATLIHQSITGLYETRIDLSQLGGDGGGGSEAAAKGGGGGTLGIEDEYRLHETSTEPDVSLGSTWLSDFPQAWAETGGMGLAVRQAPLIIPLKATSTPVSIQQYPMSHEARLGIKPHIQRLLDQGILVPCQSPWNTPLLPVKKPGTNDYRPVQDLREVNKRVEDIHPTVPNPYNLLSGLPPSHQWYTVLDLKDAFFCLRLHPTSQPLFAFEWRDPGMGISGQLTWTRLPQGFKNSPTLFNEALHRDLADFRIQHPDLILLQYVDDILLAATSELDCQQGTRALLQTLGDLGYRASAKKAQICQKQVKYLGYLLREGQRWLTEARKETVMGQPVPKTPRQLREFLGTAGFCRLWIPGFAEMAAPLYPLTKPGTLFSWGPDQQKAYQEIKQALLTAPALGLPDLTKPFELFVDEKQGYAKGVLTQKLGPWRRPVAYLSKKLDPVAAGWPPCLRMVAAIAVLTKDAGKLTMGQPLVILAPHAVEALVKQPPDRWLSNARMTHYQAMLLDTDRVQFGPVVALNPATLLPLPEEGAPHDCLEILAETHGTRPDLTDQPIPDADHTWYTDGSSFLQEGQRKAGAAVTTETEVIWAGALPAGTSAQRAELIALTQALKMAEGKRLNVYTDSRYAFATAHIHGEIYRRRGWLTSEGREIKNKSEILALLKALFLPKRLSIIHCLGHQKGDSAEARGNRLADQAAREAAIKTPPDTSTLLAGKRTADGSEFEKRTADGSEFESPKKKAKVE

SEQ ID NO: 2075 - protein, 2096 aa, synthetic construct
MPAAKRVKLDGGDKKYSIGLDIGTNSVGWAVITDEYKVPSKKFKVLGNTDRHSIKKNLIGALLFDSGETAEATRLKRTARRRYTRRKNRICYLQEIFSNEMAKVDDSFFHRLEESFLVEEDKKHERHPIFGNIVDEVAYHEKYPTIYHLRKKLVDSTDKADLRLIYLALAHMIKFRGHFLIEGDLNPDNSDVDKLFIQLVQTYNQLFEENPINASGVDAKAILSARLSKSRRLENLIAQLPGEKKNGLFGNLIALSLGLTPNFKSNFDLAEDAKLQLSKDTYDDDLDNLLAQIGDQYADLFLAAKNLSDAILLSDILRVNTEITKAPLSASMIKRYDEHHQDLTLLKALVRQQLPEKYKEIFFDQSKNGYAGYIDGGASQEEFYKFIKPILEKMDGTEELLVKLNREDLLRKQRTFDNGSIPHQIHLGELHAILRRQEDFYPFLKDNREKIEKILTFRIPYYVGPLARGNSRFAWMTRKSEETITPWNFEEVVDKGASAQSFIERMTNFDKNLPNEKVLPKHSLLYEYFTVYNELTKVKYVTEGMRKPAFLSGEQKKAIVDLLFKTNRKVTVKQLKEDYFKKIECFDSVEISGVEDRFNASLGTYHDLLKIIKDKDFLDNEENEDILEDIVLTLTLFEDREMIEERLKTYAHLFDDKVMKQLKRRRYTGWGRLSRKLINGIRDKQSGKTILDFLKSDGFANRNFMQLIHDDSLTFKEDIQKAQVSGQGDSLHEHIANLAGSPAIKKGILQTVKVVDELVKVMGRHKPENIVIEMARENQTTQKGQKNSRERMKRIEEGIKELGSQILKEHPVENTQLQNEKLYLYYLQNGRDMYVDQELDINRLSDYDVDHIVPQSFLKDDSIDNKVLTRSDKARGKSDNVPSEEVVKKMKNYWRQLLNAKLITQRKFDNLTKAERGGLSELDKAGFIKRQLVETRQITKHVAQILDSRMNTKYDENDKLIREVKVITLKSKLVSDFRKDFQFYKVREINNYHHAHDAYLNAVVGTALIKKYPKLESEFVYGDYKVYDVRKMIAKSEQEIGKATAKYFFYSNIMNFFKTEITLANGEIRKRPLIETNGETGEIVWDKGRDFATVRKVLSMPQVNIVKKTEVQTGGFSKESILPKRNSDKLIARKKDWDPKKYGGFDSPTVAYSVLVVAKVEKGKSKKLKSVKELLGITIMERSSFEKNPIDFLEAKGYKEVKKDLIIKLPKYSLFELENGRKRMLASAGELQKGNELALPSKYVNFLYLASHYEKLKGSPEDNEQKQLFVEQHKHYLDEIIEQISEFSKRVILADANLDKVLSAYNKHRDKPIREQAENIIHLFTLTNLGAPAAFKYFDTTIDRKRYTSTKEVLDATLIHQSITGLYETRIDLSQLGGDGGGSSEAAAKGGGGGTLGIEDEYRLHETSTEPDVSLGSTWLSDFPQAWAETGGMGLAVRQAPLIIPLKATSTPVSIQQYPMSHEARLGIKPHIQRLLDQGILVPCQSPWNTPLLPVKKPGTNDYRPVQDLREVNKRVEDIHPTVPNPYNLLSGLPPSHQWYTVLDLKDAFFCLRLHPTSQPLFAFEWRDPGMGISGQLTWTRLPQGFKNSPTLFNEALHRDLADFRIQHPDLILLQYVDDILLAATSELDCQQGTRALLQTLGDLGYRASAKKAQICQKQVKYLGYLLREGQRWLTEARKETVMGQPVPKTPRQLREFLGTAGFCRLWIPGFAEMAAPLYPLTKPGTLFSWGPDQQKAYQEIKQALLTAPALGLPDLTKPFELFVDEKQGYAKGVLTQKLGPWRRPVAYLSKKLDPVAAGWPPCLRMVAAIAVLTKDAGKLTMGQPLVILAPHAVEALVKQPPDRWLSNARMTHYQAMLLDTDRVQFGPVVALNPATLLPLPEEGAPHDCLEILAETHGTRPDLTDQPIPDADHTWYTDGSSFLQEGQRKAGAAVTTETEVIWAGALPAGTSAQRAELIALTQALKMAEGKRLNVYTDSRYAFATAHIHGEIYRRRGWLTSEGREIKNKSEILALLKALFLPKRLSIIHCLGHQKGDSAEARGNRLADQAAREAAIKTPPDTSTLLAGKRTADGSEFEKRTADGSEFESPKKKAKVE

SEQ ID NO: 2076 - protein, 2096 aa, synthetic construct
MPAAKRVKLDGGDKKYSIGLDIGTNSVGWAVITDEYKVPSKKFKVLGNTDRHSIKKNLIGALLFDSGETAEATRLKRTARRRYTRRKNRICYLQEIFSNEMAKVDDSFFHRLEESFLVEEDKKHERHPIFGNIVDEVAYHEKYPTIYHLRKKLVDSTDKADLRLIYLALAHMIKFRGHFLIEGDLNPDNSDVDKLFIQLVQTYNQLFEENPINASGVDAKAILSARLSKSRRLENLIAQLPGEKKNGLFGNLIALSLGLTPNFKSNFDLAEDAKLQLSKDTYDDDLDNLLAQIGDQYADLFLAAKNLSDAILLSDILRVNTEITKAPLSASMIKRYDEHHQDLTLLKALVRQQLPEKYKEIFFDQSKNGYAGYIDGGASQEEFYKFIKPILEKMDGTEELLVKLNREDLLRKQRTFDNGSIPHQIHLGELHAILRRQEDFYPFLKDNREKIEKILTFRIPYYVGPLARGNSRFAWMTRKSEETITPWNFEEVVDKGASAQSFIERMTNFDKNLPNEKVLPKHSLLYEYFTVYNELTKVKYVTEGMRKPAFLSGEQKKAIVDLLFKTNRKVTVKQLKEDYFKKIECFDSVEISGVEDRFNASLGTYHDLLKIIKDKDFLDNEENEDILEDIVLTLTLFEDREMIEERLKTYAHLFDDKVMKQLKRRRYTGWGRLSRKLINGIRDKQSGKTILDFLKSDGFANRNFMQLIHDDSLTFKEDIQKAQVSGQGDSLHEHIANLAGSPAIKKGILQTVKVVDELVKVMGRHKPENIVIEMARENQTTQKGQKNSRERMKRIEEGIKELGSQILKEHPVENTQLQNEKLYLYYLQNGRDMYVDQELDINRLSDYDVDHIVPQSFLKDDSIDNKVLTRSDKARGKSDNVPSEEVVKKMKNYWRQLLNAKLITQRKFDNLTKAERGGLSELDKAGFIKRQLVETRQITKHVAQILDSRMNTKYDENDKLIREVKVITLKSKLVSDFRKDFQFYKVREINNYHHAHDAYLNAVVGTALIKKYPKLESEFVYGDYKVYDVRKMIAKSEQEIGKATAKYFFYSNIMNFFKTEITLANGEIRKRPLIETNGETGEIVWDKGRDFATVRKVLSMPQVNIVKKTEVQTGGFSKESILPKRNSDKLIARKKDWDPKKYGGFDSPTVAYSVLVVAKVEKGKSKKLKSVKELLGITIMERSSFEKNPIDFLEAKGYKEVKKDLIIKLPKYSLFELENGRKRMLASAGELQKGNELALPSKYVNFLYLASHYEKLKGSPEDNEQKQLFVEQHKHYLDEIIEQISEFSKRVILADANLDKVLSAYNKHRDKPIREQAENIIHLFTLTNLGAPAAFKYFDTTIDRKRYTSTKEVLDATLIHQSITGLYETRIDLSQLGGDGGGSSGGSEAAAKGGTLGIEDEYRLHETSTEPDVSLGSTWLSDFPQAWAETGGMGLAVRQAPLIIPLKATSTPVSIQQYPMSHEARLGIKPHIQRLLDQGILVPCQSPWNTPLLPVKKPGTNDYRPVQDLREVNKRVEDIHPTVPNPYNLLSGLPPSHQWYTVLDLKDAFFCLRLHPTSQPLFAFEWRDPGMGISGQLTWTRLPQGFKNSPTLFNEALHRDLADFRIQHPDLILLQYVDDILLAATSELDCQQGTRALLQTLGDLGYRASAKKAQICQKQVKYLGYLLREGQRWLTEARKETVMGQPVPKTPRQLREFLGTAGFCRLWIPGFAEMAAPLYPLTKPGTLFSWGPDQQKAYQEIKQALLTAPALGLPDLTKPFELFVDEKQGYAKGVLTQKLGPWRRPVAYLSKKLDPVAAGWPPCLRMVAAIAVLTKDAGKLTMGQPLVILAPHAVEALVKQPPDRWLSNARMTHYQAMLLDTDRVQFGPVVALNPATLLPLPEEGAPHDCLEILAETHGTRPDLTDQPIPDADHTWYTDGSSFLQEGQRKAGAAVTTETEVIWAGALPAGTSAQRAELIALTQALKMAEGKRLNVYTDSRYAFATAHIHGEIYRRRGWLTSEGREIKNKSEILALLKALFLPKRLSIIHCLGHQKGDSAEARGNRLADQAAREAAIKTPPDTSTLLAGKRTADGSEFEKRTADGSEFESPKKKAKVE

SEQ ID NO: 2077 - protein, 2090 aa, synthetic construct
MPAAKRVKLDGGDKKYSIGLDIGTNSVGWAVITDEYKVPSKKFKVLGNTDRHSIKKNLIGALLFDSGETAEATRLKRTARRRYTRRKNRICYLQEIFSNEMAKVDDSFFHRLEESFLVEEDKKHERHPIFGNIVDEVAYHEKYPTIYHLRKKLVDSTDKADLRLIYLALAHMIKFRGHFLIEGDLNPDNSDVDKLFIQLVQTYNQLFEENPINASGVDAKAILSARLSKSRRLENLIAQLPGEKKNGLFGNLIALSLGLTPNFKSNFDLAEDAKLQLSKDTYDDDLDNLLAQIGDQYADLFLAAKNLSDAILLSDILRVNTEITKAPLSASMIKRYDEHHQDLTLLKALVRQQLPEKYKEIFFDQSKNGYAGYIDGGASQEEFYKFIKPILEKMDGTEELLVKLNREDLLRKQRTFDNGSIPHQIHLGELHAILRRQEDFYPFLKDNREKIEKILTFRIPYYVGPLARGNSRFAWMTRKSEETITPWNFEEVVDKGASAQSFIERMTNFDKNLPNEKVLPKHSLLYEYFTVYNELTKVKYVTEGMRKPAFLSGEQKKAIVDLLFKTNRKVTVKQLKEDYFKKIECFDSVEISGVEDRFNASLGTYHDLLKIIKDKDFLDNEENEDILEDIVLTLTLFEDREMIEERLKTYAHLFDDKVMKQLKRRRYTGWGRLSRKLINGIRDKQSGKTILDFLKSDGFANRNFMQLIHDDSLTFKEDIQKAQVSGQGDSLHEHIANLAGSPAIKKGILQTVKVVDELVKVMGRHKPENIVIEMARENQTTQKGQKNSRERMKRIEEGIKELGSQILKEHPVENTQLQNEKLYLYYLQNGRDMYVDQELDINRLSDYDVDHIVPQSFLKDDSIDNKVLTRSDKARGKSDNVPSEEVVKKMKNYWRQLLNAKLITQRKFDNLTKAERGGLSELDKAGFIKRQLVETRQITKHVAQILDSRMNTKYDENDKLIREVKVITLKSKLVSDFRKDFQFYKVREINNYHHAHDAYLNAVVGTALIKKYPKLESEFVYGDYKVYDVRKMIAKSEQEIGKATAKYFFYSNIMNFFKTEITLANGEIRKRPLIETNGETGEIVWDKGRDFATVRKVLSMPQVNIVKKTEVQTGGFSKESILPKRNSDKLIARKKDWDPKKYGGFDSPTVAYSVLVVAKVEKGKSKKLKSVKELLGITIMERSSFEKNPIDFLEAKGYKEVKKDLIIKLPKYSLFELENGRKRMLASAGELQKGNELALPSKYVNFLYLASHYEKLKGSPEDNEQKQLFVEQHKHYLDEIIEQISEFSKRVILADANLDKVLSAYNKHRDKPIREQAENIIHLFTLTNLGAPAAFKYFDTTIDRKRYTSTKEVLDATLIHQSITGLYETRIDLSQLGGDGGPAPAPGGTLGIEDEYRLHETSTEPDVSLGSTWLSDFPQAWAETGGMGLAVRQAPLIIPLKATSTPVSIQQYPMSHEARLGIKPHIQRLLDQGILVPCQSPWNTPLLPVKKPGTNDYRPVQDLREVNKRVEDIHPTVPNPYNLLSGLPPSHQWYTVLDLKDAFFCLRLHPTSQPLFAFEWRDPGMGISGQLTWTRLPQGFKNSPTLFNEALHRDLADFRIQHPDLILLQYVDDILLAATSELDCQQGTRALLQTLGDLGYRASAKKAQICQKQVKYLGYLLREGQRWLTEARKETVMGQPVPKTPRQLREFLGTAGFCRLWIPGFAEMAAPLYPLTKPGTLFSWGPDQQKAYQEIKQALLTAPALGLPDLTKPFELFVDEKQGYAKGVLTQKLGPWRRPVAYLSKKLDPVAAGWPPCLRMVAAIAVLTKDAGKLTMGQPLVILAPHAVEALVKQPPDRWLSNARMTHYQAMLLDTDRVQFGPVVALNPATLLPLPEEGAPHDCLEILAETHGTRPDLTDQPIPDADHTWYTDGSSFLQEGQRKAGAAVTTETEVIWAGALPAGTSAQRAELIALTQALKMAEGKRLNVYTDSRYAFATAHIHGEIYRRRGWLTSEGREIKNKSEILALLKALFLPKRLSIIHCLGHQKGDSAEARGNRLADQAAREAAIKTPPDTSTLLAGKRTADGSEFEKRTADGSEFESPKKKAKVE

SEQ ID NO: 2078 - protein, 2091 aa, synthetic construct
MPAAKRVKLDGGDKKYSIGLDIGTNSVGWAVITDEYKVPSKKFKVLGNTDRHSIKKNLIGALLFDSGETAEATRLKRTARRRYTRRKNRICYLQEIFSNEMAKVDDSFFHRLEESFLVEEDKKHERHPIFGNIVDEVAYHEKYPTIYHLRKKLVDSTDKADLRLIYLALAHMIKFRGHFLIEGDLNPDNSDVDKLFIQLVQTYNQLFEENPINASGVDAKAILSARLSKSRRLENLIAQLPGEKKNGLFGNLIALSLGLTPNFKSNFDLAEDAKLQLSKDTYDDDLDNLLAQIGDQYADLFLAAKNLSDAILLSDILRVNTEITKAPLSASMIKRYDEHHQDLTLLKALVRQQLPEKYKEIFFDQSKNGYAGYIDGGASQEEFYKFIKPILEKMDGTEELLVKLNREDLLRKQRTFDNGSIPHQIHLGELHAILRRQEDFYPFLKDNREKIEKILTFRIPYYVGPLARGNSRFAWMTRKSEETITPWNFEEVVDKGASAQSFIERMTNFDKNLPNEKVLPKHSLLYEYFTVYNELTKVKYVTEGMRKPAFLSGEQKKAIVDLLFKTNRKVTVKQLKEDYFKKIECFDSVEISGVEDRFNASLGTYHDLLKIIKDKDFLDNEENEDILEDIVLTLTLFEDREMIEERLKTYAHLFDDKVMKQLKRRRYTGWGRLSRKLINGIRDKQSGKTILDFLKSDGFANRNFMQLIHDDSLTFKEDIQKAQVSGQGDSLHEHIANLAGSPAIKKGILQTVKVVDELVKVMGRHKPENIVIEMARENQTTQKGQKNSRERMKRIEEGIKELGSQILKEHPVENTQLQNEKLYLYYLQNGRDMYVDQELDINRLSDYDVDHIVPQSFLKDDSIDNKVLTRSDKARGKSDNVPSEEVVKKMKNYWRQLLNAKLITQRKFDNLTKAERGGLSELDKAGFIKRQLVETRQITKHVAQILDSRMNTKYDENDKLIREVKVITLKSKLVSDFRKDFQFYKVREINNYHHAHDAYLNAVVGTALIKKYPKLESEFVYGDYKVYDVRKMIAKSEQEIGKATAKYFFYSNIMNFFKTEITLANGEIRKRPLIETNGETGEIVWDKGRDFATVRKVLSMPQVNIVKKTEVQTGGFSKESILPKRNSDKLIARKKDWDPKKYGGFDSPTVAYSVLVVAKVEKGKSKKLKSVKELLGITIMERSSFEKNPIDFLEAKGYKEVKKDLIIKLPKYSLFELENGRKRMLASAGELQKGNELALPSKYVNFLYLASHYEKLKGSPEDNEQKQLFVEQHKHYLDEIIEQISEFSKRVILADANLDKVLSAYNKHRDKPIREQAENIIHLFTLTNLGAPAAFKYFDTTIDRKRYTSTKEVLDATLIHQSITGLYETRIDLSQLGGDGGPAPGGSGGTLGIEDEYRLHETSTEPDVSLGSTWLSDFPQAWAETGGMGLAVRQAPLIIPLKATSTPVSIQQYPMSHEARLGIKPHIQRLLDQGILVPCQSPWNTPLLPVKKPGTNDYRPVQDLREVNKRVEDIHPTVPNPYNLLSGLPPSHQWYTVLDLKDAFFCLRLHPTSQPLFAFEWRDPGMGISGQLTWTRLPQGFKNSPTLFNEALHRDLADFRIQHPDLILLQYVDDILLAATSELDCQQGTRALLQTLGDLGYRASAKKAQICQKQVKYLGYLLREGQRWLTEARKETVMGQPVPKTPRQLREFLGTAGFCRLWIPGFAEMAAPLYPLTKPGTLFSWGPDQQKAYQEIKQALLTAPALGLPDLTKPFELFVDEKQGYAKGVLTQKLGPWRRPVAYLSKKLDPVAAGWPPCLRMVAAIAVLTKDAGKLTMGQPLVILAPHAVEALVKQPPDRWLSNARMTHYQAMLLDTDRVQFGPVVALNPATLLPLPEEGAPHDCLEILAETHGTRPDLTDQPIPDADHTWYTDGSSFLQEGQRKAGAAVTTETEVIWAGALPAGTSAQRAELIALTQALKMAEGKRLNVYTDSRYAFATAHIHGEIYRRRGWLTSEGREIKNKSEILALLKALFLPKRLSIIHCLGHQKGDSAEARGNRLADQAAREAAIKTPPDTSTLLAGKRTADGSEFEKRTADGSEFESPKKKAKVE

SEQ ID NO: 2079 - protein, 2094 aa, synthetic construct
MPAAKRVKLDGGDKKYSIGLDIGTNSVGWAVITDEYKVPSKKFKVLGNTDRHSIKKNLIGALLFDSGETAEATRLKRTARRRYTRRKNRICYLQEIFSNEMAKVDDSFFHRLEESFLVEEDKKHERHPIFGNIVDEVAYHEKYPTIYHLRKKLVDSTDKADLRLIYLALAHMIKFRGHFLIEGDLNPDNSDVDKLFIQLVQTYNQLFEENPINASGVDAKAILSARLSKSRRLENLIAQLPGEKKNGLFGNLIALSLGLTPNFKSNFDLAEDAKLQLSKDTYDDDLDNLLAQIGDQYADLFLAAKNLSDAILLSDILRVNTEITKAPLSASMIKRYDEHHQDLTLLKALVRQQLPEKYKEIFFDQSKNGYAGYIDGGASQEEFYKFIKPILEKMDGTEELLVKLNREDLLRKQRTFDNGSIPHQIHLGELHAILRRQEDFYPFLKDNREKIEKILTFRIPYYVGPLARGNSRFAWMTRKSEETITPWNFEEVVDKGASAQSFIERMTNFDKNLPNEKVLPKHSLLYEYFTVYNELTKVKYVTEGMRKPAFLSGEQKKAIVDLLFKTNRKVTVKQLKEDYFKKIECFDSVEISGVEDRFNASLGTYHDLLKIIKDKDFLDNEENEDILEDIVLTLTLFEDREMIEERLKTYAHLFDDKVMKQLKRRRYTGWGRLSRKLINGIRDKQSGKTILDFLKSDGFANRNFMQLIHDDSLTFKEDIQKAQVSGQGDSLHEHIANLAGSPAIKKGILQTVKVVDELVKVMGRHKPENIVIEMARENQTTQKGQKNSRERMKRIEEGIKELGSQILKEHPVENTQLQNEKLYLYYLQNGRDMYVDQELDINRLSDYDVDHIVPQSFLKDDSIDNKVLTRSDKARGKSDNVPSEEVVKKMKNYWRQLLNAKLITQRKFDNLTKAERGGLSELDKAGFIKRQLVETRQITKHVAQILDSRMNTKYDENDKLIREVKVITLKSKLVSDFRKDFQFYKVREINNYHHAHDAYLNAVVGTALIKKYPKLESEFVYGDYKVYDVRKMIAKSEQEIGKATAKYFFYSNIMNFFKTEITLANGEIRKRPLIETNGETGEIVWDKGRDFATVRKVLSMPQVNIVKKTEVQTGGFSKESILPKRNSDKLIARKKDWDPKKYGGFDSPTVAYSVLVVAKVEKGKSKKLKSVKELLGITIMERSSFEKNPIDFLEAKGYKEVKKDLIIKLPKYSLFELENGRKRMLASAGELQKGNELALPSKYVNFLYLASHYEKLKGSPEDNEQKQLFVEQHKHYLDEIIEQISEFSKRVILADANLDKVLSAYNKHRDKPIREQAENIIHLFTLTNLGAPAAFKYFDTTIDRKRYTSTKEVLDATLIHQSITGLYETRIDLSQLGGDGGPAPGSSGGGGGTLGIEDEYRLHETSTEPDVSLGSTWLSDFPQAWAETGGMGLAVRQAPLIIPLKATSTPVSIQQYPMSHEARLGIKPHIQRLLDQGILVPCQSPWNTPLLPVKKPGTNDYRPVQDLREVNKRVEDIHPTVPNPYNLLSGLPPSHQWYTVLDLKDAFFCLRLHPTSQPLFAFEWRDPGMGISGQLTWTRLPQGFKNSPTLFNEALHRDLADFRIQHPDLILLQYVDDILLAATSELDCQQGTRALLQTLGDLGYRASAKKAQICQKQVKYLGYLLREGQRWLTEARKETVMGQPVPKTPRQLREFLGTAGFCRLWIPGFAEMAAPLYPLTKPGTLFSWGPDQQKAYQEIKQALLTAPALGLPDLTKPFELFVDEKQGYAKGVLTQKLGPWRRPVAYLSKKLDPVAAGWPPCLRMVAAIAVLTKDAGKLTMGQPLVILAPHAVEALVKQPPDRWLSNARMTHYQAMLLDTDRVQFGPVVALNPATLLPLPEEGAPHDCLEILAETHGTRPDLTDQPIPDADHTWYTDGSSFLQEGQRKAGAAVTTETEVIWAGALPAGTSAQRAELIALTQALKMAEGKRLNVYTDSRYAFATAHIHGEIYRRRGWLTSEGREIKNKSEILALLKALFLPKRLSIIHCLGHQKGDSAEARGNRLADQAAREAAIKTPPDTSTLLAGKRTADGSEFEKRTADGSEFESPKKKAKVE

SEQ ID NO: 2080 - protein, 2094 aa, synthetic construct
MPAAKRVKLDGGDKKYSIGLDIGTNSVGWAVITDEYKVPSKKFKVLGNTDRHSIKKNLIGALLFDSGETAEATRLKRTARRRYTRRKNRICYLQEIFSNEMAKVDDSFFHRLEESFLVEEDKKHERHPIFGNIVDEVAYHEKYPTIYHLRKKLVDSTDKADLRLIYLALAHMIKFRGHFLIEGDLNPDNSDVDKLFIQLVQTYNQLFEENPINASGVDAKAILSARLSKSRRLENLIAQLPGEKKNGLFGNLIALSLGLTPNFKSNFDLAEDAKLQLSKDTYDDDLDNLLAQIGDQYADLFLAAKNLSDAILLSDILRVNTEITKAPLSASMIKRYDEHHQDLTLLKALVRQQLPEKYKEIFFDQSKNGYAGYIDGGASQEEFYKFIKPILEKMDGTEELLVKLNREDLLRKQRTFDNGSIPHQIHLGELHAILRRQEDFYPFLKDNREKIEKILTFRIPYYVGPLARGNSRFAWMTRKSEETITPWNFEEVVDKGASAQSFIERMTNFDKNLPNEKVLPKHSLLYEYFTVYNELTKVKYVTEGMRKPAFLSGEQKKAIVDLLFKTNRKVTVKQLKEDYFKKIECFDSVEISGVEDRFNASLGTYHDLLKIIKDKDFLDNEENEDILEDIVLTLTLFEDREMIEERLKTYAHLFDDKVMKQLKRRRYTGWGRLSRKLINGIRDKQSGKTILDFLKSDGFANRNFMQLIHDDSLTFKEDIQKAQVSGQGDSLHEHIANLAGSPAIKKGILQTVKVVDELVKVMGRHKPENIVIEMARENQTTQKGQKNSRERMKRIEEGIKELGSQILKEHPVENTQLQNEKLYLYYLQNGRDMYVDQELDINRLSDYDVDHIVPQSFLKDDSIDNKVLTRSDKARGKSDNVPSEEVVKKMKNYWRQLLNAKLITQRKFDNLTKAERGGLSELDKAGFIKRQLVETRQITKHVAQILDSRMNTKYDENDKLIREVKVITLKSKLVSDFRKDFQFYKVREINNYHHAHDAYLNAVVGTALIKKYPKLESEFVYGDYKVYDVRKMIAKSEQEIGKATAKYFFYSNIMNFFKTEITLANGEIRKRPLIETNGETGEIVWDKGRDFATVRKVLSMPQVNIVKKTEVQTGGFSKESILPKRNSDKLIARKKDWDPKKYGGFDSPTVAYSVLVVAKVEKGKSKKLKSVKELLGITIMERSSFEKNPIDFLEAKGYKEVKKDLIIKLPKYSLFELENGRKRMLASAGELQKGNELALPSKYVNFLYLASHYEKLKGSPEDNEQKQLFVEQHKHYLDEIIEQISEFSKRVILADANLDKVLSAYNKHRDKPIREQAENIIHLFTLTNLGAPAAFKYFDTTIDRKRYTSTKEVLDATLIHQSITGLYETRIDLSQLGGDGGGSSPAPGGSGGTLGIEDEYRLHETSTEPDVSLGSTWLSDFPQAWAETGGMGLAVRQAPLIIPLKATSTPVSIQQYPMSHEARLGIKPHIQRLLDQGILVPCQSPWNTPLLPVKKPGTNDYRPVQDLREVNKRVEDIHPTVPNPYNLLSGLPPSHQWYTVLDLKDAFFCLRLHPTSQPLFAFEWRDPGMGISGQLTWTRLPQGFKNSPTLFNEALHRDLADFRIQHPDLILLQYVDDILLAATSELDCQQGTRALLQTLGDLGYRASAKKAQICQKQVKYLGYLLREGQRWLTEARKETVMGQPVPKTPRQLREFLGTAGFCRLWIPGFAEMAAPLYPLTKPGTLFSWGPDQQKAYQEIKQALLTAPALGLPDLTKPFELFVDEKQGYAKGVLTQKLGPWRRPVAYLSKKLDPVAAGWPPCLRMVAAIAVLTKDAGKLTMGQPLVILAPHAVEALVKQPPDRWLSNARMTHYQAMLLDTDRVQFGPVVALNPATLLPLPEEGAPHDCLEILAETHGTRPDLTDQPIPDADHTWYTDGSSFLQEGQRKAGAAVTTETEVIWAGALPAGTSAQRAELIALTQALKMAEGKRLNVYTDSRYAFATAHIHGEIYRRRGWLTSEGREIKNKSEILALLKALFLPKRLSIIHCLGHQKGDSAEARGNRLADQAAREAAIKTPPDTSTLLAGKRTADGSEFEKRTADGSEFESPKKKAKVE

SEQ ID NO: 2081 - protein, 2093 aa, synthetic construct
MPAAKRVKLDGGDKKYSIGLDIGTNSVGWAVITDEYKVPSKKFKVLGNTDRHSIKKNLIGALLFDSGETAEATRLKRTARRRYTRRKNRICYLQEIFSNEMAKVDDSFFHRLEESFLVEEDKKHERHPIFGNIVDEVAYHEKYPTIYHLRKKLVDSTDKADLRLIYLALAHMIKFRGHFLIEGDLNPDNSDVDKLFIQLVQTYNQLFEENPINASGVDAKAILSARLSKSRRLENLIAQLPGEKKNGLFGNLIALSLGLTPNFKSNFDLAEDAKLQLSKDTYDDDLDNLLAQIGDQYADLFLAAKNLSDAILLSDILRVNTEITKAPLSASMIKRYDEHHQDLTLLKALVRQQLPEKYKEIFFDQSKNGYAGYIDGGASQEEFYKFIKPILEKMDGTEELLVKLNREDLLRKQRTFDNGSIPHQIHLGELHAILRRQEDFYPFLKDNREKIEKILTFRIPYYVGPLARGNSRFAWMTRKSEETITPWNFEEVVDKGASAQSFIERMTNFDKNLPNEKVLPKHSLLYEYFTVYNELTKVKYVTEGMRKPAFLSGEQKKAIVDLLFKTNRKVTVKQLKEDYFKKIECFDSVEISGVEDRFNASLGTYHDLLKIIKDKDFLDNEENEDILEDIVLTLTLFEDREMIEERLKTYAHLFDDKVMKQLKRRRYTGWGRLSRKLINGIRDKQSGKTILDFLKSDGFANRNFMQLIHDDSLTFKEDIQKAQVSGQGDSLHEHIANLAGSPAIKKGILQTVKVVDELVKVMGRHKPENIVIEMARENQTTQKGQKNSRERMKRIEEGIKELGSQILKEHPVENTQLQNEKLYLYYLQNGRDMYVDQELDINRLSDYDVDHIVPQSFLKDDSIDNKVLTRSDKARGKSDNVPSEEVVKKMKNYWRQLLNAKLITQRKFDNLTKAERGGLSELDKAGFIKRQLVETRQITKHVAQILDSRMNTKYDENDKLIREVKVITLKSKLVSDFRKDFQFYKVREINNYHHAHDAYLNAVVGTALIKKYPKLESEFVYGDYKVYDVRKMIAKSEQEIGKATAKYFFYSNIMNFFKTEITLANGEIRKRPLIETNGETGEIVWDKGRDFATVRKVLSMPQVNIVKKTEVQTGGFSKESILPKRNSDKLIARKKDWDPKKYGGFDSPTVAYSVLVVAKVEKGKSKKLKSVKELLGITIMERSSFEKNPIDFLEAKGYKEVKKDLIIKLPKYSLFELENGRKRMLASAGELQKGNELALPSKYVNFLYLASHYEKLKGSPEDNEQKQLFVEQHKHYLDEIIEQISEFSKRVILADANLDKVLSAYNKHRDKPIREQAENIIHLFTLTNLGAPAAFKYFDTTIDRKRYTSTKEVLDATLIHQSITGLYETRIDLSQLGGDGGEAAAKGGGGGTLGIEDEYRLHETSTEPDVSLGSTWLSDFPQAWAETGGMGLAVRQAPLIIPLKATSTPVSIQQYPMSHEARLGIKPHIQRLLDQGILVPCQSPWNTPLLPVKKPGTNDYRPVQDLREVNKRVEDIHPTVPNPYNLLSGLPPSHQWYTVLDLKDAFFCLRLHPTSQPLFAFEWRDPGMGISGQLTWTRLPQGFKNSPTLFNEALHRDLADFRIQHPDLILLQYVDDILLAATSELDCQQGTRALLQTLGDLGYRASAKKAQICQKQVKYLGYLLREGQRWLTEARKETVMGQPVPKTPRQLREFLGTAGFCRLWIPGFAEMAAPLYPLTKPGTLFSWGPDQQKAYQEIKQALLTAPALGLPDLTKPFELFVDEKQGYAKGVLTQKLGPWRRPVAYLSKKLDPVAAGWPPCLRMVAAIAVLTKDAGKLTMGQPLVILAPHAVEALVKQPPDRWLSNARMTHYQAMLLDTDRVQFGPVVALNPATLLPLPEEGAPHDCLEILAETHGTRPDLTDQPIPDADHTWYTDGSSFLQEGQRKAGAAVTTETEVIWAGALPAGTSAQRAELIALTQALKMAEGKRLNVYTDSRYAFATAHIHGEIYRRRGWLTSEGREIKNKSEILALLKALFLPKRLSIIHCLGHQKGDSAEARGNRLADQAAREAAIKTPPDTSTLLAGKRTADGSEFEKRTADGSEFESPKKKAKVE

SEQ ID NO: 2082 - protein, 2096 aa, synthetic construct
MPAAKRVKLDGGDKKYSIGLDIGTNSVGWAVITDEYKVPSKKFKVLGNTDRHSIKKNLIGALLFDSGETAEATRLKRTARRRYTRRKNRICYLQEIFSNEMAKVDDSFFHRLEESFLVEEDKKHERHPIFGNIVDEVAYHEKYPTIYHLRKKLVDSTDKADLRLIYLALAHMIKFRGHFLIEGDLNPDNSDVDKLFIQLVQTYNQLFEENPINASGVDAKAILSARLSKSRRLENLIAQLPGEKKNGLFGNLIALSLGLTPNFKSNFDLAEDAKLQLSKDTYDDDLDNLLAQIGDQYADLFLAAKNLSDAILLSDILRVNTEITKAPLSASMIKRYDEHHQDLTLLKALVRQQLPEKYKEIFFDQSKNGYAGYIDGGASQEEFYKFIKPILEKMDGTEELLVKLNREDLLRKQRTFDNGSIPHQIHLGELHAILRRQEDFYPFLKDNREKIEKILTFRIPYYVGPLARGNSRFAWMTRKSEETITPWNFEEVVDKGASAQSFIERMTNFDKNLPNEKVLPKHSLLYEYFTVYNELTKVKYVTEGMRKPAFLSGEQKKAIVDLLFKTNRKVTVKQLKEDYFKKIECFDSVEISGVEDRFNASLGTYHDLLKIIKDKDFLDNEENEDILEDIVLTLTLFEDREMIEERLKTYAHLFDDKVMKQLKRRRYTGWGRLSRKLINGIRDKQSGKTILDFLKSDGFANRNFMQLIHDDSLTFKEDIQKAQVSGQGDSLHEHIANLAGSPAIKKGILQTVKVVDELVKVMGRHKPENIVIEMARENQTTQKGQKNSRERMKRIEEGIKELGSQILKEHPVENTQLQNEKLYLYYLQNGRDMYVDQELDINRLSDYDVDHIVPQSFLKDDSIDNKVLTRSDKARGKSDNVPSEEVVKKMKNYWRQLLNAKLITQRKFDNLTKAERGGLSELDKAGFIKRQLVETRQITKHVAQILDSRMNTKYDENDKLIREVKVITLKSKLVSDFRKDFQFYKVREINNYHHAHDAYLNAVVGTALIKKYPKLESEFVYGDYKVYDVRKMIAKSEQEIGKATAKYFFYSNIMNFFKTEITLANGEIRKRPLIETNGETGEIVWDKGRDFATVRKVLSMPQVNIVKKTEVQTGGFSKESILPKRNSDKLIARKKDWDPKKYGGFDSPTVAYSVLVVAKVEKGKSKKLKSVKELLGITIMERSSFEKNPIDFLEAKGYKEVKKDLIIKLPKYSLFELENGRKRMLASAGELQKGNELALPSKYVNFLYLASHYEKLKGSPEDNEQKQLFVEQHKHYLDEIIEQISEFSKRVILADANLDKVLSAYNKHRDKPIREQAENIIHLFTLTNLGAPAAFKYFDTTIDRKRYTSTKEVLDATLIHQSITGLYETRIDLSQLGGDGGGGGGGSEAAAKGGTLGIEDEYRLHETSTEPDVSLGSTWLSDFPQAWAETGGMGLAVRQAPLIIPLKATSTPVSIQQYPMSHEARLGIKPHIQRLLDQGILVPCQSPWNTPLLPVKKPGTNDYRPVQDLREVNKRVEDIHPTVPNPYNLLSGLPPSHQWYTVLDLKDAFFCLRLHPTSQPLFAFEWRDPGMGISGQLTWTRLPQGFKNSPTLFNEALHRDLADFRIQHPDLILLQYVDDILLAATSELDCQQGTRALLQTLGDLGYRASAKKAQICQKQVKYLGYLLREGQRWLTEARKETVMGQPVPKTPRQLREFLGTAGFCRLWIPGFAEMAAPLYPLTKPGTLFSWGPDQQKAYQEIKQALLTAPALGLPDLTKPFELFVDEKQGYAKGVLTQKLGPWRRPVAYLSKKLDPVAAGWPPCLRMVAAIAVLTKDAGKLTMGQPLVILAPHAVEALVKQPPDRWLSNARMTHYQAMLLDTDRVQFGPVVALNPATLLPLPEEGAPHDCLEILAETHGTRPDLTDQPIPDADHTWYTDGSSFLQEGQRKAGAAVTTETEVIWAGALPAGTSAQRAELIALTQALKMAEGKRLNVYTDSRYAFATAHIHGEIYRRRGWLTSEGREIKNKSEILALLKALFLPKRLSIIHCLGHQKGDSAEARGNRLADQAAREAAIKTPPDTSTLLAGKRTADGSEFEKRTADGSEFESPKKKAKVE

SEQ ID NO: 2083 - protein, 2091 aa, synthetic construct
MPAAKRVKLDGGDKKYSIGLDIGTNSVGWAVITDEYKVPSKKFKVLGNTDRHSIKKNLIGALLFDSGETAEATRLKRTARRRYTRRKNRICYLQEIFSNEMAKVDDSFFHRLEESFLVEEDKKHERHPIFGNIVDEVAYHEKYPTIYHLRKKLVDSTDKADLRLIYLALAHMIKFRGHFLIEGDLNPDNSDVDKLFIQLVQTYNQLFEENPINASGVDAKAILSARLSKSRRLENLIAQLPGEKKNGLFGNLIALSLGLTPNFKSNFDLAEDAKLQLSKDTYDDDLDNLLAQIGDQYADLFLAAKNLSDAILLSDILRVNTEITKAPLSASMIKRYDEHHQDLTLLKALVRQQLPEKYKEIFFDQSKNGYAGYIDGGASQEEFYKFIKPILEKMDGTEELLVKLNREDLLRKQRTFDNGSIPHQIHLGELHAILRRQEDFYPFLKDNREKIEKILTFRIPYYVGPLARGNSRFAWMTRKSEETITPWNFEEVVDKGASAQSFIERMTNFDKNLPNEKVLPKHSLLYEYFTVYNELTKVKYVTEGMRKPAFLSGEQKKAIVDLLFKTNRKVTVKQLKEDYFKKIECFDSVEISGVEDRFNASLGTYHDLLKIIKDKDFLDNEENEDILEDIVLTLTLFEDREMIEERLKTYAHLFDDKVMKQLKRRRYTGWGRLSRKLINGIRDKQSGKTILDFLKSDGFANRNFMQLIHDDSLTFKEDIQKAQVSGQGDSLHEHIANLAGSPAIKKGILQTVKVVDELVKVMGRHKPENIVIEMARENQTTQKGQKNSRERMKRIEEGIKELGSQILKEHPVENTQLQNEKLYLYYLQNGRDMYVDQELDINRLSDYDVDHIVPQSFLKDDSIDNKVLTRSDKARGKSDNVPSEEVVKKMKNYWRQLLNAKLITQRKFDNLTKAERGGLSELDKAGFIKRQLVETRQITKHVAQILDSRMNTKYDENDKLIREVKVITLKSKLVSDFRKDFQFYKVREINNYHHAHDAYLNAVVGTALIKKYPKLESEFVYGDYKVYDVRKMIAKSEQEIGKATAKYFFYSNIMNFFKTEITLANGEIRKRPLIETNGETGEIVWDKGRDFATVRKVLSMPQVNIVKKTEVQTGGFSKESILPKRNSDKLIARKKDWDPKKYGGFDSPTVAYSVLVVAKVEKGKSKKLKSVKELLGITIMERSSFEKNPIDFLEAKGYKEVKKDLIIKLPKYSLFELENGRKRMLASAGELQKGNELALPSKYVNFLYLASHYEKLKGSPEDNEQKQLFVEQHKHYLDEIIEQISEFSKRVILADANLDKVLSAYNKHRDKPIREQAENIIHLFTLTNLGAPAAFKYFDTTIDRKRYTSTKEVLDATLIHQSITGLYETRIDLSQLGGDGGGGSPAPGGTLGIEDEYRLHETSTEPDVSLGSTWLSDFPQAWAETGGMGLAVRQAPLIIPLKATSTPVSIQQYPMSHEARLGIKPHIQRLLDQGILVPCQSPWNTPLLPVKKPGTNDYRPVQDLREVNKRVEDIHPTVPNPYNLLSGLPPSHQWYTVLDLKDAFFCLRLHPTSQPLFAFEWRDPGMGISGQLTWTRLPQGFKNSPTLFNEALHRDLADFRIQHPDLILLQYVDDILLAATSELDCQQGTRALLQTLGDLGYRASAKKAQICQKQVKYLGYLLREGQRWLTEARKETVMGQPVPKTPRQLREFLGTAGFCRLWIPGFAEMAAPLYPLTKPGTLFSWGPDQQKAYQEIKQALLTAPALGLPDLTKPFELFVDEKQGYAKGVLTQKLGPWRRPVAYLSKKLDPVAAGWPPCLRMVAAIAVLTKDAGKLTMGQPLVILAPHAVEALVKQPPDRWLSNARMTHYQAMLLDTDRVQFGPVVALNPATLLPLPEEGAPHDCLEILAETHGTRPDLTDQPIPDADHTWYTDGSSFLQEGQRKAGAAVTTETEVIWAGALPAGTSAQRAELIALTQALKMAEGKRLNVYTDSRYAFATAHIHGEIYRRRGWLTSEGREIKNKSEILALLKALFLPKRLSIIHCLGHQKGDSAEARGNRLADQAAREAAIKTPPDTSTLLAGKRTADGSEFEKRTADGSEFESPKKKAKVE

SEQ ID NO: 2084 - protein, 2110 aa, synthetic construct
MPAAKRVKLDGGDKKYSIGLDIGTNSVGWAVITDEYKVPSKKFKVLGNTDRHSIKKNLIGALLFDSGETAEATRLKRTARRRYTRRKNRICYLQEIFSNEMAKVDDSFFHRLEESFLVEEDKKHERHPIFGNIVDEVAYHEKYPTIYHLRKKLVDSTDKADLRLIYLALAHMIKFRGHFLIEGDLNPDNSDVDKLFIQLVQTYNQLFEENPINASGVDAKAILSARLSKSRRLENLIAQLPGEKKNGLFGNLIALSLGLTPNFKSNFDLAEDAKLQLSKDTYDDDLDNLLAQIGDQYADLFLAAKNLSDAILLSDILRVNTEITKAPLSASMIKRYDEHHQDLTLLKALVRQQLPEKYKEIFFDQSKNGYAGYIDGGASQEEFYKFIKPILEKMDGTEELLVKLNREDLLRKQRTFDNGSIPHQIHLGELHAILRRQEDFYPFLKDNREKIEKILTFRIPYYVGPLARGNSRFAWMTRKSEETITPWNFEEVVDKGASAQSFIERMTNFDKNLPNEKVLPKHSLLYEYFTVYNELTKVKYVTEGMRKPAFLSGEQKKAIVDLLFKTNRKVTVKQLKEDYFKKIECFDSVEISGVEDRFNASLGTYHDLLKIIKDKDFLDNEENEDILEDIVLTLTLFEDREMIEERLKTYAHLFDDKVMKQLKRRRYTGWGRLSRKLINGIRDKQSGKTILDFLKSDGFANRNFMQLIHDDSLTFKEDIQKAQVSGQGDSLHEHIANLAGSPAIKKGILQTVKVVDELVKVMGRHKPENIVIEMARENQTTQKGQKNSRERMKRIEEGIKELGSQILKEHPVENTQLQNEKLYLYYLQNGRDMYVDQELDINRLSDYDVDHIVPQSFLKDDSIDNKVLTRSDKARGKSDNVPSEEVVKKMKNYWRQLLNAKLITQRKFDNLTKAERGGLSELDKAGFIKRQLVETRQITKHVAQILDSRMNTKYDENDKLIREVKVITLKSKLVSDFRKDFQFYKVREINNYHHAHDAYLNAVVGTALIKKYPKLESEFVYGDYKVYDVRKMIAKSEQEIGKATAKYFFYSNIMNFFKTEITLANGEIRKRPLIETNGETGEIVWDKGRDFATVRKVLSMPQVNIVKKTEVQTGGFSKESILPKRNSDKLIARKKDWDPKKYGGFDSPTVAYSVLVVAKVEKGKSKKLKSVKELLGITIMERSSFEKNPIDFLEAKGYKEVKKDLIIKLPKYSLFELENGRKRMLASAGELQKGNELALPSKYVNFLYLASHYEKLKGSPEDNEQKQLFVEQHKHYLDEIIEQISEFSKRVILADANLDKVLSAYNKHRDKPIREQAENIIHLFTLTNLGAPAAFKYFDTTIDRKRYTSTKEVLDATLIHQSITGLYETRIDLSQLGGDGGGGGGSGGGGSGGGGSGGGGSGGGGSGGLGIEDEYRLHETSTEPDVSLGSTWLSDFPQAWAETGGMGLAVRQAPLIIPLKATSTPVSIQQYPMSHEARLGIKPHIQRLLDQGILVPCQSPWNTPLLPVKKPGTNDYRPVQDLREVNKRVEDIHPTVPNPYNLLSGLPPSHQWYTVLDLKDAFFCLRLHPTSQPLFAFEWRDPGMGISGQLTWTRLPQGFKNSPTLFNEALHRDLADFRIQHPDLILLQYVDDILLAATSELDCQQGTRALLQTLGDLGYRASAKKAQICQKQVKYLGYLLREGQRWLTEARKETVMGQPVPKTPRQLREFLGKAGFCRLFIPGFAEMAAPLYPLTKPGTLFSWGPDQQKAYQEIKQALLTAPALGLPDLTKPFELFVDEKQGYAKGVLTQKLGPWRRPVAYLSKKLDPVAAGWPPCLRMVAAIAVLTKDAGKLTMGQPLVILAPHAVEALVKQPPDRWLSNARMTHYQAMLLDTDRVQFGPVVALNPATLLPLPEEGAPHDCLEILAETHGTRPDLTDQPIPDADHTWYTDGSSFLQEGQRKAGAAVTTETEVIWAGALPAGTSAQRAELIALTQALKMAEGKRLNVYTDSRYAFATAHIHGEIYRRRGWLTSEGREIKNKSEILALLKALFLPKRLSIIHCLGHQKGDSAEARGNRLADQAAREAAIKTPPDTSTLLIAGKRTADGSEFEKRTADGSEFESPKKKAKVE

SEQ ID NO: 2085 - protein, 2105 aa, synthetic construct
MPAAKRVKLDGGDKKYSIGLDIGTNSVGWAVITDEYKVPSKKFKVLGNTDRHSIKKNLIGALLFDSGETAEATRLKRTARRRYTRRKNRICYLQEIFSNEMAKVDDSFFHRLEESFLVEEDKKHERHPIFGNIVDEVAYHEKYPTIYHLRKKLVDSTDKADLRLIYLALAHMIKFRGHFLIEGDLNPDNSDVDKLFIQLVQTYNQLFEENPINASGVDAKAILSARLSKSRRLENLIAQLPGEKKNGLFGNLIALSLGLTPNFKSNFDLAEDAKLQLSKDTYDDDLDNLLAQIGDQYADLFLAAKNLSDAILLSDILRVNTEITKAPLSASMIKRYDEHHQDLTLLKALVRQQLPEKYKEIFFDQSKNGYAGYIDGGASQEEFYKFIKPILEKMDGTEELLVKLNREDLLRKQRTFDNGSIPHQIHLGELHAILRRQEDFYPFLKDNREKIEKILTFRIPYYVGPLARGNSRFAWMTRKSEETITPWNFEEVVDKGASAQSFIERMTNFDKNLPNEKVLPKHSLLYEYFTVYNELTKVKYVTEGMRKPAFLSGEQKKAIVDLLFKTNRKVTVKQLKEDYFKKIECFDSVEISGVEDRFNASLGTYHDLLKIIKDKDFLDNEENEDILEDIVLTLTLFEDREMIEERLKTYAHLFDDKVMKQLKRRRYTGWGRLSRKLINGIRDKQSGKTILDFLKSDGFANRNFMQLIHDDSLTFKEDIQKAQVSGQGDSLHEHIANLAGSPAIKKGILQTVKVVDELVKVMGRHKPENIVIEMARENQTTQKGQKNSRERMKRIEEGIKELGSQILKEHPVENTQLQNEKLYLYYLQNGRDMYVDQELDINRLSDYDVDHIVPQSFLKDDSIDNKVLTRSDKARGKSDNVPSEEVVKKMKNYWRQLLNAKLITQRKFDNLTKAERGGLSELDKAGFIKRQLVETRQITKHVAQILDSRMNTKYDENDKLIREVKVITLKSKLVSDFRKDFQFYKVREINNYHHAHDAYLNAVVGTALIKKYPKLESEFVYGDYKVYDVRKMIAKSEQEIGKATAKYFFYSNIMNFFKTEITLANGEIRKRPLIETNGETGEIVWDKGRDFATVRKVLSMPQVNIVKKTEVQTGGFSKESILPKRNSDKLIARKKDWDPKKYGGFDSPTVAYSVLVVAKVEKGKSKKLKSVKELLGITIMERSSFEKNPIDFLEAKGYKEVKKDLIIKLPKYSLFELENGRKRMLASAGELQKGNELALPSKYVNFLYLASHYEKLKGSPEDNEQKQLFVEQHKHYLDEIIEQISEFSKRVILADANLDKVLSAYNKHRDKPIREQAENIIHLFTLTNLGAPAAFKYFDTTIDRKRYTSTKEVLDATLIHQSITGLYETRIDLSQLGGDGGGGGGSGGGGSGGGGSGGGGSGGLGIEDEYRLHETSTEPDVSLGSTWLSDFPQAWAETGGMGLAVRQAPLIIPLKATSTPVSIQQYPMSHEARLGIKPHIQRLLDQGILVPCQSPWNTPLLPVKKPGTNDYRPVQDLREVNKRVEDIHPTVPNPYNLLSGLPPSHQWYTVLDLKDAFFCLRLHPTSQPLFAFEWRDPGMGISGQLTWTRLPQGFKNSPTLFNEALHRDLADFRIQHPDLILLQYVDDILLAATSELDCQQGTRALLQTLGDLGYRASAKKAQICQKQVKYLGYLLREGQRWLTEARKETVMGQPVPKTPRQLREFLGKAGFCRLFIPGFAEMAAPLYPLTKPGTLFSWGPDQQKAYQEIKQALLTAPALGLPDLTKPFELFVDEKQGYAKGVLTQKLGPWRRPVAYLSKKLDPVAAGWPPCLRMVAAIAVLTKDAGKLTMGQPLVILAPHAVEALVKQPPDRWLSNARMTHYQAMLLDTDRVQFGPVVALNPATLLPLPEEGAPHDCLEILAETHGTRPDLTDQPIPDADHTWYTDGSSFLQEGQRKAGAAVTTETEVIWAGALPAGTSAQRAELIALTQALKMAEGKRLNVYTDSRYAFATAHIHGEIYRRRGWLTSEGREIKNKSEILALLKALFLPKRLSIIHCLGHQKGDSAEARGNRLADQAAREAAIKTPPDTSTLLIAGKRTADGSEFEKRTADGSEFESPKKKAKVE

SEQ ID NO: 2086 - protein, 2110 aa, synthetic construct
MPAAKRVKLDGGDKKYSIGLDIGTNSVGWAVITDEYKVPSKKFKVLGNTDRHSIKKNLIGALLFDSGETAEATRLKRTARRRYTRRKNRICYLQEIFSNEMAKVDDSFFHRLEESFLVEEDKKHERHPIFGNIVDEVAYHEKYPTIYHLRKKLVDSTDKADLRLIYLALAHMIKFRGHFLIEGDLNPDNSDVDKLFIQLVQTYNQLFEENPINASGVDAKAILSARLSKSRRLENLIAQLPGEKKNGLFGNLIALSLGLTPNFKSNFDLAEDAKLQLSKDTYDDDLDNLLAQIGDQYADLFLAAKNLSDAILLSDILRVNTEITKAPLSASMIKRYDEHHQDLTLLKALVRQQLPEKYKEIFFDQSKNGYAGYIDGGASQEEFYKFIKPILEKMDGTEELLVKLNREDLLRKQRTFDNGSIPHQIHLGELHAILRRQEDFYPFLKDNREKIEKILTFRIPYYVGPLARGNSRFAWMTRKSEETITPWNFEEVVDKGASAQSFIERMTNFDKNLPNEKVLPKHSLLYEYFTVYNELTKVKYVTEGMRKPAFLSGEQKKAIVDLLFKTNRKVTVKQLKEDYFKKIECFDSVEISGVEDRFNASLGTYHDLLKIIKDKDFLDNEENEDILEDIVLTLTLFEDREMIEERLKTYAHLFDDKVMKQLKRRRYTGWGRLSRKLINGIRDKQSGKTILDFLKSDGFANRNFMQLIHDDSLTFKEDIQKAQVSGQGDSLHEHIANLAGSPAIKKGILQTVKVVDELVKVMGRHKPENIVIEMARENQTTQKGQKNSRERMKRIEEGIKELGSQILKEHPVENTQLQNEKLYLYYLQNGRDMYVDQELDINRLSDYDVDHIVPQSFLKDDSIDNKVLTRSDKARGKSDNVPSEEVVKKMKNYWRQLLNAKLITQRKFDNLTKAERGGLSELDKAGFIKRQLVETRQITKHVAQILDSRMNTKYDENDKLIREVKVITLKSKLVSDFRKDFQFYKVREINNYHHAHDAYLNAVVGTALIKKYPKLESEFVYGDYKVYDVRKMIAKSEQEIGKATAKYFFYSNIMNFFKTEITLANGEIRKRPLIETNGETGEIVWDKGRDFATVRKVLSMPQVNIVKKTEVQTGGFSKESILPKRNSDKLIARKKDWDPKKYGGFDSPTVAYSVLVVAKVEKGKSKKLKSVKELLGITIMERSSFEKNPIDFLEAKGYKEVKKDLIIKLPKYSLFELENGRKRMLASAGELQKGNELALPSKYVNFLYLASHYEKLKGSPEDNEQKQLFVEQHKHYLDEIIEQISEFSKRVILADANLDKVLSAYNKHRDKPIREQAENIIHLFTLTNLGAPAAFKYFDTTIDRKRYTSTKEVLDATLIHQSITGLYETRIDLSQLGGDGGEAAAKEAAAKEAAAKEAAAKEAAAKGGLGIEDEYRLHETSTEPDVSLGSTWLSDFPQAWAETGGMGLAVRQAPLIIPLKATSTPVSIQQYPMSHEARLGIKPHIQRLLDQGILVPCQSPWNTPLLPVKKPGTNDYRPVQDLREVNKRVEDIHPTVPNPYNLLSGLPPSHQWYTVLDLKDAFFCLRLHPTSQPLFAFEWRDPGMGISGQLTWTRLPQGFKNSPTLFNEALHRDLADFRIQHPDLILLQYVDDILLAATSELDCQQGTRALLQTLGDLGYRASAKKAQICQKQVKYLGYLLREGQRWLTEARKETVMGQPVPKTPRQLREFLGKAGFCRLFIPGFAEMAAPLYPLTKPGTLFSWGPDQQKAYQEIKQALLTAPALGLPDLTKPFELFVDEKQGYAKGVLTQKLGPWRRPVAYLSKKLDPVAAGWPPCLRMVAAIAVLTKDAGKLTMGQPLVILAPHAVEALVKQPPDRWLSNARMTHYQAMLLDTDRVQFGPVVALNPATLLPLPEEGAPHDCLEILAETHGTRPDLTDQPIPDADHTWYTDGSSFLQEGQRKAGAAVTTETEVIWAGALPAGTSAQRAELIALTQALKMAEGKRLNVYTDSRYAFATAHIHGEIYRRRGWLTSEGREIKNKSEILALLKALFLPKRLSIIHCLGHQKGDSAEARGNRLADQAAREAAIKTPPDTSTLLIAGKRTADGSEFEKRTADGSEFESPKKKAKVE

SEQ ID NO: 2087 - protein, 2098 aa, synthetic construct
MPAAKRVKLDGGDKKYSIGLDIGTNSVGWAVITDEYKVPSKKFKVLGNTDRHSIKKNLIGALLFDSGETAEATRLKRTARRRYTRRKNRICYLQEIFSNEMAKVDDSFFHRLEESFLVEEDKKHERHPIFGNIVDEVAYHEKYPTIYHLRKKLVDSTDKADLRLIYLALAHMIKFRGHFLIEGDLNPDNSDVDKLFIQLVQTYNQLFEENPINASGVDAKAILSARLSKSRRLENLIAQLPGEKKNGLFGNLIALSLGLTPNFKSNFDLAEDAKLQLSKDTYDDDLDNLLAQIGDQYADLFLAAKNLSDAILLSDILRVNTEITKAPLSASMIKRYDEHHQDLTLLKALVRQQLPEKYKEIFFDQSKNGYAGYIDGGASQEEFYKFIKPILEKMDGTEELLVKLNREDLLRKQRTFDNGSIPHQIHLGELHAILRRQEDFYPFLKDNREKIEKILTFRIPYYVGPLARGNSRFAWMTRKSEETITPWNFEEVVDKGASAQSFIERMTNFDKNLPNEKVLPKHSLLYEYFTVYNELTKVKYVTEGMRKPAFLSGEQKKAIVDLLFKTNRKVTVKQLKEDYFKKIECFDSVEISGVEDRFNASLGTYHDLLKIIKDKDFLDNEENEDILEDIVLTLTLFEDREMIEERLKTYAHLFDDKVMKQLKRRRYTGWGRLSRKLINGIRDKQSGKTILDFLKSDGFANRNFMQLIHDDSLTFKEDIQKAQVSGQGDSLHEHIANLAGSPAIKKGILQTVKVVDELVKVMGRHKPENIVIEMARENQTTQKGQKNSRERMKRIEEGIKELGSQILKEHPVENTQLQNEKLYLYYLQNGRDMYVDQELDINRLSDYDVDHIVPQSFLKDDSIDNKVLTRSDKARGKSDNVPSEEVVKKMKNYWRQLLNAKLITQRKFDNLTKAERGGLSELDKAGFIKRQLVETRQITKHVAQILDSRMNTKYDENDKLIREVKVITLKSKLVSDFRKDFQFYKVREINNYHHAHDAYLNAVVGTALIKKYPKLESEFVYGDYKVYDVRKMIAKSEQEIGKATAKYFFYSNIMNFFKTEITLANGEIRKRPLIETNGETGEIVWDKGRDFATVRKVLSMPQVNIVKKTEVQTGGFSKESILPKRNSDKLIARKKDWDPKKYGGFDSPTVAYSVLVVAKVEKGKSKKLKSVKELLGITIMERSSFEKNPIDFLEAKGYKEVKKDLIIKLPKYSLFELENGRKRMLASAGELQKGNELALPSKYVNFLYLASHYEKLKGSPEDNEQKQLFVEQHKHYLDEIIEQISEFSKRVILADANLDKVLSAYNKHRDKPIREQAENIIHLFTLTNLGAPAAFKYFDTTIDRKRYTSTKEVLDATLIHQSITGLYETRIDLSQLGGDGGPAPAPAPAPAPAPGGLGIEDEYRLHETSTEPDVSLGSTWLSDFPQAWAETGGMGLAVRQAPLIIPLKATSTPVSIQQYPMSHEARLGIKPHIQRLLDQGILVPCQSPWNTPLLPVKKPGTNDYRPVQDLREVNKRVEDIHPTVPNPYNLLSGLPPSHQWYTVLDLKDAFFCLRLHPTSQPLFAFEWRDPGMGISGQLTWTRLPQGFKNSPTLFNEALHRDLADFRIQHPDLILLQYVDDILLAATSELDCQQGTRALLQTLGDLGYRASAKKAQICQKQVKYLGYLLREGQRWLTEARKETVMGQPVPKTPRQLREFLGKAGFCRLFIPGFAEMAAPLYPLTKPGTLFSWGPDQQKAYQEIKQALLTAPALGLPDLTKPFELFVDEKQGYAKGVLTQKLGPWRRPVAYLSKKLDPVAAGWPPCLRMVAAIAVLTKDAGKLTMGQPLVILAPHAVEALVKQPPDRWLSNARMTHYQAMLLDTDRVQFGPVVALNPATLLPLPEEGAPHDCLEILAETHGTRPDLTDQPIPDADHTWYTDGSSFLQEGQRKAGAAVTTETEVIWAGALPAGTSAQRAELIALTQALKMAEGKRLNVYTDSRYAFATAHIHGEIYRRRGWLTSEGREIKNKSEILALLKALFLPKRLSIIHCLGHQKGDSAEARGNRLADQAAREAAIKTPPDTSTLLIAGKRTADGSEFEKRTADGSEFESPKKKAKVE

SEQ ID NO: 2088 - protein, 2131 aa, synthetic construct
MPAAKRVKLDGGDKKYSIGLDIGTNSVGWAVITDEYKVPSKKFKVLGNTDRHSIKKNLIGALLFDSGETAEATRLKRTARRRYTRRKNRICYLQEIFSNEMAKVDDSFFHRLEESFLVEEDKKHERHPIFGNIVDEVAYHEKYPTIYHLRKKLVDSTDKADLRLIYLALAHMIKFRGHFLIEGDLNPDNSDVDKLFIQLVQTYNQLFEENPINASGVDAKAILSARLSKSRRLENLIAQLPGEKKNGLFGNLIALSLGLTPNFKSNFDLAEDAKLQLSKDTYDDDLDNLLAQIGDQYADLFLAAKNLSDAILLSDILRVNTEITKAPLSASMIKRYDEHHQDLTLLKALVRQQLPEKYKEIFFDQSKNGYAGYIDGGASQEEFYKFIKPILEKMDGTEELLVKLNREDLLRKQRTFDNGSIPHQIHLGELHAILRRQEDFYPFLKDNREKIEKILTFRIPYYVGPLARGNSRFAWMTRKSEETITPWNFEEVVDKGASAQSFIERMTNFDKNLPNEKVLPKHSLLYEYFTVYNELTKVKYVTEGMRKPAFLSGEQKKAIVDLLFKTNRKVTVKQLKEDYFKKIECFDSVEISGVEDRFNASLGTYHDLLKIIKDKDFLDNEENEDILEDIVLTLTLFEDREMIEERLKTYAHLFDDKVMKQLKRRRYTGWGRLSRKLINGIRDKQSGKTILDFLKSDGFANRNFMQLIHDDSLTFKEDIQKAQVSGQGDSLHEHIANLAGSPAIKKGILQTVKVVDELVKVMGRHKPENIVIEMARENQTTQKGQKNSRERMKRIEEGIKELGSQILKEHPVENTQLQNEKLYLYYLQNGRDMYVDQELDINRLSDYDVDHIVPQSFLKDDSIDNKVLTRSDKARGKSDNVPSEEVVKKMKNYWRQLLNAKLITQRKFDNLTKAERGGLSELDKAGFIKRQLVETRQITKHVAQILDSRMNTKYDENDKLIREVKVITLKSKLVSDFRKDFQFYKVREINNYHHAHDAYLNAVVGTALIKKYPKLESEFVYGDYKVYDVRKMIAKSEQEIGKATAKYFFYSNIMNFFKTEITLANGEIRKRPLIETNGETGEIVWDKGRDFATVRKVLSMPQVNIVKKTEVQTGGFSKESILPKRNSDKLIARKKDWDPKKYGGFDSPTVAYSVLVVAKVEKGKSKKLKSVKELLGITIMERSSFEKNPIDFLEAKGYKEVKKDLIIKLPKYSLFELENGRKRMLASAGELQKGNELALPSKYVNFLYLASHYEKLKGSPEDNEQKQLFVEQHKHYLDEIIEQISEFSKRVILADANLDKVLSAYNKHRDKPIREQAENIIHLFTLTNLGAPAAFKYFDTTIDRKRYTSTKEVLDATLIHQSITGLYETRIDLSQLGGDGGAEAAAKEAAAKEAAAKEAAAKALEAEAAAKEAAAKEAAAKEAAAKAGGLGIEDEYRLHETSTEPDVSLGSTWLSDFPQAWAETGGMGLAVRQAPLIIPLKATSTPVSIQQYPMSHEARLGIKPHIQRLLDQGILVPCQSPWNTPLLPVKKPGTNDYRPVQDLREVNKRVEDIHPTVPNPYNLLSGLPPSHQWYTVLDLKDAFFCLRLHPTSQPLFAFEWRDPGMGISGQLTWTRLPQGFKNSPTLFNEALHRDLADFRIQHPDLILLQYVDDILLAATSELDCQQGTRALLQTLGDLGYRASAKKAQICQKQVKYLGYLLREGQRWLTEARKETVMGQPVPKTPRQLREFLGKAGFCRLFIPGFAEMAAPLYPLTKPGTLFSWGPDQQKAYQEIKQALLTAPALGLPDLTKPFELFVDEKQGYAKGVLTQKLGPWRRPVAYLSKKLDPVAAGWPPCLRMVAAIAVLTKDAGKLTMGQPLVILAPHAVEALVKQPPDRWLSNARMTHYQAMLLDTDRVQFGPVVALNPATLLPLPEEGAPHDCLEILAETHGTRPDLTDQPIPDADHTWYTDGSSFLQEGQRKAGAAVTTETEVIWAGALPAGTSAQRAELIALTQALKMAEGKRLNVYTDSRYAFATAHIHGEIYRRRGWLTSEGREIKNKSEILALLKALFLPKRLSIIHCLGHQKGDSAEARGNRLADQAAREAAIKTPPDTSTLLIAGKRTADGSEFEKRTADGSEFESPKKKAKVE

SEQ ID NO: 2089 - protein, 2096 aa, synthetic construct; identical to SEQ ID NO: 2050

SEQ ID NO: 2090 - protein, 2100 aa, synthetic construct; identical to SEQ ID NO: 2049

SEQ ID NO: 2091 - protein, 2094 aa, synthetic construct
MPAAKRVKLDGGDKKYSIGLDIGTNSVGWAVITDEYKVPSKKFKVLGNTDRHSIKKNLIGALLFDSGETAEATRLKRTARRRYTRRKNRICYLQEIFSNEMAKVDDSFFHRLEESFLVEEDKKHERHPIFGNIVDEVAYHEKYPTIYHLRKKLVDSTDKADLRLIYLALAHMIKFRGHFLIEGDLNPDNSDVDKLFIQLVQTYNQLFEENPINASGVDAKAILSARLSKSRRLENLIAQLPGEKKNGLFGNLIALSLGLTPNFKSNFDLAEDAKLQLSKDTYDDDLDNLLAQIGDQYADLFLAAKNLSDAILLSDILRVNTEITKAPLSASMIKRYDEHHQDLTLLKALVRQQLPEKYKEIFFDQSKNGYAGYIDGGASQEEFYKFIKPILEKMDGTEELLVKLNREDLLRKQRTFDNGSIPHQIHLGELHAILRRQEDFYPFLKDNREKIEKILTFRIPYYVGPLARGNSRFAWMTRKSEETITPWNFEEVVDKGASAQSFIERMTNFDKNLPNEKVLPKHSLLYEYFTVYNELTKVKYVTEGMRKPAFLSGEQKKAIVDLLFKTNRKVTVKQLKEDYFKKIECFDSVEISGVEDRFNASLGTYHDLLKIIKDKDFLDNEENEDILEDIVLTLTLFEDREMIEERLKTYAHLFDDKVMKQLKRRRYTGWGRLSRKLINGIRDKQSGKTILDFLKSDGFANRNFMQLIHDDSLTFKEDIQKAQVSGQGDSLHEHIANLAGSPAIKKGILQTVKVVDELVKVMGRHKPENIVIEMARENQTTQKGQKNSRERMKRIEEGIKELGSQILKEHPVENTQLQNEKLYLYYLQNGRDMYVDQELDINRLSDYDVDHIVPQSFLKDDSIDNKVLTRSDKARGKSDNVPSEEVVKKMKNYWRQLLNAKLITQRKFDNLTKAERGGLSELDKAGFIKRQLVETRQITKHVAQILDSRMNTKYDENDKLIREVKVITLKSKLVSDFRKDFQFYKVREINNYHHAHDAYLNAVVGTALIKKYPKLESEFVYGDYKVYDVRKMIAKSEQEIGKATAKYFFYSNIMNFFKTEITLANGEIRKRPLIETNGETGEIVWDKGRDFATVRKVLSMPQVNIVKKTEVQTGGFSKESILPKRNSDKLIARKKDWDPKKYGGFDSPTVAYSVLVVAKVEKGKSKKLKSVKELLGITIMERSSFEKNPIDFLEAKGYKEVKKDLIIKLPKYSLFELENGRKRMLASAGELQKGNELALPSKYVNFLYLASHYEKLKGSPEDNEQKQLFVEQHKHYLDEIIEQISEFSKRVILADANLDKVLSAYNKHRDKPIREQAENIIHLFTLTNLGAPAAFKYFDTTIDRKRYTSTKEVLDATLIHQSITGLYETRIDLSQLGGDGGPAPGSSGGGGGLGIEDEYRLHETSTEPDVSLGSTWLSDFPQAWAETGGMGLAVRQAPLIIPLKATSTPVSIQQYPMSHEARLGIKPHIQRLLDQGILVPCQSPWNTPLLPVKKPGTNDYRPVQDLREVNKRVEDIHPTVPNPYNLLSGLPPSHQWYTVLDLKDAFFCLRLHPTSQPLFAFEWRDPGMGISGQLTWTRLPQGFKNSPTLFNEALHRDLADFRIQHPDLILLQYVDDILLAATSELDCQQGTRALLQTLGDLGYRASAKKAQICQKQVKYLGYLLREGQRWLTEARKETVMGQPVPKTPRQLREFLGKAGFCRLFIPGFAEMAAPLYPLTKPGTLFSWGPDQQKAYQEIKQALLTAPALGLPDLTKPFELFVDEKQGYAKGVLTQKLGPWRRPVAYLSKKLDPVAAGWPPCLRMVAAIAVLTKDAGKLTMGQPLVILAPHAVEALVKQPPDRWLSNARMTHYQAMLLDTDRVQFGPVVALNPATLLPLPEEGAPHDCLEILAETHGTRPDLTDQPIPDADHTWYTDGSSFLQEGQRKAGAAVTTETEVIWAGALPAGTSAQRAELIALTQALKMAEGKRLNVYTDSRYAFATAHIHGEIYRRRGWLTSEGREIKNKSEILALLKALFLPKRLSIIHCLGHQKGDSAEARGNRLADQAAREAAIKTPPDTSTLLIAGKRTADGSEFEKRTADGSEFESPKKKAKVE

SEQ ID NO: 2092 - protein, 2105 aa, synthetic construct
MPAAKRVKLDGGDKKYSIGLDIGTNSVGWAVITDEYKVPSKKFKVLGNTDRHSIKKNLIGALLFDSGETAEATRLKRTARRRYTRRKNRICYLQEIFSNEMAKVDDSFFHRLEESFLVEEDKKHERHPIFGNIVDEVAYHEKYPTIYHLRKKLVDSTDKADLRLIYLALAHMIKFRGHFLIEGDLNPDNSDVDKLFIQLVQTYNQLFEENPINASGVDAKAILSARLSKSRRLENLIAQLPGEKKNGLFGNLIALSLGLTPNFKSNFDLAEDAKLQLSKDTYDDDLDNLLAQIGDQYADLFLAAKNLSDAILLSDILRVNTEITKAPLSASMIKRYDEHHQDLTLLKALVRQQLPEKYKEIFFDQSKNGYAGYIDGGASQEEFYKFIKPILEKMDGTEELLVKLNREDLLRKQRTFDNGSIPHQIHLGELHAILRRQEDFYPFLKDNREKIEKILTFRIPYYVGPLARGNSRFAWMTRKSEETITPWNFEEVVDKGASAQSFIERMTNFDKNLPNEKVLPKHSLLYEYFTVYNELTKVKYVTEGMRKPAFLSGEQKKAIVDLLFKTNRKVTVKQLKEDYFKKIECFDSVEISGVEDRFNASLGTYHDLLKIIKDKDFLDNEENEDILEDIVLTLTLFEDREMIEERLKTYAHLFDDKVMKQLKRRRYTGWGRLSRKLINGIRDKQSGKTILDFLKSDGFANRNFMQLIHDDSLTFKEDIQKAQVSGQGDSLHEHIANLAGSPAIKKGILQTVKVVDELVKVMGRHKPENIVIEMARENQTTQKGQKNSRERMKRIEEGIKELGSQILKEHPVENTQLQNEKLYLYYLQNGRDMYVDQELDINRLSDYDVDHIVPQSFLKDDSIDNKVLTRSDKARGKSDNVPSEEVVKKMKNYWRQLLNAKLITQRKFDNLTKAERGGLSELDKAGFIKRQLVETRQITKHVAQILDSRMNTKYDENDKLIREVKVITLKSKLVSDFRKDFQFYKVREINNYHHAHDAYLNAVVGTALIKKYPKLESEFVYGDYKVYDVRKMIAKSEQEIGKATAKYFFYSNIMNFFKTEITLANGEIRKRPLIETNGETGEIVWDKGRDFATVRKVLSMPQVNIVKKTEVQTGGFSKESILPKRNSDKLIARKKDWDPKKYGGFDSPTVAYSVLVVAKVEKGKSKKLKSVKELLGITIMERSSFEKNPIDFLEAKGYKEVKKDLIIKLPKYSLFELENGRKRMLASAGELQKGNELALPSKYVNFLYLASHYEKLKGSPEDNEQKQLFVEQHKHYLDEIIEQISEFSKRVILADANLDKVLSAYNKHRDKPIREQAENIIHLFTLTNLGAPAAFKYFDTTIDRKRYTSTKEVLDATLIHQSITGLYETRIDLSQLGGDGGEAAAKEAAAKEAAAKEAAAKGGLGIEDEYRLHETSTEPDVSLGSTWLSDFPQAWAETGGMGLAVRQAPLIIPLKATSTPVSIQQYPMSHEARLGIKPHIQRLLDQGILVPCQSPWNTPLLPVKKPGTNDYRPVQDLREVNKRVEDIHPTVPNPYNLLSGLPPSHQWYTVLDLKDAFFCLRLHPTSQPLFAFEWRDPGMGISGQLTWTRLPQGFKNSPTLFNEALHRDLADFRIQHPDLILLQYVDDILLAATSELDCQQGTRALLQTLGDLGYRASAKKAQICQKQVKYLGYLLREGQRWLTEARKETVMGQPVPKTPRQLREFLGKAGFCRLFIPGFAEMAAPLYPLTKPGTLFSWGPDQQKAYQEIKQALLTAPALGLPDLTKPFELFVDEKQGYAKGVLTQKLGPWRRPVAYLSKKLDPVAAGWPPCLRMVAAIAVLTKDAGKLTMGQPLVILAPHAVEALVKQPPDRWLSNARMTHYQAMLLDTDRVQFGPVVALNPATLLPLPEEGAPHDCLEILAETHGTRPDLTDQPIPDADHTWYTDGSSFLQEGQRKAGAAVTTETEVIWAGALPAGTSAQRAELIALTQALKMAEGKRLNVYTDSRYAFATAHIHGEIYRRRGWLTSEGREIKNKSEILALLKALFLPKRLSIIHCLGHQKGDSAEARGNRLADQAAREAAIKTPPDTSTLLIAGKRTADGSEFEKRTADGSEFESPKKKAKVE

SEQ ID NO: 2093 - protein, 2096 aa, synthetic construct; identical to SEQ ID NO: 2048

SEQ ID NO: 2094 - protein, 2115 aa, synthetic construct
MPAAKRVKLDGGDKKYSIGLDIGTNSVGWAVITDEYKVPSKKFKVLGNTDRHSIKKNLIGALLFDSGETAEATRLKRTARRRYTRRKNRICYLQEIFSNEMAKVDDSFFHRLEESFLVEEDKKHERHPIFGNIVDEVAYHEKYPTIYHLRKKLVDSTDKADLRLIYLALAHMIKFRGHFLIEGDLNPDNSDVDKLFIQLVQTYNQLFEENPINASGVDAKAILSARLSKSRRLENLIAQLPGEKKNGLFGNLIALSLGLTPNFKSNFDLAEDAKLQLSKDTYDDDLDNLLAQIGDQYADLFLAAKNLSDAILLSDILRVNTEITKAPLSASMIKRYDEHHQDLTLLKALVRQQLPEKYKEIFFDQSKNGYAGYIDGGASQEEFYKFIKPILEKMDGTEELLVKLNREDLLRKQRTFDNGSIPHQIHLGELHAILRRQEDFYPFLKDNREKIEKILTFRIPYYVGPLARGNSRFAWMTRKSEETITPWNFEEVVDKGASAQSFIERMTNFDKNLPNEKVLPKHSLLYEYFTVYNELTKVKYVTEGMRKPAFLSGEQKKAIVDLLFKTNRKVTVKQLKEDYFKKIECFDSVEISGVEDRFNASLGTYHDLLKIIKDKDFLDNEENEDILEDIVLTLTLFEDREMIEERLKTYAHLFDDKVMKQLKRRRYTGWGRLSRKLINGIRDKQSGKTILDFLKSDGFANRNFMQLIHDDSLTFKEDIQKAQVSGQGDSLHEHIANLAGSPAIKKGILQTVKVVDELVKVMGRHKPENIVIEMARENQTTQKGQKNSRERMKRIEEGIKELGSQILKEHPVENTQLQNEKLYLYYLQNGRDMYVDQELDINRLSDYDVDHIVPQSFLKDDSIDNKVLTRSDKARGKSDNVPSEEVVKKMKNYWRQLLNAKLITQRKFDNLTKAERGGLSELDKAGFIKRQLVETRQITKHVAQILDSRMNTKYDENDKLIREVKVITLKSKLVSDFRKDFQFYKVREINNYHHAHDAYLNAVVGTALIKKYPKLESEFVYGDYKVYDVRKMIAKSEQEIGKATAKYFFYSNIMNFFKTEITLANGEIRKRPLIETNGETGEIVWDKGRDFATVRKVLSMPQVNIVKKTEVQTGGFSKESILPKRNSDKLIARKKDWDPKKYGGFDSPTVAYSVLVVAKVEKGKSKKLKSVKELLGITIMERSSFEKNPIDFLEAKGYKEVKKDLIIKLPKYSLFELENGRKRMLASAGELQKGNELALPSKYVNFLYLASHYEKLKGSPEDNEQKQLFVEQHKHYLDEIIEQISEFSKRVILADANLDKVLSAYNKHRDKPIREQAENIIHLFTLTNLGAPAAFKYFDTTIDRKRYTSTKEVLDATLIHQSITGLYETRIDLSQLGGDGGGGGGSGGGGSGGGGSGGGGSGGGGSGGGGSGGLGIEDEYRLHETSTEPDVSLGSTWLSDFPQAWAETGGMGLAVRQAPLIIPLKATSTPVSIQQYPMSHEARLGIKPHIQRLLDQGILVPCQSPWNTPLLPVKKPGTNDYRPVQDLREVNKRVEDIHPTVPNPYNLLSGLPPSHQWYTVLDLKDAFFCLRLHPTSQPLFAFEWRDPGMGISGQLTWTRLPQGFKNSPTLFNEALHRDLADFRIQHPDLILLQYVDDILLAATSELDCQQGTRALLQTLGDLGYRASAKKAQICQKQVKYLGYLLREGQRWLTEARKETVMGQPVPKTPRQLREFLGKAGFCRLFIPGFAEMAAPLYPLTKPGTLFSWGPDQQKAYQEIKQALLTAPALGLPDLTKPFELFVDEKQGYAKGVLTQKLGPWRRPVAYLSKKLDPVAAGWPPCLRMVAAIAVLTKDAGKLTMGQPLVILAPHAVEALVKQPPDRWLSNARMTHYQAMLLDTDRVQFGPVVALNPATLLPLPEEGAPHDCLEILAETHGTRPDLTDQPIPDADHTWYTDGSSFLQEGQRKAGAAVTTETEVIWAGALPAGTSAQRAELIALTQALKMAEGKRLNVYTDSRYAFATAHIHGEIYRRRGWLTSEGREIKNKSEILALLKALFLPKRLSIIHCLGHQKGDSAEARGNRLADQAAREAAIKTPPDTSTLLIAGKRTADGSEFEKRTADGSEFESPKKKAKVE

SEQ ID NO: 2095 - protein, 2096 aa, synthetic construct
MPAAKRVKLDGGDKKYSIGLDIGTNSVGWAVITDEYKVPSKKFKVLGNTDRHSIKKNLIGALLFDSGETAEATRLKRTARRRYTRRKNRICYLQEIFSNEMAKVDDSFFHRLEESFLVEEDKKHERHPIFGNIVDEVAYHEKYPTIYHLRKKLVDSTDKADLRLIYLALAHMIKFRGHFLIEGDLNPDNSDVDKLFIQLVQTYNQLFEENPINASGVDAKAILSARLSKSRRLENLIAQLPGEKKNGLFGNLIALSLGLTPNFKSNFDLAEDAKLQLSKDTYDDDLDNLLAQIGDQYADLFLAAKNLSDAILLSDILRVNTEITKAPLSASMIKRYDEHHQDLTLLKALVRQQLPEKYKEIFFDQSKNGYAGYIDGGASQEEFYKFIKPILEKMDGTEELLVKLNREDLLRKQRTFDNGSIPHQIHLGELHAILRRQEDFYPFLKDNREKIEKILTFRIPYYVGPLARGNSRFAWMTRKSEETITPWNFEEVVDKGASAQSFIERMTNFDKNLPNEKVLPKHSLLYEYFTVYNELTKVKYVTEGMRKPAFLSGEQKKAIVDLLFKTNRKVTVKQLKEDYFKKIECFDSVEISGVEDRFNASLGTYHDLLKIIKDKDFLDNEENEDILEDIVLTLTLFEDREMIEERLKTYAHLFDDKVMKQLKRRRYTGWGRLSRKLINGIRDKQSGKTILDFLKSDGFANRNFMQLIHDDSLTFKEDIQKAQVSGQGDSLHEHIANLAGSPAIKKGILQTVKVVDELVKVMGRHKPENIVIEMARENQTTQKGQKNSRERMKRIEEGIKELGSQILKEHPVENTQLQNEKLYLYYLQNGRDMYVDQELDINRLSDYDVDHIVPQSFLKDDSIDNKVLTRSDKARGKSDNVPSEEVVKKMKNYWRQLLNAKLITQRKFDNLTKAERGGLSELDKAGFIKRQLVETRQITKHVAQILDSRMNTKYDENDKLIREVKVITLKSKLVSDFRKDFQFYKVREINNYHHAHDAYLNAVVGTALIKKYPKLESEFVYGDYKVYDVRKMIAKSEQEIGKATAKYFFYSNIMNFFKTEITLANGEIRKRPLIETNGETGEIVWDKGRDFATVRKVLSMPQVNIVKKTEVQTGGFSKESILPKRNSDKLIARKKDWDPKKYGGFDSPTVAYSVLVVAKVEKGKSKKLKSVKELLGITIMERSSFEKNPIDFLEAKGYKEVKKDLIIKLPKYSLFELENGRKRMLASAGELQKGNELALPSKYVNFLYLASHYEKLKGSPEDNEQKQLFVEQHKHYLDEIIEQISEFSKRVILADANLDKVLSAYNKHRDKPIREQAENIIHLFTLTNLGAPAAFKYFDTTIDRKRYTSTKEVLDATLIHQSITGLYETRIDLSQLGGDGGPAPEAAAKGSSGGLGIEDEYRLHETSTEPDVSLGSTWLSDFPQAWAETGGMGLAVRQAPLIIPLKATSTPVSIQQYPMSHEARLGIKPHIQRLLDQGILVPCQSPWNTPLLPVKKPGTNDYRPVQDLREVNKRVEDIHPTVPNPYNLLSGLPPSHQWYTVLDLKDAFFCLRLHPTSQPLFAFEWRDPGMGISGQLTWTRLPQGFKNSPTLFNEALHRDLADFRIQHPDLILLQYVDDILLAATSELDCQQGTRALLQTLGDLGYRASAKKAQICQKQVKYLGYLLREGQRWLTEARKETVMGQPVPKTPRQLREFLGKAGFCRLFIPGFAEMAAPLYPLTKPGTLFSWGPDQQKAYQEIKQALLTAPALGLPDLTKPFELFVDEKQGYAKGVLTQKLGPWRRPVAYLSKKLDPVAAGWPPCLRMVAAIAVLTKDAGKLTMGQPLVILAPHAVEALVKQPPDRWLSNARMTHYQAMLLDTDRVQFGPVVALNPATLLPLPEEGAPHDCLEILAETHGTRPDLTDQPIPDADHTWYTDGSSFLQEGQRKAGAAVTTETEVIWAGALPAGTSAQRAELIALTQALKMAEGKRLNVYTDSRYAFATAHIHGEIYRRRGWLTSEGREIKNKSEILALLKALFLPKRLSIIHCLGHQKGDSAEARGNRLADQAAREAAIKTPPDTSTLLIAGKRTADGSEFEKRTADGSEFESPKKKAKVE

SEQ ID NO: 2096 - protein, 2090 aa, synthetic construct
MPAAKRVKLDGGDKKYSIGLDIGTNSVGWAVITDEYKVPSKKFKVLGNTDRHSIKKNLIGALLFDSGETAEATRLKRTARRRYTRRKNRICYLQEIFSNEMAKVDDSFFHRLEESFLVEEDKKHERHPIFGNIVDEVAYHEKYPTIYHLRKKLVDSTDKADLRLIYLALAHMIKFRGHFLIEGDLNPDNSDVDKLFIQLVQTYNQLFEENPINASGVDAKAILSARLSKSRRLENLIAQLPGEKKNGLFGNLIALSLGLTPNFKSNFDLAEDAKLQLSKDTYDDDLDNLLAQIGDQYADLFLAAKNLSDAILLSDILRVNTEITKAPLSASMIKRYDEHHQDLTLLKALVRQQLPEKYKEIFFDQSKNGYAGYIDGGASQEEFYKFIKPILEKMDGTEELLVKLNREDLLRKQRTFDNGSIPHQIHLGELHAILRRQEDFYPFLKDNREKIEKILTFRIPYYVGPLARGNSRFAWMTRKSEETITPWNFEEVVDKGASAQSFIERMTNFDKNLPNEKVLPKHSLLYEYFTVYNELTKVKYVTEGMRKPAFLSGEQKKAIVDLLFKTNRKVTVKQLKEDYFKKIECFDSVEISGVEDRFNASLGTYHDLLKIIKDKDFLDNEENEDILEDIVLTLTLFEDREMIEERLKTYAHLFDDKVMKQLKRRRYTGWGRLSRKLINGIRDKQSGKTILDFLKSDGFANRNFMQLIHDDSLTFKEDIQKAQVSGQGDSLHEHIANLAGSPAIKKGILQTVKVVDELVKVMGRHKPENIVIEMARENQTTQKGQKNSRERMKRIEEGIKELGSQILKEHPVENTQLQNEKLYLYYLQNGRDMYVDQELDINRLSDYDVDHIVPQSFLKDDSIDNKVLTRSDKARGKSDNVPSEEVVKKMKNYWRQLLNAKLITQRKFDNLTKAERGGLSELDKAGFIKRQLVETRQITKHVAQILDSRMNTKYDENDKLIREVKVITLKSKLVSDFRKDFQFYKVREINNYHHAHDAYLNAVVGTALIKKYPKLESEFVYGDYKVYDVRKMIAKSEQEIGKATAKYFFYSNIMNFFKTEITLANGEIRKRPLIETNGETGEIVWDKGRDFATVRKVLSMPQVNIVKKTEVQTGGFSKESILPKRNSDKLIARKKDWDPKKYGGFDSPTVAYSVLVVAKVEKGKSKKLKSVKELLGITIMERSSFEKNPIDFLEAKGYKEVKKDLIIKLPKYSLFELENGRKRMLASAGELQKGNELALPSKYVNFLYLASHYEKLKGSPEDNEQKQLFVEQHKHYLDEIIEQISEFSKRVILADANLDKVLSAYNKHRDKPIREQAENIIHLFTLTNLGAPAAFKYFDTTIDRKRYTSTKEVLDATLIHQSITGLYETRIDLSQLGGDGGEAAAKGGLGIEDEYRLHETSTEPDVSLGSTWLSDFPQAWAETGGMGLAVRQAPLIIPLKATSTPVSIQQYPMSHEARLGIKPHIQRLLDQGILVPCQSPWNTPLLPVKKPGTNDYRPVQDLREVNKRVEDIHPTVPNPYNLLSGLPPSHQWYTVLDLKDAFFCLRLHPTSQPLFAFEWRDPGMGISGQLTWTRLPQGFKNSPTLFNEALHRDLADFRIQHPDLILLQYVDDILLAATSELDCQQGTRALLQTLGDLGYRASAKKAQICQKQVKYLGYLLREGQRWLTEARKETVMGQPVPKTPRQLREFLGKAGFCRLFIPGFAEMAAPLYPLTKPGTLFSWGPDQQKAYQEIKQALLTAPALGLPDLTKPFELFVDEKQGYAKGVLTQKLGPWRRPVAYLSKKLDPVAAGWPPCLRMVAAIAVLTKDAGKLTMGQPLVILAPHAVEALVKQPPDRWLSNARMTHYQAMLLDTDRVQFGPVVALNPATLLPLPEEGAPHDCLEILAETHGTRPDLTDQPIPDADHTWYTDGSSFLQEGQRKAGAAVTTETEVIWAGALPAGTSAQRAELIALTQALKMAEGKRLNVYTDSRYAFATAHIHGEIYRRRGWLTSEGREIKNKSEILALLKALFLPKRLSIIHCLGHQKGDSAEARGNRLADQAAREAAIKTPPDTSTLLIAGKRTADGSEFEKRTADGSEFESPKKKAKVE

SEQ ID NO: 2097 - protein, 2096 aa, synthetic construct
MPAAKRVKLDGGDKKYSIGLDIGTNSVGWAVITDEYKVPSKKFKVLGNTDRHSIKKNLIGALLFDSGETAEATRLKRTARRRYTRRKNRICYLQEIFSNEMAKVDDSFFHRLEESFLVEEDKKHERHPIFGNIVDEVAYHEKYPTIYHLRKKLVDSTDKADLRLIYLALAHMIKFRGHFLIEGDLNPDNSDVDKLFIQLVQTYNQLFEENPINASGVDAKAILSARLSKSRRLENLIAQLPGEKKNGLFGNLIALSLGLTPNFKSNFDLAEDAKLQLSKDTYDDDLDNLLAQIGDQYADLFLAAKNLSDAILLSDILRVNTEITKAPLSASMIKRYDEHHQDLTLLKALVRQQLPEKYKEIFFDQSKNGYAGYIDGGASQEEFYKFIKPILEKMDGTEELLVKLNREDLLRKQRTFDNGSIPHQIHLGELHAILRRQEDFYPFLKDNREKIEKILTFRIPYYVGPLARGNSRFAWMTRKSEETITPWNFEEVVDKGASAQSFIERMTNFDKNLPNEKVLPKHSLLYEYFTVYNELTKVKYVTEGMRKPAFLSGEQKKAIVDLLFKTNRKVTVKQLKEDYFKKIECFDSVEISGVEDRFNASLGTYHDLLKIIKDKDFLDNEENEDILEDIVLTLTLFEDREMIEERLKTYAHLFDDKVMKQLKRRRYTGWGRLSRKLINGIRDKQSGKTILDFLKSDGFANRNFMQLIHDDSLTFKEDIQKAQVSGQGDSLHEHIANLAGSPAIKKGILQTVKVVDELVKVMGRHKPENIVIEMARENQTTQKGQKNSRERMKRIEEGIKELGSQILKEHPVENTQLQNEKLYLYYLQNGRDMYVDQELDINRLSDYDVDHIVPQSFLKDDSIDNKVLTRSDKARGKSDNVPSEEVVKKMKNYWRQLLNAKLITQRKFDNLTKAERGGLSELDKAGFIKRQLVETRQITKHVAQILDSRMNTKYDENDKLIREVKVITLKSKLVSDFRKDFQFYKVREINNYHHAHDAYLNAVVGTALIKKYPKLESEFVYGDYKVYDVRKMIAKSEQEIGKATAKYFFYSNIMNFFKTEITLANGEIRKRPLIETNGETGEIVWDKGRDFATVRKVLSMPQVNIVKKTEVQTGGFSKESILPKRNSDKLIARKKDWDPKKYGGFDSPTVAYSVLVVAKVEKGKSKKLKSVKELLGITIMERSSFEKNPIDFLEAKGYKEVKKDLIIKLPKYSLFELENGRKRMLASAGELQKGNELALPSKYVNFLYLASHYEKLKGSPEDNEQKQLFVEQHKHYLDEIIEQISEFSKRVILADANLDKVLSAYNKHRDKPIREQAENIIHLFTLTNLGAPAAFKYFDTTIDRKRYTSTKEVLDATLIHQSITGLYETRIDLSQLGGDGGPAPEAAAKGGSGGLGIEDEYRLHETSTEPDVSLGSTWLSDFPQAWAETGGMGLAVRQAPLIIPLKATSTPVSIQQYPMSHEARLGIKPHIQRLLDQGILVPCQSPWNTPLLPVKKPGTNDYRPVQDLREVNKRVEDIHPTVPNPYNLLSGLPPSHQWYTVLDLKDAFFCLRLHPTSQPLFAFEWRDPGMGISGQLTWTRLPQGFKNSPTLFNEALHRDLADFRIQHPDLILLQYVDDILLAATSELDCQQGTRALLQTLGDLGYRASAKKAQICQKQVKYLGYLLREGQRWLTEARKETVMGQPVPKTPRQLREFLGKAGFCRLFIPGFAEMAAPLYPLTKPGTLFSWGPDQQKAYQEIKQALLTAPALGLPDLTKPFELFVDEKQGYAKGVLTQKLGPWRRPVAYLSKKLDPVAAGWPPCLRMVAAIAVLTKDAGKLTMGQPLVILAPHAVEALVKQPPDRWLSNARMTHYQAMLLDTDRVQFGPVVALNPATLLPLPEEGAPHDCLEILAETHGTRPDLTDQPIPDADHTWYTDGSSFLQEGQRKAGAAVTTETEVIWAGALPAGTSAQRAELIALTQALKMAEGKRLNVYTDSRYAFATAHIHGEIYRRRGWLTSEGREIKNKSEILALLKALFLPKRLSIIHCLGHQKGDSAEARGNRLADQAAREAAIKTPPDTSTLLIAGKRTADGSEFEKRTADGSEFESPKKKAKVE

SEQ ID NO: 2098 - protein, 2115 aa, synthetic construct
MPAAKRVKLDGGDKKYSIGLDIGTNSVGWAVITDEYKVPSKKFKVLGNTDRHSIKKNLIGALLFDSGETAEATRLKRTARRRYTRRKNRICYLQEIFSNEMAKVDDSFFHRLEESFLVEEDKKHERHPIFGNIVDEVAYHEKYPTIYHLRKKLVDSTDKADLRLIYLALAHMIKFRGHFLIEGDLNPDNSDVDKLFIQLVQTYNQLFEENPINASGVDAKAILSARLSKSRRLENLIAQLPGEKKNGLFGNLIALSLGLTPNFKSNFDLAEDAKLQLSKDTYDDDLDNLLAQIGDQYADLFLAAKNLSDAILLSDILRVNTEITKAPLSASMIKRYDEHHQDLTLLKALVRQQLPEKYKEIFFDQSKNGYAGYIDGGASQEEFYKFIKPILEKMDGTEELLVKLNREDLLRKQRTFDNGSIPHQIHLGELHAILRRQEDFYPFLKDNREKIEKILTFRIPYYVGPLARGNSRFAWMTRKSEETITPWNFEEVVDKGASAQSFIERMTNFDKNLPNEKVLPKHSLLYEYFTVYNELTKVKYVTEGMRKPAFLSGEQKKAIVDLLFKTNRKVTVKQLKEDYFKKIECFDSVEISGVEDRFNASLGTYHDLLKIIKDKDFLDNEENEDILEDIVLTLTLFEDREMIEERLKTYAHLFDDKVMKQLKRRRYTGWGRLSRKLINGIRDKQSGKTILDFLKSDGFANRNFMQLIHDDSLTFKEDIQKAQVSGQGDSLHEHIANLAGSPAIKKGILQTVKVVDELVKVMGRHKPENIVIEMARENQTTQKGQKNSRERMKRIEEGIKELGSQILKEHPVENTQLQNEKLYLYYLQNGRDMYVDQELDINRLSDYDVDHIVPQSFLKDDSIDNKVLTRSDKARGKSDNVPSEEVVKKMKNYWRQLLNAKLITQRKFDNLTKAERGGLSELDKAGFIKRQLVETRQITKHVAQILDSRMNTKYDENDKLIREVKVITLKSKLVSDFRKDFQFYKVREINNYHHAHDAYLNAVVGTALIKKYPKLESEFVYGDYKVYDVRKMIAKSEQEIGKATAKYFFYSNIMNFFKTEITLANGEIRKRPLIETNGETGEIVWDKGRDFATVRKVLSMPQVNIVKKTEVQTGGFSKESILPKRNSDKLIARKKDWDPKKYGGFDSPTVAYSVLVVAKVEKGKSKKLKSVKELLGITIMERSSFEKNPIDFLEAKGYKEVKKDLIIKLPKYSLFELENGRKRMLASAGELQKGNELALPSKYVNFLYLASHYEKLKGSPEDNEQKQLFVEQHKHYLDEIIEQISEFSKRVILADANLDKVLSAYNKHRDKPIREQAENIIHLFTLTNLGAPAAFKYFDTTIDRKRYTSTKEVLDATLIHQSITGLYETRIDLSQLGGDGGEAAAKEAAAKEAAAKEAAAKEAAAKEAAAKGGLGIEDEYRLHETSTEPDVSLGSTWLSDFPQAWAETGGMGLAVRQAPLIIPLKATSTPVSIQQYPMSHEARLGIKPHIQRLLDQGILVPCQSPWNTPLLPVKKPGTNDYRPVQDLREVNKRVEDIHPTVPNPYNLLSGLPPSHQWYTVLDLKDAFFCLRLHPTSQPLFAFEWRDPGMGISGQLTWTRLPQGFKNSPTLFNEALHRDLADFRIQHPDLILLQYVDDILLAATSELDCQQGTRALLQTLGDLGYRASAKKAQICQKQVKYLGYLLREGQRWLTEARKETVMGQPVPKTPRQLREFLGKAGFCRLFIPGFAEMAAPLYPLTKPGTLFSWGPDQQKAYQEIKQALLTAPALGLPDLTKPFELFVDEKQGYAKGVLTQKLGPWRRPVAYLSKKLDPVAAGWPPCLRMVAAIAVLTKDAGKLTMGQPLVILAPHAVEALVKQPPDRWLSNARMTHYQAMLLDTDRVQFGPVVALNPATLLPLPEEGAPHDCLEILAETHGTRPDLTDQPIPDADHTWYTDGSSFLQEGQRKAGAAVTTETEVIWAGALPAGTSAQRAELIALTQALKMAEGKRLNVYTDSRYAFATAHIHGEIYRRRGWLTSEGREIKNKSEILALLKALFLPKRLSIIHCLGHQKGDSAEARGNRLADQAAREAAIKTPPDTSTLLIAGKRTADGSEFEKRTADGSEFESPKKKAKVE

SEQ ID NO: 2099 - protein, 2096 aa, synthetic construct
MPAAKRVKLDGGDKKYSIGLDIGTNSVGWAVITDEYKVPSKKFKVLGNTDRHSIKKNLIGALLFDSGETAEATRLKRTARRRYTRRKNRICYLQEIFSNEMAKVDDSFFHRLEESFLVEEDKKHERHPIFGNIVDEVAYHEKYPTIYHLRKKLVDSTDKADLRLIYLALAHMIKFRGHFLIEGDLNPDNSDVDKLFIQLVQTYNQLFEENPINASGVDAKAILSARLSKSRRLENLIAQLPGEKKNGLFGNLIALSLGLTPNFKSNFDLAEDAKLQLSKDTYDDDLDNLLAQIGDQYADLFLAAKNLSDAILLSDILRVNTEITKAPLSASMIKRYDEHHQDLTLLKALVRQQLPEKYKEIFFDQSKNGYAGYIDGGASQEEFYKFIKPILEKMDGTEELLVKLNREDLLRKQRTFDNGSIPHQIHLGELHAILRRQEDFYPFLKDNREKIEKILTFRIPYYVGPLARGNSRFAWMTRKSEETITPWNFEEVVDKGASAQSFIERMTNFDKNLPNEKVLPKHSLLYEYFTVYNELTKVKYVTEGMRKPAFLSGEQKKAIVDLLFKTNRKVTVKQLKEDYFKKIECFDSVEISGVEDRFNASLGTYHDLLKIIKDKDFLDNEENEDILEDIVLTLTLFEDREMIEERLKTYAHLFDDKVMKQLKRRRYTGWGRLSRKLINGIRDKQSGKTILDFLKSDGFANRNFMQLIHDDSLTFKEDIQKAQVSGQGDSLHEHIANLAGSPAIKKGILQTVKVVDELVKVMGRHKPENIVIEMARENQTTQKGQKNSRERMKRIEEGIKELGSQILKEHPVENTQLQNEKLYLYYLQNGRDMYVDQELDINRLSDYDVDHIVPQSFLKDDSIDNKVLTRSDKARGKSDNVPSEEVVKKMKNYWRQLLNAKLITQRKFDNLTKAERGGLSELDKAGFIKRQLVETRQITKHVAQILDSRMNTKYDENDKLIREVKVITLKSKLVSDFRKDFQFYKVREINNYHHAHDAYLNAVVGTALIKKYPKLESEFVYGDYKVYDVRKMIAKSEQEIGKATAKYFFYSNIMNFFKTEITLANGEIRKRPLIETNGETGEIVWDKGRDFATVRKVLSMPQVNIVKKTEVQTGGFSKESILPKRNSDKLIARKKDWDPKKYGGFDSPTVAYSVLVVAKVEKGKSKKLKSVKELLGITIMERSSFEKNPIDFLEAKGYKEVKKDLIIKLPKYSLFELENGRKRMLASAGELQKGNELALPSKYVNFLYLASHYEKLKGSPEDNEQKQLFVEQHKHYLDEIIEQISEFSKRVILADANLDKVLSAYNKHRDKPIREQAENIIHLFTLTNLGAPAAFKYFDTTIDRKRYTSTKEVLDATLIHQSITGLYETRIDLSQLGGDGGEAAAKPAPGGSGGLGIEDEYRLHETSTEPDVSLGSTWLSDFPQAWAETGGMGLAVRQAPLIIPLKATSTPVSIQQYPMSHEARLGIKPHIQRLLDQGILVPCQSPWNTPLLPVKKPGTNDYRPVQDLREVNKRVEDIHPTVPNPYNLLSGLPPSHQWYTVLDLKDAFFCLRLHPTSQPLFAFEWRDPGMGISGQLTWTRLPQGFKNSPTLFNEALHRDLADFRIQHPDLILLQYVDDILLAATSELDCQQGTRALLQTLGDLGYRASAKKAQICQKQVKYLGYLLREGQRWLTEARKETVMGQPVPKTPRQLREFLGKAGFCRLFIPGFAEMAAPLYPLTKPGTLFSWGPDQQKAYQEIKQALLTAPALGLPDLTKPFELFVDEKQGYAKGVLTQKLGPWRRPVAYLSKKLDPVAAGWPPCLRMVAAIAVLTKDAGKLTMGQPLVILAPHAVEALVKQPPDRWLSNARMTHYQAMLLDTDRVQFGPVVALNPATLLPLPEEGAPHDCLEILAETHGTRPDLTDQPIPDADHTWYTDGSSFLQEGQRKAGAAVTTETEVIWAGALPAGTSAQRAELIALTQALKMAEGKRLNVYTDSRYAFATAHIHGEIYRRRGWLTSEGREIKNKSEILALLKALFLPKRLSIIHCLGHQKGDSAEARGNRLADQAAREAAIKTPPDTSTLLIAGKRTADGSEFEKRTADGSEFESPKKKAKVE

SEQ ID NO: 2100 - protein, 2096 aa, synthetic construct
MPAAKRVKLDGGDKKYSIGLDIGTNSVGWAVITDEYKVPSKKFKVLGNTDRHSIKKNLIGALLFDSGETAEATRLKRTARRRYTRRKNRICYLQEIFSNEMAKVDDSFFHRLEESFLVEEDKKHERHPIFGNIVDEVAYHEKYPTIYHLRKKLVDSTDKADLRLIYLALAHMIKFRGHFLIEGDLNPDNSDVDKLFIQLVQTYNQLFEENPINASGVDAKAILSARLSKSRRLENLIAQLPGEKKNGLFGNLIALSLGLTPNFKSNFDLAEDAKLQLSKDTYDDDLDNLLAQIGDQYADLFLAAKNLSDAILLSDILRVNTEITKAPLSASMIKRYDEHHQDLTLLKALVRQQLPEKYKEIFFDQSKNGYAGYIDGGASQEEFYKFIKPILEKMDGTEELLVKLNREDLLRKQRTFDNGSIPHQIHLGELHAILRRQEDFYPFLKDNREKIEKILTFRIPYYVGPLARGNSRFAWMTRKSEETITPWNFEEVVDKGASAQSFIERMTNFDKNLPNEKVLPKHSLLYEYFTVYNELTKVKYVTEGMRKPAFLSGEQKKAIVDLLFKTNRKVTVKQLKEDYFKKIECFDSVEISGVEDRFNASLGTYHDLLKIIKDKDFLDNEENEDILEDIVLTLTLFEDREMIEERLKTYAHLFDDKVMKQLKRRRYTGWGRLSRKLINGIRDKQSGKTILDFLKSDGFANRNFMQLIHDDSLTFKEDIQKAQVSGQGDSLHEHIANLAGSPAIKKGILQTVKVVDELVKVMGRHKPENIVIEMARENQTTQKGQKNSRERMKRIEEGIKELGSQILKEHPVENTQLQNEKLYLYYLQNGRDMYVDQELDINRLSDYDVDHIVPQSFLKDDSIDNKVLTRSDKARGKSDNVPSEEVVKKMKNYWRQLLNAKLITQRKFDNLTKAERGGLSELDKAGFIKRQLVETRQITKHVAQILDSRMNTKYDENDKLIREVKVITLKSKLVSDFRKDFQFYKVREINNYHHAHDAYLNAVVGTALIKKYPKLESEFVYGDYKVYDVRKMIAKSEQEIGKATAKYFFYSNIMNFFKTEITLANGEIRKRPLIETNGETGEIVWDKGRDFATVRKVLSMPQVNIVKKTEVQTGGFSKESILPKRNSDKLIARKKDWDPKKYGGFDSPTVAYSVLVVAKVEKGKSKKLKSVKELLGITIMERSSFEKNPIDFLEAKGYKEVKKDLIIKLPKYSLFELENGRKRMLASAGELQKGNELALPSKYVNFLYLASHYEKLKGSPEDNEQKQLFVEQHKHYLDEIIEQISEFSKRVILADANLDKVLSAYNKHRDKPIREQAENIIHLFTLTNLGAPAAFKYFDTTIDRKRYTSTKEVLDATLIHQSITGLYETRIDLSQLGGDGGGGSGSSEAAAKGGLGIEDEYRLHETSTEPDVSLGSTWLSDFPQAWAETGGMGLAVRQAPLIIPLKATSTPVSIQQYPMSHEARLGIKPHIQRLLDQGILVPCQSPWNTPLLPVKKPGTNDYRPVQDLREVNKRVEDIHPTVPNPYNLLSGLPPSHQWYTVLDLKDAFFCLRLHPTSQPLFAFEWRDPGMGISGQLTWTRLPQGFKNSPTLFNEALHRDLADFRIQHPDLILLQYVDDILLAATSELDCQQGTRALLQTLGDLGYRASAKKAQICQKQVKYLGYLLREGQRWLTEARKETVMGQPVPKTPRQLREFLGKAGFCRLFIPGFAEMAAPLYPLTKPGTLFSWGPDQQKAYQEIKQALLTAPALGLPDLTKPFELFVDEKQGYAKGVLTQKLGPWRRPVAYLSKKLDPVAAGWPPCLRMVAAIAVLTKDAGKLTMGQPLVILAPHAVEALVKQPPDRWLSNARMTHYQAMLLDTDRVQFGPVVALNPATLLPLPEEGAPHDCLEILAETHGTRPDLTDQPIPDADHTWYTDGSSFLQEGQRKAGAAVTTETEVIWAGALPAGTSAQRAELIALTQALKMAEGKRLNVYTDSRYAFATAHIHGEIYRRRGWLTSEGREIKNKSEILALLKALFLPKRLSIIHCLGHQKGDSAEARGNRLADQAAREAAIKTPPDTSTLLIAGKRTADGSEFEKRTADGSEFESPKKKAKVE

SEQ ID NO: 2101 - protein, 2094 aa, synthetic construct
MPAAKRVKLDGGDKKYSIGLDIGTNSVGWAVITDEYKVPSKKFKVLGNTDRHSIKKNLIGALLFDSGETAEATRLKRTARRRYTRRKNRICYLQEIFSNEMAKVDDSFFHRLEESFLVEEDKKHERHPIFGNIVDEVAYHEKYPTIYHLRKKLVDSTDKADLRLIYLALAHMIKFRGHFLIEGDLNPDNSDVDKLFIQLVQTYNQLFEENPINASGVDAKAILSARLSKSRRLENLIAQLPGEKKNGLFGNLIALSLGLTPNFKSNFDLAEDAKLQLSKDTYDDDLDNLLAQIGDQYADLFLAAKNLSDAILLSDILRVNTEITKAPLSASMIKRYDEHHQDLTLLKALVRQQLPEKYKEIFFDQSKNGYAGYIDGGASQEEFYKFIKPILEKMDGTEELLVKLNREDLLRKQRTFDNGSIPHQIHLGELHAILRRQEDFYPFLKDNREKIEKILTFRIPYYVGPLARGNSRFAWMTRKSEETITPWNFEEVVDKGASAQSFIERMTNFDKNLPNEKVLPKHSLLYEYFTVYNELTKVKYVTEGMRKPAFLSGEQKKAIVDLLFKTNRKVTVKQLKEDYFKKIECFDSVEISGVEDRFNASLGTYHDLLKIIKDKDFLDNEENEDILEDIVLTLTLFEDREMIEERLKTYAHLFDDKVMKQLKRRRYTGWGRLSRKLINGIRDKQSGKTILDFLKSDGFANRNFMQLIHDDSLTFKEDIQKAQVSGQGDSLHEHIANLAGSPAIKKGILQTVKVVDELVKVMGRHKPENIVIEMARENQTTQKGQKNSRERMKRIEEGIKELGSQILKEHPVENTQLQNEKLYLYYLQNGRDMYVDQELDINRLSDYDVDHIVPQSFLKDDSIDNKVLTRSDKARGKSDNVPSEEVVKKMKNYWRQLLNAKLITQRKFDNLTKAERGGLSELDKAGFIKRQLVETRQITKHVAQILDSRMNTKYDENDKLIREVKVITLKSKLVSDFRKDFQFYKVREINNYHHAHDAYLNAVVGTALIKKYPKLESEFVYGDYKVYDVRKMIAKSEQEIGKATAKYFFYSNIMNFFKTEITLANGEIRKRPLIETNGETGEIVWDKGRDFATVRKVLSMPQVNIVKKTEVQTGGFSKESILPKRNSDKLIARKKDWDPKKYGGFDSPTVAYSVLVVAKVEKGKSKKLKSVKELLGITIMERSSFEKNPIDFLEAKGYKEVKKDLIIKLPKYSLFELENGRKRMLASAGELQKGNELALPSKYVNFLYLASHYEKLKGSPEDNEQKQLFVEQHKHYLDEIIEQISEFSKRVILADANLDKVLSAYNKHRDKPIREQAENIIHLFTLTNLGAPAAFKYFDTTIDRKRYTSTKEVLDATLIHQSITGLYETRIDLSQLGGDGGPAPGGGGSSGGLGIEDEYRLHETSTEPDVSLGSTWLSDFPQAWAETGGMGLAVRQAPLIIPLKATSTPVSIQQYPMSHEARLGIKPHIQRLLDQGILVPCQSPWNTPLLPVKKPGTNDYRPVQDLREVNKRVEDIHPTVPNPYNLLSGLPPSHQWYTVLDLKDAFFCLRLHPTSQPLFAFEWRDPGMGISGQLTWTRLPQGFKNSPTLFNEALHRDLADFRIQHPDLILLQYVDDILLAATSELDCQQGTRALLQTLGDLGYRASAKKAQICQKQVKYLGYLLREGQRWLTEARKETVMGQPVPKTPRQLREFLGKAGFCRLFIPGFAEMAAPLYPLTKPGTLFSWGPDQQKAYQEIKQALLTAPALGLPDLTKPFELFVDEKQGYAKGVLTQKLGPWRRPVAYLSKKLDPVAAGWPPCLRMVAAIAVLTKDAGKLTMGQPLVILAPHAVEALVKQPPDRWLSNARMTHYQAMLLDTDRVQFGPVVALNPATLLPLPEEGAPHDCLEILAETHGTRPDLTDQPIPDADHTWYTDGSSFLQEGQRKAGAAVTTETEVIWAGALPAGTSAQRAELIALTQALKMAEGKRLNVYTDSRYAFATAHIHGEIYRRRGWLTSEGREIKNKSEILALLKALFLPKRLSIIHCLGHQKGDSAEARGNRLADQAAREAAIKTPPDTSTLLIAGKRTADGSEFEKRTADGSEFESPKKKAKVE

SEQ ID NO: 2102 - protein, 2096 aa, synthetic construct
MPAAKRVKLDGGDKKYSIGLDIGTNSVGWAVITDEYKVPSKKFKVLGNTDRHSIKKNLIGALLFDSGETAEATRLKRTARRRYTRRKNRICYLQEIFSNEMAKVDDSFFHRLEESFLVEEDKKHERHPIFGNIVDEVAYHEKYPTIYHLRKKLVDSTDKADLRLIYLALAHMIKFRGHFLIEGDLNPDNSDVDKLFIQLVQTYNQLFEENPINASGVDAKAILSARLSKSRRLENLIAQLPGEKKNGLFGNLIALSLGLTPNFKSNFDLAEDAKLQLSKDTYDDDLDNLLAQIGDQYADLFLAAKNLSDAILLSDILRVNTEITKAPLSASMIKRYDEHHQDLTLLKALVRQQLPEKYKEIFFDQSKNGYAGYIDGGASQEEFYKFIKPILEKMDGTEELLVKLNREDLLRKQRTFDNGSIPHQIHLGELHAILRRQEDFYPFLKDNREKIEKILTFRIPYYVGPLARGNSRFAWMTRKSEETITPWNFEEVVDKGASAQSFIERMTNFDKNLPNEKVLPKHSLLYEYFTVYNELTKVKYVTEGMRKPAFLSGEQKKAIVDLLFKTNRKVTVKQLKEDYFKKIECFDSVEISGVEDRFNASLGTYHDLLKIIKDKDFLDNEENEDILEDIVLTLTLFEDREMIEERLKTYAHLFDDKVMKQLKRRRYTGWGRLSRKLINGIRDKQSGKTILDFLKSDGFANRNFMQLIHDDSLTFKEDIQKAQVSGQGDSLHEHIANLAGSPAIKKGILQTVKVVDELVKVMGRHKPENIVIEMARENQTTQKGQKNSRERMKRIEEGIKELGSQILKEHPVENTQLQNEKLYLYYLQNGRDMYVDQELDINRLSDYDVDHIVPQSFLKDDSIDNKVLTRSDKARGKSDNVPSEEVVKKMKNYWRQLLNAKLITQRKFDNLTKAERGGLSELDKAGFIKRQLVETRQITKHVAQILDSRMNTKYDENDKLIREVKVITLKSKLVSDFRKDFQFYKVREINNYHHAHDAYLNAVVGTALIKKYPKLESEFVYGDYKVYDVRKMIAKSEQEIGKATAKYFFYSNIMNFFKTEITLANGEIRKRPLIETNGETGEIVWDKGRDFATVRKVLSMPQVNIVKKTEVQTGGFSKESILPKRNSDKLIARKKDWDPKKYGGFDSPTVAYSVLVVAKVEKGKSKKLKSVKELLGITIMERSSFEKNPIDFLEAKGYKEVKKDLIIKLPKYSLFELENGRKRMLASAGELQKGNELALPSKYVNFLYLASHYEKLKGSPEDNEQKQLFVEQHKHYLDEIIEQISEFSKRVILADANLDKVLSAYNKHRDKPIREQAENIIHLFTLTNLGAPAAFKYFDTTIDRKRYTSTKEVLDATLIHQSITGLYETRIDLSQLGGDGGGGSEAAAKGGGGGLGIEDEYRLHETSTEPDVSLGSTWLSDFPQAWAETGGMGLAVRQAPLIIPLKATSTPVSIQQYPMSHEARLGIKPHIQRLLDQGILVPCQSPWNTPLLPVKKPGTNDYRPVQDLREVNKRVEDIHPTVPNPYNLLSGLPPSHQWYTVLDLKDAFFCLRLHPTSQPLFAFEWRDPGMGISGQLTWTRLPQGFKNSPTLFNEALHRDLADFRIQHPDLILLQYVDDILLAATSELDCQQGTRALLQTLGDLGYRASAKKAQICQKQVKYLGYLLREGQRWLTEARKETVMGQPVPKTPRQLREFLGKAGFCRLFIPGFAEMAAPLYPLTKPGTLFSWGPDQQKAYQEIKQALLTAPALGLPDLTKPFELFVDEKQGYAKGVLTQKLGPWRRPVAYLSKKLDPVAAGWPPCLRMVAAIAVLTKDAGKLTMGQPLVILAPHAVEALVKQPPDRWLSNARMTHYQAMLLDTDRVQFGPVVALNPATLLPLPEEGAPHDCLEILAETHGTRPDLTDQPIPDADHTWYTDGSSFLQEGQRKAGAAVTTETEVIWAGALPAGTSAQRAELIALTQALKMAEGKRLNVYTDSRYAFATAHIHGEIYRRRGWLTSEGREIKNKSEILALLKALFLPKRLSIIHCLGHQKGDSAEARGNRLADQAAREAAIKTPPDTSTLLIAGKRTADGSEFEKRTADGSEFESPKKKAKVE

SEQ ID NO: 2103 - protein, 2088 aa, synthetic construct
MPAAKRVKLDGGDKKYSIGLDIGTNSVGWAVITDEYKVPSKKFKVLGNTDRHSIKKNLIGALLFDSGETAEATRLKRTARRRYTRRKNRICYLQEIFSNEMAKVDDSFFHRLEESFLVEEDKKHERHPIFGNIVDEVAYHEKYPTIYHLRKKLVDSTDKADLRLIYLALAHMIKFRGHFLIEGDLNPDNSDVDKLFIQLVQTYNQLFEENPINASGVDAKAILSARLSKSRRLENLIAQLPGEKKNGLFGNLIALSLGLTPNFKSNFDLAEDAKLQLSKDTYDDDLDNLLAQIGDQYADLFLAAKNLSDAILLSDILRVNTEITKAPLSASMIKRYDEHHQDLTLLKALVRQQLPEKYKEIFFDQSKNGYAGYIDGGASQEEFYKFIKPILEKMDGTEELLVKLNREDLLRKQRTFDNGSIPHQIHLGELHAILRRQEDFYPFLKDNREKIEKILTFRIPYYVGPLARGNSRFAWMTRKSEETITPWNFEEVVDKGASAQSFIERMTNFDKNLPNEKVLPKHSLLYEYFTVYNELTKVKYVTEGMRKPAFLSGEQKKAIVDLLFKTNRKVTVKQLKEDYFKKIECFDSVEISGVEDRFNASLGTYHDLLKIIKDKDFLDNEENEDILEDIVLTLTLFEDREMIEERLKTYAHLFDDKVMKQLKRRRYTGWGRLSRKLINGIRDKQSGKTILDFLKSDGFANRNFMQLIHDDSLTFKEDIQKAQVSGQGDSLHEHIANLAGSPAIKKGILQTVKVVDELVKVMGRHKPENIVIEMARENQTTQKGQKNSRERMKRIEEGIKELGSQILKEHPVENTQLQNEKLYLYYLQNGRDMYVDQELDINRLSDYDVDHIVPQSFLKDDSIDNKVLTRSDKARGKSDNVPSEEVVKKMKNYWRQLLNAKLITQRKFDNLTKAERGGLSELDKAGFIKRQLVETRQITKHVAQILDSRMNTKYDENDKLIREVKVITLKSKLVSDFRKDFQFYKVREINNYHHAHDAYLNAVVGTALIKKYPKLESEFVYGDYKVYDVRKMIAKSEQEIGKATAKYFFYSNIMNFFKTEITLANGEIRKRPLIETNGETGEIVWDKGRDFATVRKVLSMPQVNIVKKTEVQTGGFSKESILPKRNSDKLIARKKDWDPKKYGGFDSPTVAYSVLVVAKVEKGKSKKLKSVKELLGITIMERSSFEKNPIDFLEAKGYKEVKKDLIIKLPKYSLFELENGRKRMLASAGELQKGNELALPSKYVNFLYLASHYEKLKGSPEDNEQKQLFVEQHKHYLDEIIEQISEFSKRVILADANLDKVLSAYNKHRDKPIREQAENIIHLFTLTNLGAPAAFKYFDTTIDRKRYTSTKEVLDATLIHQSITGLYETRIDLSQLGGDGGPAPGGLGIEDEYRLHETSTEPDVSLGSTWLSDFPQAWAETGGMGLAVRQAPLIIPLKATSTPVSIQQYPMSHEARLGIKPHIQRLLDQGILVPCQSPWNTPLLPVKKPGTNDYRPVQDLREVNKRVEDIHPTVPNPYNLLSGLPPSHQWYTVLDLKDAFFCLRLHPTSQPLFAFEWRDPGMGISGQLTWTRLPQGFKNSPTLFNEALHRDLADFRIQHPDLILLQYVDDILLAATSELDCQQGTRALLQTLGDLGYRASAKKAQICQKQVKYLGYLLREGQRWLTEARKETVMGQPVPKTPRQLREFLGKAGFCRLFIPGFAEMAAPLYPLTKPGTLFSWGPDQQKAYQEIKQALLTAPALGLPDLTKPFELFVDEKQGYAKGVLTQKLGPWRRPVAYLSKKLDPVAAGWPPCLRMVAAIAVLTKDAGKLTMGQPLVILAPHAVEALVKQPPDRWLSNARMTHYQAMLLDTDRVQFGPVVALNPATLLPLPEEGAPHDCLEILAETHGTRPDLTDQPIPDADHTWYTDGSSFLQEGQRKAGAAVTTETEVIWAGALPAGTSAQRAELIALTQALKMAEGKRLNVYTDSRYAFATAHIHGEIYRRRGWLTSEGREIKNKSEILALLKALFLPKRLSIIHCLGHQKGDSAEARGNRLADQAAREAAIKTPPDTSTLLIAGKRTADGSEFEKRTADGSEFESPKKKAKVE

SEQ ID NO: 2104 - protein, 2093 aa, synthetic construct
MPAAKRVKLDGGDKKYSIGLDIGTNSVGWAVITDEYKVPSKKFKVLGNTDRHSIKKNLIGALLFDSGETAEATRLKRTARRRYTRRKNRICYLQEIFSNEMAKVDDSFFHRLEESFLVEEDKKHERHPIFGNIVDEVAYHEKYPTIYHLRKKLVDSTDKADLRLIYLALAHMIKFRGHFLIEGDLNPDNSDVDKLFIQLVQTYNQLFEENPINASGVDAKAILSARLSKSRRLENLIAQLPGEKKNGLFGNLIALSLGLTPNFKSNFDLAEDAKLQLSKDTYDDDLDNLLAQIGDQYADLFLAAKNLSDAILLSDILRVNTEITKAPLSASMIKRYDEHHQDLTLLKALVRQQLPEKYKEIFFDQSKNGYAGYIDGGASQEEFYKFIKPILEKMDGTEELLVKLNREDLLRKQRTFDNGSIPHQIHLGELHAILRRQEDFYPFLKDNREKIEKILTFRIPYYVGPLARGNSRFAWMTRKSEETITPWNFEEVVDKGASAQSFIERMTNFDKNLPNEKVLPKHSLLYEYFTVYNELTKVKYVTEGMRKPAFLSGEQKKAIVDLLFKTNRKVTVKQLKEDYFKKIECFDSVEISGVEDRFNASLGTYHDLLKIIKDKDFLDNEENEDILEDIVLTLTLFEDREMIEERLKTYAHLFDDKVMKQLKRRRYTGWGRLSRKLINGIRDKQSGKTILDFLKSDGFANRNFMQLIHDDSLTFKEDIQKAQVSGQGDSLHEHIANLAGSPAIKKGILQTVKVVDELVKVMGRHKPENIVIEMARENQTTQKGQKNSRERMKRIEEGIKELGSQILKEHPVENTQLQNEKLYLYYLQNGRDMYVDQELDINRLSDYDVDHIVPQSFLKDDSIDNKVLTRSDKARGKSDNVPSEEVVKKMKNYWRQLLNAKLITQRKFDNLTKAERGGLSELDKAGFIKRQLVETRQITKHVAQILDSRMNTKYDENDKLIREVKVITLKSKLVSDFRKDFQFYKVREINNYHHAHDAYLNAVVGTALIKKYPKLESEFVYGDYKVYDVRKMIAKSEQEIGKATAKYFFYSNIMNFFKTEITLANGEIRKRPLIETNGETGEIVWDKGRDFATVRKVLSMPQVNIVKKTEVQTGGFSKESILPKRNSDKLIARKKDWDPKKYGGFDSPTVAYSVLVVAKVEKGKSKKLKSVKELLGITIMERSSFEKNPIDFLEAKGYKEVKKDLIIKLPKYSLFELENGRKRMLASAGELQKGNELALPSKYVNFLYLASHYEKLKGSPEDNEQKQLFVEQHKHYLDEIIEQISEFSKRVILADANLDKVLSAYNKHRDKPIREQAENIIHLFTLTNLGAPAAFKYFDTTIDRKRYTSTKEVLDATLIHQSITGLYETRIDLSQLGGDGGEAAAKGGSGGLGIEDEYRLHETSTEPDVSLGSTWLSDFPQAWAETGGMGLAVRQAPLIIPLKATSTPVSIQQYPMSHEARLGIKPHIQRLLDQGILVPCQSPWNTPLLPVKKPGTNDYRPVQDLREVNKRVEDIHPTVPNPYNLLSGLPPSHQWYTVLDLKDAFFCLRLHPTSQPLFAFEWRDPGMGISGQLTWTRLPQGFKNSPTLFNEALHRDLADFRIQHPDLILLQYVDDILLAATSELDCQQGTRALLQTLGDLGYRASAKKAQICQKQVKYLGYLLREGQRWLTEARKETVMGQPVPKTPRQLREFLGKAGFCRLFIPGFAEMAAPLYPLTKPGTLFSWGPDQQKAYQEIKQALLTAPALGLPDLTKPFELFVDEKQGYAKGVLTQKLGPWRRPVAYLSKKLDPVAAGWPPCLRMVAAIAVLTKDAGKLTMGQPLVILAPHAVEALVKQPPDRWLSNARMTHYQAMLLDTDRVQFGPVVALNPATLLPLPEEGAPHDCLEILAETHGTRPDLTDQPIPDADHTWYTDGSSFLQEGQRKAGAAVTTETEVIWAGALPAGTSAQRAELIALTQALKMAEGKRLNVYTDSRYAFATAHIHGEIYRRRGWLTSEGREIKNKSEILALLKALFLPKRLSIIHCLGHQKGDSAEARGNRLADQAAREAAIKTPPDTSTLLIAGKRTADGSEFEKRTADGSEFESPKKKAKVE

SEQ ID NO: 2105 - protein, 2093 aa, synthetic construct
MPAAKRVKLDGGDKKYSIGLDIGTNSVGWAVITDEYKVPSKKFKVLGNTDRHSIKKNLIGALLFDSGETAEATRLKRTARRRYTRRKNRICYLQEIFSNEMAKVDDSFFHRLEESFLVEEDKKHERHPIFGNIVDEVAYHEKYPTIYHLRKKLVDSTDKADLRLIYLALAHMIKFRGHFLIEGDLNPDNSDVDKLFIQLVQTYNQLFEENPINASGVDAKAILSARLSKSRRLENLIAQLPGEKKNGLFGNLIALSLGLTPNFKSNFDLAEDAKLQLSKDTYDDDLDNLLAQIGDQYADLFLAAKNLSDAILLSDILRVNTEITKAPLSASMIKRYDEHHQDLTLLKALVRQQLPEKYKEIFFDQSKNGYAGYIDGGASQEEFYKFIKPILEKMDGTEELLVKLNREDLLRKQRTFDNGSIPHQIHLGELHAILRRQEDFYPFLKDNREKIEKILTFRIPYYVGPLARGNSRFAWMTRKSEETITPWNFEEVVDKGASAQSFIERMTNFDKNLPNEKVLPKHSLLYEYFTVYNELTKVKYVTEGMRKPAFLSGEQKKAIVDLLFKTNRKVTVKQLKEDYFKKIECFDSVEISGVEDRFNASLGTYHDLLKIIKDKDFLDNEENEDILEDIVLTLTLFEDREMIEERLKTYAHLFDDKVMKQLKRRRYTGWGRLSRKLINGIRDKQSGKTILDFLKSDGFANRNFMQLIHDDSLTFKEDIQKAQVSGQGDSLHEHIANLAGSPAIKKGILQTVKVVDELVKVMGRHKPENIVIEMARENQTTQKGQKNSRERMKRIEEGIKELGSQILKEHPVENTQLQNEKLYLYYLQNGRDMYVDQELDINRLSDYDVDHIVPQSFLKDDSIDNKVLTRSDKARGKSDNVPSEEVVKKMKNYWRQLLNAKLITQRKFDNLTKAERGGLSELDKAGFIKRQLVETRQITKHVAQILDSRMNTKYDENDKLIREVKVITLKSKLVSDFRKDFQFYKVREINNYHHAHDAYLNAVVGTALIKKYPKLESEFVYGDYKVYDVRKMIAKSEQEIGKATAKYFFYSNIMNFFKTEITLANGEIRKRPLIETNGETGEIVWDKGRDFATVRKVLSMPQVNIVKKTEVQTGGFSKESILPKRNSDKLIARKKDWDPKKYGGFDSPTVAYSVLVVAKVEKGKSKKLKSVKELLGITIMERSSFEKNPIDFLEAKGYKEVKKDLIIKLPKYSLFELENGRKRMLASAGELQKGNELALPSKYVNFLYLASHYEKLKGSPEDNEQKQLFVEQHKHYLDEIIEQISEFSKRVILADANLDKVLSAYNKHRDKPIREQAENIIHLFTLTNLGAPAAFKYFDTTIDRKRYTSTKEVLDATLIHQSITGLYETRIDLSQLGGDGGGGSEAAAKGGLGIEDEYRLHETSTEPDVSLGSTWLSDFPQAWAETGGMGLAVRQAPLIIPLKATSTPVSIQQYPMSHEARLGIKPHIQRLLDQGILVPCQSPWNTPLLPVKKPGTNDYRPVQDLREVNKRVEDIHPTVPNPYNLLSGLPPSHQWYTVLDLKDAFFCLRLHPTSQPLFAFEWRDPGMGISGQLTWTRLPQGFKNSPTLFNEALHRDLADFRIQHPDLILLQYVDDILLAATSELDCQQGTRALLQTLGDLGYRASAKKAQICQKQVKYLGYLLREGQRWLTEARKETVMGQPVPKTPRQLREFLGKAGFCRLFIPGFAEMAAPLYPLTKPGTLFSWGPDQQKAYQEIKQALLTAPALGLPDLTKPFELFVDEKQGYAKGVLTQKLGPWRRPVAYLSKKLDPVAAGWPPCLRMVAAIAVLTKDAGKLTMGQPLVILAPHAVEALVKQPPDRWLSNARMTHYQAMLLDTDRVQFGPVVALNPATLLPLPEEGAPHDCLEILAETHGTRPDLTDQPIPDADHTWYTDGSSFLQEGQRKAGAAVTTETEVIWAGALPAGTSAQRAELIALTQALKMAEGKRLNVYTDSRYAFATAHIHGEIYRRRGWLTSEGREIKNKSEILALLKALFLPKRLSIIHCLGHQKGDSAEARGNRLADQAAREAAIKTPPDTSTLLIAGKRTADGSEFEKRTADGSEFESPKKKAKVE

SEQ ID NO: 2106 - protein, 2100 aa, synthetic construct
MPAAKRVKLDGGDKKYSIGLDIGTNSVGWAVITDEYKVPSKKFKVLGNTDRHSIKKNLIGALLFDSGETAEATRLKRTARRRYTRRKNRICYLQEIFSNEMAKVDDSFFHRLEESFLVEEDKKHERHPIFGNIVDEVAYHEKYPTIYHLRKKLVDSTDKADLRLIYLALAHMIKFRGHFLIEGDLNPDNSDVDKLFIQLVQTYNQLFEENPINASGVDAKAILSARLSKSRRLENLIAQLPGEKKNGLFGNLIALSLGLTPNFKSNFDLAEDAKLQLSKDTYDDDLDNLLAQIGDQYADLFLAAKNLSDAILLSDILRVNTEITKAPLSASMIKRYDEHHQDLTLLKALVRQQLPEKYKEIFFDQSKNGYAGYIDGGASQEEFYKFIKPILEKMDGTEELLVKLNREDLLRKQRTFDNGSIPHQIHLGELHAILRRQEDFYPFLKDNREKIEKILTFRIPYYVGPLARGNSRFAWMTRKSEETITPWNFEEVVDKGASAQSFIERMTNFDKNLPNEKVLPKHSLLYEYFTVYNELTKVKYVTEGMRKPAFLSGEQKKAIVDLLFKTNRKVTVKQLKEDYFKKIECFDSVEISGVEDRFNASLGTYHDLLKIIKDKDFLDNEENEDILEDIVLTLTLFEDREMIEERLKTYAHLFDDKVMKQLKRRRYTGWGRLSRKLINGIRDKQSGKTILDFLKSDGFANRNFMQLIHDDSLTFKEDIQKAQVSGQGDSLHEHIANLAGSPAIKKGILQTVKVVDELVKVMGRHKPENIVIEMARENQTTQKGQKNSRERMKRIEEGIKELGSQILKEHPVENTQLQNEKLYLYYLQNGRDMYVDQELDINRLSDYDVDHIVPQSFLKDDSIDNKVLTRSDKARGKSDNVPSEEVVKKMKNYWRQLLNAKLITQRKFDNLTKAERGGLSELDKAGFIKRQLVETRQITKHVAQILDSRMNTKYDENDKLIREVKVITLKSKLVSDFRKDFQFYKVREINNYHHAHDAYLNAVVGTALIKKYPKLESEFVYGDYKVYDVRKMIAKSEQEIGKATAKYFFYSNIMNFFKTEITLANGEIRKRPLIETNGETGEIVWDKGRDFATVRKVLSMPQVNIVKKTEVQTGGFSKESILPKRNSDKLIARKKDWDPKKYGGFDSPTVAYSVLVVAKVEKGKSKKLKSVKELLGITIMERSSFEKNPIDFLEAKGYKEVKKDLIIKLPKYSLFELENGRKRMLASAGELQKGNELALPSKYVNFLYLASHYEKLKGSPEDNEQKQLFVEQHKHYLDEIIEQISEFSKRVILADANLDKVLSAYNKHRDKPIREQAENIIHLFTLTNLGAPAAFKYFDTTIDRKRYTSTKEVLDATLIHQSITGLYETRIDLSQLGGDGGGGGGSEAAAKGGGGSGGLGIEDEYRLHETSTEPDVSLGSTWLSDFPQAWAETGGMGLAVRQAPLIIPLKATSTPVSIQQYPMSHEARLGIKPHIQRLLDQGILVPCQSPWNTPLLPVKKPGTNDYRPVQDLREVNKRVEDIHPTVPNPYNLLSGLPPSHQWYTVLDLKDAFFCLRLHPTSQPLFAFEWRDPGMGISGQLTWTRLPQGFKNSPTLFNEALHRDLADFRIQHPDLILLQYVDDILLAATSELDCQQGTRALLQTLGDLGYRASAKKAQICQKQVKYLGYLLREGQRWLTEARKETVMGQPVPKTPRQLREFLGKAGFCRLFIPGFAEMAAPLYPLTKPGTLFSWGPDQQKAYQEIKQALLTAPALGLPDLTKPFELFVDEKQGYAKGVLTQKLGPWRRPVAYLSKKLDPVAAGWPPCLRMVAAIAVLTKDAGKLTMGQPLVILAPHAVEALVKQPPDRWLSNARMTHYQAMLLDTDRVQFGPVVALNPATLLPLPEEGAPHDCLEILAETHGTRPDLTDQPIPDADHTWYTDGSSFLQEGQRKAGAAVTTETEVIWAGALPAGTSAQRAELIALTQALKMAEGKRLNVYTDSRYAFATAHIHGEIYRRRGWLTSEGREIKNKSEILALLKALFLPKRLSIIHCLGHQKGDSAEARGNRLADQAAREAAIKTPPDTSTLLIAGKRTADGSEFEKRTADGSEFESPKKKAKVE

SEQ ID NO: 2107 - protein, 2094 aa, synthetic construct
MPAAKRVKLDGGDKKYSIGLDIGTNSVGWAVITDEYKVPSKKFKVLGNTDRHSIKKNLIGALLFDSGETAEATRLKRTARRRYTRRKNRICYLQEIFSNEMAKVDDSFFHRLEESFLVEEDKKHERHPIFGNIVDEVAYHEKYPTIYHLRKKLVDSTDKADLRLIYLALAHMIKFRGHFLIEGDLNPDNSDVDKLFIQLVQTYNQLFEENPINASGVDAKAILSARLSKSRRLENLIAQLPGEKKNGLFGNLIALSLGLTPNFKSNFDLAEDAKLQLSKDTYDDDLDNLLAQIGDQYADLFLAAKNLSDAILLSDILRVNTEITKAPLSASMIKRYDEHHQDLTLLKALVRQQLPEKYKEIFFDQSKNGYAGYIDGGASQEEFYKFIKPILEKMDGTEELLVKLNREDLLRKQRTFDNGSIPHQIHLGELHAILRRQEDFYPFLKDNREKIEKILTFRIPYYVGPLARGNSRFAWMTRKSEETITPWNFEEVVDKGASAQSFIERMTNFDKNLPNEKVLPKHSLLYEYFTVYNELTKVKYVTEGMRKPAFLSGEQKKAIVDLLFKTNRKVTVKQLKEDYFKKIECFDSVEISGVEDRFNASLGTYHDLLKIIKDKDFLDNEENEDILEDIVLTLTLFEDREMIEERLKTYAHLFDDKVMKQLKRRRYTGWGRLSRKLINGIRDKQSGKTILDFLKSDGFANRNFMQLIHDDSLTFKEDIQKAQVSGQGDSLHEHIANLAGSPAIKKGILQTVKVVDELVKVMGRHKPENIVIEMARENQTTQKGQKNSRERMKRIEEGIKELGSQILKEHPVENTQLQNEKLYLYYLQNGRDMYVDQELDINRLSDYDVDHIVPQSFLKDDSIDNKVLTRSDKARGKSDNVPSEEVVKKMKNYWRQLLNAKLITQRKFDNLTKAERGGLSELDKAGFIKRQLVETRQITKHVAQILDSRMNTKYDENDKLIREVKVITLKSKLVSDFRKDFQFYKVREINNYHHAHDAYLNAVVGTALIKKYPKLESEFVYGDYKVYDVRKMIAKSEQEIGKATAKYFFYSNIMNFFKTEITLANGEIRKRPLIETNGETGEIVWDKGRDFATVRKVLSMPQVNIVKKTEVQTGGFSKESILPKRNSDKLIARKKDWDPKKYGGFDSPTVAYSVLVVAKVEKGKSKKLKSVKELLGITIMERSSFEKNPIDFLEAKGYKEVKKDLIIKLPKYSLFELENGRKRMLASAGELQKGNELALPSKYVNFLYLASHYEKLKGSPEDNEQKQLFVEQHKHYLDEIIEQISEFSKRVILADANLDKVLSAYNKHRDKPIREQAENIIHLFTLTNLGAPAAFKYFDTTIDRKRYTSTKEVLDATLIHQSITGLYETRIDLSQLGGDGGGGGGSSGGSGGLGIEDEYRLHETSTEPDVSLGSTWLSDFPQAWAETGGMGLAVRQAPLIIPLKATSTPVSIQQYPMSHEARLGIKPHIQRLLDQGILVPCQSPWNTPLLPVKKPGTNDYRPVQDLREVNKRVEDIHPTVPNPYNLLSGLPPSHQWYTVLDLKDAFFCLRLHPTSQPLFAFEWRDPGMGISGQLTWTRLPQGFKNSPTLFNEALHRDLADFRIQHPDLILLQYVDDILLAATSELDCQQGTRALLQTLGDLGYRASAKKAQICQKQVKYLGYLLREGQRWLTEARKETVMGQPVPKTPRQLREFLGKAGFCRLFIPGFAEMAAPLYPLTKPGTLFSWGPDQQKAYQEIKQALLTAPALGLPDLTKPFELFVDEKQGYAKGVLTQKLGPWRRPVAYLSKKLDPVAAGWPPCLRMVAAIAVLTKDAGKLTMGQPLVILAPHAVEALVKQPPDRWLSNARMTHYQAMLLDTDRVQFGPVVALNPATLLPLPEEGAPHDCLEILAETHGTRPDLTDQPIPDADHTWYTDGSSFLQEGQRKAGAAVTTETEVIWAGALPAGTSAQRAELIALTQALKMAEGKRLNVYTDSRYAFATAHIHGEIYRRRGWLTSEGREIKNKSEILALLKALFLPKRLSIIHCLGHQKGDSAEARGNRLADQAAREAAIKTPPDTSTLLIAGKRTADGSEFEKRTADGSEFESPKKKAKVE

SEQ ID NO: 2108 - protein, 2096 aa, synthetic construct
MPAAKRVKLDGGDKKYSIGLDIGTNSVGWAVITDEYKVPSKKFKVLGNTDRHSIKKNLIGALLFDSGETAEATRLKRTARRRYTRRKNRICYLQEIFSNEMAKVDDSFFHRLEESFLVEEDKKHERHPIFGNIVDEVAYHEKYPTIYHLRKKLVDSTDKADLRLIYLALAHMIKFRGHFLIEGDLNPDNSDVDKLFIQLVQTYNQLFEENPINASGVDAKAILSARLSKSRRLENLIAQLPGEKKNGLFGNLIALSLGLTPNFKSNFDLAEDAKLQLSKDTYDDDLDNLLAQIGDQYADLFLAAKNLSDAILLSDILRVNTEITKAPLSASMIKRYDEHHQDLTLLKALVRQQLPEKYKEIFFDQSKNGYAGYIDGGASQEEFYKFIKPILEKMDGTEELLVKLNREDLLRKQRTFDNGSIPHQIHLGELHAILRRQEDFYPFLKDNREKIEKILTFRIPYYVGPLARGNSRFAWMTRKSEETITPWNFEEVVDKGASAQSFIERMTNFDKNLPNEKVLPKHSLLYEYFTVYNELTKVKYVTEGMRKPAFLSGEQKKAIVDLLFKTNRKVTVKQLKEDYFKKIECFDSVEISGVEDRFNASLGTYHDLLKIIKDKDFLDNEENEDILEDIVLTLTLFEDREMIEERLKTYAHLFDDKVMKQLKRRRYTGWGRLSRKLINGIRDKQSGKTILDFLKSDGFANRNFMQLIHDDSLTFKEDIQKAQVSGQGDSLHEHIANLAGSPAIKKGILQTVKVVDELVKVMGRHKPENIVIEMARENQTTQKGQKNSRERMKRIEEGIKELGSQILKEHPVENTQLQNEKLYLYYLQNGRDMYVDQELDINRLSDYDVDHIVPQSFLKDDSIDNKVLTRSDKARGKSDNVPSEEVVKKMKNYWRQLLNAKLITQRKFDNLTKAERGGLSELDKAGFIKRQLVETRQITKHVAQILDSRMNTKYDENDKLIREVKVITLKSKLVSDFRKDFQFYKVREINNYHHAHDAYLNAVVGTALIKKYPKLESEFVYGDYKVYDVRKMIAKSEQEIGKATAKYFFYSNIMNFFKTEITLANGEIRKRPLIETNGETGEIVWDKGRDFATVRKVLSMPQVNIVKKTEVQTGGFSKESILPKRNSDKLIARKKDWDPKKYGGFDSPTVAYSVLVVAKVEKGKSKKLKSVKELLGITIMERSSFEKNPIDFLEAKGYKEVKKDLIIKLPKYSLFELENGRKRMLASAGELQKGNELALPSKYVNFLYLASHYEKLKGSPEDNEQKQLFVEQHKHYLDEIIEQISEFSKRVILADANLDKVLSAYNKHRDKPIREQAENIIHLFTLTNLGAPAAFKYFDTTIDRKRYTSTKEVLDATLIHQSITGLYETRIDLSQLGGDGGGSSGGGEAAAKGGLGIEDEYRLHETSTEPDVSLGSTWLSDFPQAWAETGGMGLAVRQAPLIIPLKATSTPVSIQQYPMSHEARLGIKPHIQRLLDQGILVPCQSPWNTPLLPVKKPGTNDYRPVQDLREVNKRVEDIHPTVPNPYNLLSGLPPSHQWYTVLDLKDAFFCLRLHPTSQPLFAFEWRDPGMGISGQLTWTRLPQGFKNSPTLFNEALHRDLADFRIQHPDLILLQYVDDILLAATSELDCQQGTRALLQTLGDLGYRASAKKAQICQKQVKYLGYLLREGQRWLTEARKETVMGQPVPKTPRQLREFLGKAGFCRLFIPGFAEMAAPLYPLTKPGTLFSWGPDQQKAYQEIKQALLTAPALGLPDLTKPFELFVDEKQGYAKGVLTQKLGPWRRPVAYLSKKLDPVAAGWPPCLRMVAAIAVLTKDAGKLTMGQPLVILAPHAVEALVKQPPDRWLSNARMTHYQAMLLDTDRVQFGPVVALNPATLLPLPEEGAPHDCLEILAETHGTRPDLTDQPIPDADHTWYTDGSSFLQEGQRKAGAAVTTETEVIWAGALPAGTSAQRAELIALTQALKMAEGKRLNVYTDSRYAFATAHIHGEIYRRRGWLTSEGREIKNKSEILALLKALFLPKRLSIIHCLGHQKGDSAEARGNRLADQAAREAAIKTPPDTSTLLIAGKRTADGSEFEKRTADGSEFESPKKKAKVE

SEQ ID NO: 2109 - protein, 2096 aa, synthetic construct
MPAAKRVKLDGGDKKYSIGLDIGTNSVGWAVITDEYKVPSKKFKVLGNTDRHSIKKNLIGALLFDSGETAEATRLKRTARRRYTRRKNRICYLQEIFSNEMAKVDDSFFHRLEESFLVEEDKKHERHPIFGNIVDEVAYHEKYPTIYHLRKKLVDSTDKADLRLIYLALAHMIKFRGHFLIEGDLNPDNSDVDKLFIQLVQTYNQLFEENPINASGVDAKAILSARLSKSRRLENLIAQLPGEKKNGLFGNLIALSLGLTPNFKSNFDLAEDAKLQLSKDTYDDDLDNLLAQIGDQYADLFLAAKNLSDAILLSDILRVNTEITKAPLSASMIKRYDEHHQDLTLLKALVRQQLPEKYKEIFFDQSKNGYAGYIDGGASQEEFYKFIKPILEKMDGTEELLVKLNREDLLRKQRTFDNGSIPHQIHLGELHAILRRQEDFYPFLKDNREKIEKILTFRIPYYVGPLARGNSRFAWMTRKSEETITPWNFEEVVDKGASAQSFIERMTNFDKNLPNEKVLPKHSLLYEYFTVYNELTKVKYVTEGMRKPAFLSGEQKKAIVDLLFKTNRKVTVKQLKEDYFKKIECFDSVEISGVEDRFNASLGTYHDLLKIIKDKDFLDNEENEDILEDIVLTLTLFEDREMIEERLKTYAHLFDDKVMKQLKRRRYTGWGRLSRKLINGIRDKQSGKTILDFLKSDGFANRNFMQLIHDDSLTFKEDIQKAQVSGQGDSLHEHIANLAGSPAIKKGILQTVKVVDELVKVMGRHKPENIVIEMARENQTTQKGQKNSRERMKRIEEGIKELGSQILKEHPVENTQLQNEKLYLYYLQNGRDMYVDQELDINRLSDYDVDHIVPQSFLKDDSIDNKVLTRSDKARGKSDNVPSEEVVKKMKNYWRQLLNAKLITQRKFDNLTKAERGGLSELDKAGFIKRQLVETRQITKHVAQILDSRMNTKYDENDKLIREVKVITLKSKLVSDFRKDFQFYKVREINNYHHAHDAYLNAVVGTALIKKYPKLESEFVYGDYKVYDVRKMIAKSEQEIGKATAKYFFYSNIMNFFKTEITLANGEIRKRPLIETNGETGEIVWDKGRDFATVRKVLSMPQVNIVKKTEVQTGGFSKESILPKRNSDKLIARKKDWDPKKYGGFDSPTVAYSVLVVAKVEKGKSKKLKSVKELLGITIMERSSFEKNPIDFLEAKGYKEVKKDLIIKLPKYSLFELENGRKRMLASAGELQKGNELALPSKYVNFLYLASHYEKLKGSPEDNEQKQLFVEQHKHYLDEIIEQISEFSKRVILADANLDKVLSAYNKHRDKPIREQAENIIHLFTLTNLGAPAAFKYFDTTIDRKRYTSTKEVLDATLIHQSITGLYETRIDLSQLGGDGGGSSEAAAKPAPGGLGIEDEYRLHETSTEPDVSLGSTWLSDFPQAWAETGGMGLAVRQAPLIIPLKATSTPVSIQQYPMSHEARLGIKPHIQRLLDQGILVPCQSPWNTPLLPVKKPGTNDYRPVQDLREVNKRVEDIHPTVPNPYNLLSGLPPSHQWYTVLDLKDAFFCLRLHPTSQPLFAFEWRDPGMGISGQLTWTRLPQGFKNSPTLFNEALHRDLADFRIQHPDLILLQYVDDILLAATSELDCQQGTRALLQTLGDLGYRASAKKAQICQKQVKYLGYLLREGQRWLTEARKETVMGQPVPKTPRQLREFLGKAGFCRLFIPGFAEMAAPLYPLTKPGTLFSWGPDQQKAYQEIKQALLTAPALGLPDLTKPFELFVDEKQGYAKGVLTQKLGPWRRPVAYLSKKLDPVAAGWPPCLRMVAAIAVLTKDAGKLTMGQPLVILAPHAVEALVKQPPDRWLSNARMTHYQAMLLDTDRVQFGPVVALNPATLLPLPEEGAPHDCLEILAETHGTRPDLTDQPIPDADHTWYTDGSSFLQEGQRKAGAAVTTETEVIWAGALPAGTSAQRAELIALTQALKMAEGKRLNVYTDSRYAFATAHIHGEIYRRRGWLTSEGREIKNKSEILALLKALFLPKRLSIIHCLGHQKGDSAEARGNRLADQAAREAAIKTPPDTSTLLIAGKRTADGSEFEKRTADGSEFESPKKKAKVE

SEQ ID NO: 2110 - protein, 2092 aa, synthetic construct
MPAAKRVKLDGGDKKYSIGLDIGTNSVGWAVITDEYKVPSKKFKVLGNTDRHSIKKNLIGALLFDSGETAEATRLKRTARRRYTRRKNRICYLQEIFSNEMAKVDDSFFHRLEESFLVEEDKKHERHPIFGNIVDEVAYHEKYPTIYHLRKKLVDSTDKADLRLIYLALAHMIKFRGHFLIEGDLNPDNSDVDKLFIQLVQTYNQLFEENPINASGVDAKAILSARLSKSRRLENLIAQLPGEKKNGLFGNLIALSLGLTPNFKSNFDLAEDAKLQLSKDTYDDDLDNLLAQIGDQYADLFLAAKNLSDAILLSDILRVNTEITKAPLSASMIKRYDEHHQDLTLLKALVRQQLPEKYKEIFFDQSKNGYAGYIDGGASQEEFYKFIKPILEKMDGTEELLVKLNREDLLRKQRTFDNGSIPHQIHLGELHAILRRQEDFYPFLKDNREKIEKILTFRIPYYVGPLARGNSRFAWMTRKSEETITPWNFEEVVDKGASAQSFIERMTNFDKNLPNEKVLPKHSLLYEYFTVYNELTKVKYVTEGMRKPAFLSGEQKKAIVDLLFKTNRKVTVKQLKEDYFKKIECFDSVEISGVEDRFNASLGTYHDLLKIIKDKDFLDNEENEDILEDIVLTLTLFEDREMIEERLKTYAHLFDDKVMKQLKRRRYTGWGRLSRKLINGIRDKQSGKTILDFLKSDGFANRNFMQLIHDDSLTFKEDIQKAQVSGQGDSLHEHIANLAGSPAIKKGILQTVKVVDELVKVMGRHKPENIVIEMARENQTTQKGQKNSRERMKRIEEGIKELGSQILKEHPVENTQLQNEKLYLYYLQNGRDMYVDQELDINRLSDYDVDHIVPQSFLKDDSIDNKVLTRSDKARGKSDNVPSEEVVKKMKNYWRQLLNAKLITQRKFDNLTKAERGGLSELDKAGFIKRQLVETRQITKHVAQILDSRMNTKYDENDKLIREVKVITLKSKLVSDFRKDFQFYKVREINNYHHAHDAYLNAVVGTALIKKYPKLESEFVYGDYKVYDVRKMIAKSEQEIGKATAKYFFYSNIMNFFKTEITLANGEIRKRPLIETNGETGEIVWDKGRDFATVRKVLSMPQVNIVKKTEVQTGGFSKESILPKRNSDKLIARKKDWDPKKYGGFDSPTVAYSVLVVAKVEKGKSKKLKSVKELLGITIMERSSFEKNPIDFLEAKGYKEVKKDLIIKLPKYSLFELENGRKRMLASAGELQKGNELALPSKYVNFLYLASHYEKLKGSPEDNEQKQLFVEQHKHYLDEIIEQISEFSKRVILADANLDKVLSAYNKHRDKPIREQAENIIHLFTLTNLGAPAAFKYFDTTIDRKRYTSTKEVLDATLIHQSITGLYETRIDLSQLGGDGGGGGGGGGGGLGIEDEYRLHETSTEPDVSLGSTWLSDFPQAWAETGGMGLAVRQAPLIIPLKATSTPVSIQQYPMSHEARLGIKPHIQRLLDQGILVPCQSPWNTPLLPVKKPGTNDYRPVQDLREVNKRVEDIHPTVPNPYNLLSGLPPSHQWYTVLDLKDAFFCLRLHPTSQPLFAFEWRDPGMGISGQLTWTRLPQGFKNSPTLFNEALHRDLADFRIQHPDLILLQYVDDILLAATSELDCQQGTRALLQTLGDLGYRASAKKAQICQKQVKYLGYLLREGQRWLTEARKETVMGQPVPKTPRQLREFLGKAGFCRLFIPGFAEMAAPLYPLTKPGTLFSWGPDQQKAYQEIKQALLTAPALGLPDLTKPFELFVDEKQGYAKGVLTQKLGPWRRPVAYLSKKLDPVAAGWPPCLRMVAAIAVLTKDAGKLTMGQPLVILAPHAVEALVKQPPDRWLSNARMTHYQAMLLDTDRVQFGPVVALNPATLLPLPEEGAPHDCLEILAETHGTRPDLTDQPIPDADHTWYTDGSSFLQEGQRKAGAAVTTETEVIWAGALPAGTSAQRAELIALTQALKMAEGKRLNVYTDSRYAFATAHIHGEIYRRRGWLTSEGREIKNKSEILALLKALFLPKRLSIIHCLGHQKGDSAEARGNRLADQAAREAAIKTPPDTSTLLIAGKRTADGSEFEKRTADGSEFESPKKKAKVE

SEQ ID NO: 2111 - protein, 2091 aa, synthetic construct
MPAAKRVKLDGGDKKYSIGLDIGTNSVGWAVITDEYKVPSKKFKVLGNTDRHSIKKNLIGALLFDSGETAEATRLKRTARRRYTRRKNRICYLQEIFSNEMAKVDDSFFHRLEESFLVEEDKKHERHPIFGNIVDEVAYHEKYPTIYHLRKKLVDSTDKADLRLIYLALAHMIKFRGHFLIEGDLNPDNSDVDKLFIQLVQTYNQLFEENPINASGVDAKAILSARLSKSRRLENLIAQLPGEKKNGLFGNLIALSLGLTPNFKSNFDLAEDAKLQLSKDTYDDDLDNLLAQIGDQYADLFLAAKNLSDAILLSDILRVNTEITKAPLSASMIKRYDEHHQDLTLLKALVRQQLPEKYKEIFFDQSKNGYAGYIDGGASQEEFYKFIKPILEKMDGTEELLVKLNREDLLRKQRTFDNGSIPHQIHLGELHAILRRQEDFYPFLKDNREKIEKILTFRIPYYVGPLARGNSRFAWMTRKSEETITPWNFEEVVDKGASAQSFIERMTNFDKNLPNEKVLPKHSLLYEYFTVYNELTKVKYVTEGMRKPAFLSGEQKKAIVDLLFKTNRKVTVKQLKEDYFKKIECFDSVEISGVEDRFNASLGTYHDLLKIIKDKDFLDNEENEDILEDIVLTLTLFEDREMIEERLKTYAHLFDDKVMKQLKRRRYTGWGRLSRKLINGIRDKQSGKTILDFLKSDGFANRNFMQLIHDDSLTFKEDIQKAQVSGQGDSLHEHIANLAGSPAIKKGILQTVKVVDELVKVMGRHKPENIVIEMARENQTTQKGQKNSRERMKRIEEGIKELGSQILKEHPVENTQLQNEKLYLYYLQNGRDMYVDQELDINRLSDYDVDHIVPQSFLKDDSIDNKVLTRSDKARGKSDNVPSEEVVKKMKNYWRQLLNAKLITQRKFDNLTKAERGGLSELDKAGFIKRQLVETRQITKHVAQILDSRMNTKYDENDKLIREVKVITLKSKLVSDFRKDFQFYKVREINNYHHAHDAYLNAVVGTALIKKYPKLESEFVYGDYKVYDVRKMIAKSEQEIGKATAKYFFYSNIMNFFKTEITLANGEIRKRPLIETNGETGEIVWDKGRDFATVRKVLSMPQVNIVKKTEVQTGGFSKESILPKRNSDKLIARKKDWDPKKYGGFDSPTVAYSVLVVAKVEKGKSKKLKSVKELLGITIMERSSFEKNPIDFLEAKGYKEVKKDLIIKLPKYSLFELENGRKRMLASAGELQKGNELALPSKYVNFLYLASHYEKLKGSPEDNEQKQLFVEQHKHYLDEIIEQISEFSKRVILADANLDKVLSAYNKHRDKPIREQAENIIHLFTLTNLGAPAAFKYFDTTIDRKRYTSTKEVLDATLIHQSITGLYETRIDLSQLGGDGGGGGGGGGGLGIEDEYRLHETSTEPDVSLGSTWLSDFPQAWAETGGMGLAVRQAPLIIPLKATSTPVSIQQYPMSHEARLGIKPHIQRLLDQGILVPCQSPWNTPLLPVKKPGTNDYRPVQDLREVNKRVEDIHPTVPNPYNLLSGLPPSHQWYTVLDLKDAFFCLRLHPTSQPLFAFEWRDPGMGISGQLTWTRLPQGFKNSPTLFNEALHRDLADFRIQHPDLILLQYVDDILLAATSELDCQQGTRALLQTLGDLGYRASAKKAQICQKQVKYLGYLLREGQRWLTEARKETVMGQPVPKTPRQLREFLGKAGFCRLFIPGFAEMAAPLYPLTKPGTLFSWGPDQQKAYQEIKQALLTAPALGLPDLTKPFELFVDEKQGYAKGVLTQKLGPWRRPVAYLSKKLDPVAAGWPPCLRMVAAIAVLTKDAGKLTMGQPLVILAPHAVEALVKQPPDRWLSNARMTHYQAMLLDTDRVQFGPVVALNPATLLPLPEEGAPHDCLEILAETHGTRPDLTDQPIPDADHTWYTDGSSFLQEGQRKAGAAVTTETEVIWAGALPAGTSAQRAELIALTQALKMAEGKRLNVYTDSRYAFATAHIHGEIYRRRGWLTSEGREIKNKSEILALLKALFLPKRLSIIHCLGHQKGDSAEARGNRLADQAAREAAIKTPPDTSTLLIAGKRTADGSEFEKRTADGSEFESPKKKAKVE

SEQ ID NO: 2112 - protein, 2096 aa, synthetic construct
MPAAKRVKLDGGDKKYSIGLDIGTNSVGWAVITDEYKVPSKKFKVLGNTDRHSIKKNLIGALLFDSGETAEATRLKRTARRRYTRRKNRICYLQEIFSNEMAKVDDSFFHRLEESFLVEEDKKHERHPIFGNIVDEVAYHEKYPTIYHLRKKLVDSTDKADLRLIYLALAHMIKFRGHFLIEGDLNPDNSDVDKLFIQLVQTYNQLFEENPINASGVDAKAILSARLSKSRRLENLIAQLPGEKKNGLFGNLIALSLGLTPNFKSNFDLAEDAKLQLSKDTYDDDLDNLLAQIGDQYADLFLAAKNLSDAILLSDILRVNTEITKAPLSASMIKRYDEHHQDLTLLKALVRQQLPEKYKEIFFDQSKNGYAGYIDGGASQEEFYKFIKPILEKMDGTEELLVKLNREDLLRKQRTFDNGSIPHQIHLGELHAILRRQEDFYPFLKDNREKIEKILTFRIPYYVGPLARGNSRFAWMTRKSEETITPWNFEEVVDKGASAQSFIERMTNFDKNLPNEKVLPKHSLLYEYFTVYNELTKVKYVTEGMRKPAFLSGEQKKAIVDLLFKTNRKVTVKQLKEDYFKKIECFDSVEISGVEDRFNASLGTYHDLLKIIKDKDFLDNEENEDILEDIVLTLTLFEDREMIEERLKTYAHLFDDKVMKQLKRRRYTGWGRLSRKLINGIRDKQSGKTILDFLKSDGFANRNFMQLIHDDSLTFKEDIQKAQVSGQGDSLHEHIANLAGSPAIKKGILQTVKVVDELVKVMGRHKPENIVIEMARENQTTQKGQKNSRERMKRIEEGIKELGSQILKEHPVENTQLQNEKLYLYYLQNGRDMYVDQELDINRLSDYDVDHIVPQSFLKDDSIDNKVLTRSDKARGKSDNVPSEEVVKKMKNYWRQLLNAKLITQRKFDNLTKAERGGLSELDKAGFIKRQLVETRQITKHVAQILDSRMNTKYDENDKLIREVKVITLKSKLVSDFRKDFQFYKVREINNYHHAHDAYLNAVVGTALIKKYPKLESEFVYGDYKVYDVRKMIAKSEQEIGKATAKYFFYSNIMNFFKTEITLANGEIRKRPLIETNGETGEIVWDKGRDFATVRKVLSMPQVNIVKKTEVQTGGFSKESILPKRNSDKLIARKKDWDPKKYGGFDSPTVAYSVLVVAKVEKGKSKKLKSVKELLGITIMERSSFEKNPIDFLEAKGYKEVKKDLIIKLPKYSLFELENGRKRMLASAGELQKGNELALPSKYVNFLYLASHYEKLKGSPEDNEQKQLFVEQHKHYLDEIIEQISEFSKRVILADANLDKVLSAYNKHRDKPIREQAENIIHLFTLTNLGAPAAFKYFDTTIDRKRYTSTKEVLDATLIHQSITGLYETRIDLSQLGGDGGEAAAKGGSPAPGGLGIEDEYRLHETSTEPDVSLGSTWLSDFPQAWAETGGMGLAVRQAPLIIPLKATSTPVSIQQYPMSHEARLGIKPHIQRLLDQGILVPCQSPWNTPLLPVKKPGTNDYRPVQDLREVNKRVEDIHPTVPNPYNLLSGLPPSHQWYTVLDLKDAFFCLRLHPTSQPLFAFEWRDPGMGISGQLTWTRLPQGFKNSPTLFNEALHRDLADFRIQHPDLILLQYVDDILLAATSELDCQQGTRALLQTLGDLGYRASAKKAQICQKQVKYLGYLLREGQRWLTEARKETVMGQPVPKTPRQLREFLGKAGFCRLFIPGFAEMAAPLYPLTKPGTLFSWGPDQQKAYQEIKQALLTAPALGLPDLTKPFELFVDEKQGYAKGVLTQKLGPWRRPVAYLSKKLDPVAAGWPPCLRMVAAIAVLTKDAGKLTMGQPLVILAPHAVEALVKQPPDRWLSNARMTHYQAMLLDTDRVQFGPVVALNPATLLPLPEEGAPHDCLEILAETHGTRPDLTDQPIPDADHTWYTDGSSFLQEGQRKAGAAVTTETEVIWAGALPAGTSAQRAELIALTQALKMAEGKRLNVYTDSRYAFATAHIHGEIYRRRGWLTSEGREIKNKSEILALLKALFLPKRLSIIHCLGHQKGDSAEARGNRLADQAAREAAIKTPPDTSTLLIAGKRTADGSEFEKRTADGSEFESPKKKAKVE

SEQ ID NO: 2113 - protein, 2088 aa, synthetic construct; identical to SEQ ID NO: 2053

SEQ ID NO: 2114 - protein, 2094 aa, synthetic construct; identical to SEQ ID NO: 2060

SEQ ID NO: 2115 - protein, 2093 aa, synthetic construct
MPAAKRVKLDGGDKKYSIGLDIGTNSVGWAVITDEYKVPSKKFKVLGNTDRHSIKKNLIGALLFDSGETAEATRLKRTARRRYTRRKNRICYLQEIFSNEMAKVDDSFFHRLEESFLVEEDKKHERHPIFGNIVDEVAYHEKYPTIYHLRKKLVDSTDKADLRLIYLALAHMIKFRGHFLIEGDLNPDNSDVDKLFIQLVQTYNQLFEENPINASGVDAKAILSARLSKSRRLENLIAQLPGEKKNGLFGNLIALSLGLTPNFKSNFDLAEDAKLQLSKDTYDDDLDNLLAQIGDQYADLFLAAKNLSDAILLSDILRVNTEITKAPLSASMIKRYDEHHQDLTLLKALVRQQLPEKYKEIFFDQSKNGYAGYIDGGASQEEFYKFIKPILEKMDGTEELLVKLNREDLLRKQRTFDNGSIPHQIHLGELHAILRRQEDFYPFLKDNREKIEKILTFRIPYYVGPLARGNSRFAWMTRKSEETITPWNFEEVVDKGASAQSFIERMTNFDKNLPNEKVLPKHSLLYEYFTVYNELTKVKYVTEGMRKPAFLSGEQKKAIVDLLFKTNRKVTVKQLKEDYFKKIECFDSVEISGVEDRFNASLGTYHDLLKIIKDKDFLDNEENEDILEDIVLTLTLFEDREMIEERLKTYAHLFDDKVMKQLKRRRYTGWGRLSRKLINGIRDKQSGKTILDFLKSDGFANRNFMQLIHDDSLTFKEDIQKAQVSGQGDSLHEHIANLAGSPAIKKGILQTVKVVDELVKVMGRHKPENIVIEMARENQTTQKGQKNSRERMKRIEEGIKELGSQILKEHPVENTQLQNEKLYLYYLQNGRDMYVDQELDINRLSDYDVDHIVPQSFLKDDSIDNKVLTRSDKARGKSDNVPSEEVVKKMKNYWRQLLNAKLITQRKFDNLTKAERGGLSELDKAGFIKRQLVETRQITKHVAQILDSRMNTKYDENDKLIREVKVITLKSKLVSDFRKDFQFYKVREINNYHHAHDAYLNAVVGTALIKKYPKLESEFVYGDYKVYDVRKMIAKSEQEIGKATAKYFFYSNIMNFFKTEITLANGEIRKRPLIETNGETGEIVWDKGRDFATVRKVLSMPQVNIVKKTEVQTGGFSKESILPKRNSDKLIARKKDWDPKKYGGFDSPTVAYSVLVVAKVEKGKSKKLKSVKELLGITIMERSSFEKNPIDFLEAKGYKEVKKDLIIKLPKYSLFELENGRKRMLASAGELQKGNELALPSKYVNFLYLASHYEKLKGSPEDNEQKQLFVEQHKHYLDEIIEQISEFSKRVILADANLDKVLSAYNKHRDKPIREQAENIIHLFTLTNLGAPAAFKYFDTTIDRKRYTSTKEVLDATLIHQSITGLYETRIDLSQLGGDGGGSSEAAAKGGLGIEDEYRLHETSTEPDVSLGSTWLSDFPQAWAETGGMGLAVRQAPLIIPLKATSTPVSIQQYPMSHEARLGIKPHIQRLLDQGILVPCQSPWNTPLLPVKKPGTNDYRPVQDLREVNKRVEDIHPTVPNPYNLLSGLPPSHQWYTVLDLKDAFFCLRLHPTSQPLFAFEWRDPGMGISGQLTWTRLPQGFKNSPTLFNEALHRDLADFRIQHPDLILLQYVDDILLAATSELDCQQGTRALLQTLGDLGYRASAKKAQICQKQVKYLGYLLREGQRWLTEARKETVMGQPVPKTPRQLREFLGKAGFCRLFIPGFAEMAAPLYPLTKPGTLFSWGPDQQKAYQEIKQALLTAPALGLPDLTKPFELFVDEKQGYAKGVLTQKLGPWRRPVAYLSKKLDPVAAGWPPCLRMVAAIAVLTKDAGKLTMGQPLVILAPHAVEALVKQPPDRWLSNARMTHYQAMLLDTDRVQFGPVVALNPATLLPLPEEGAPHDCLEILAETHGTRPDLTDQPIPDADHTWYTDGSSFLQEGQRKAGAAVTTETEVIWAGALPAGTSAQRAELIALTQALKMAEGKRLNVYTDSRYAFATAHIHGEIYRRRGWLTSEGREIKNKSEILALLKALFLPKRLSIIHCLGHQKGDSAEARGNRLADQAAREAAIKTPPDTSTLLIAGKRTADGSEFEKRTADGSEFESPKKKAKVE

SEQ ID NO: 2116 - protein, 2100 aa, synthetic construct
MPAAKRVKLDGGDKKYSIGLDIGTNSVGWAVITDEYKVPSKKFKVLGNTDRHSIKKNLIGALLFDSGETAEATRLKRTARRRYTRRKNRICYLQEIFSNEMAKVDDSFFHRLEESFLVEEDKKHERHPIFGNIVDEVAYHEKYPTIYHLRKKLVDSTDKADLRLIYLALAHMIKFRGHFLIEGDLNPDNSDVDKLFIQLVQTYNQLFEENPINASGVDAKAILSARLSKSRRLENLIAQLPGEKKNGLFGNLIALSLGLTPNFKSNFDLAEDAKLQLSKDTYDDDLDNLLAQIGDQYADLFLAAKNLSDAILLSDILRVNTEITKAPLSASMIKRYDEHHQDLTLLKALVRQQLPEKYKEIFFDQSKNGYAGYIDGGASQEEFYKFIKPILEKMDGTEELLVKLNREDLLRKQRTFDNGSIPHQIHLGELHAILRRQEDFYPFLKDNREKIEKILTFRIPYYVGPLARGNSRFAWMTRKSEETITPWNFEEVVDKGASAQSFIERMTNFDKNLPNEKVLPKHSLLYEYFTVYNELTKVKYVTEGMRKPAFLSGEQKKAIVDLLFKTNRKVTVKQLKEDYFKKIECFDSVEISGVEDRFNASLGTYHDLLKIIKDKDFLDNEENEDILEDIVLTLTLFEDREMIEERLKTYAHLFDDKVMKQLKRRRYTGWGRLSRKLINGIRDKQSGKTILDFLKSDGFANRNFMQLIHDDSLTFKEDIQKAQVSGQGDSLHEHIANLAGSPAIKKGILQTVKVVDELVKVMGRHKPENIVIEMARENQTTQKGQKNSRERMKRIEEGIKELGSQILKEHPVENTQLQNEKLYLYYLQNGRDMYVDQELDINRLSDYDVDHIVPQSFLKDDSIDNKVLTRSDKARGKSDNVPSEEVVKKMKNYWRQLLNAKLITQRKFDNLTKAERGGLSELDKAGFIKRQLVETRQITKHVAQILDSRMNTKYDENDKLIREVKVITLKSKLVSDFRKDFQFYKVREINNYHHAHDAYLNAVVGTALIKKYPKLESEFVYGDYKVYDVRKMIAKSEQEIGKATAKYFFYSNIMNFFKTEITLANGEIRKRPLIETNGETGEIVWDKGRDFATVRKVLSMPQVNIVKKTEVQTGGFSKESILPKRNSDKLIARKKDWDPKKYGGFDSPTVAYSVLVVAKVEKGKSKKLKSVKELLGITIMERSSFEKNPIDFLEAKGYKEVKKDLIIKLPKYSLFELENGRKRMLASAGELQKGNELALPSKYVNFLYLASHYEKLKGSPEDNEQKQLFVEQHKHYLDEIIEQISEFSKRVILADANLDKVLSAYNKHRDKPIREQAENIIHLFTLTNLGAPAAFKYFDTTIDRKRYTSTKEVLDATLIHQSITGLYETRIDLSQLGGDGGGGGGSGGGGSGGGGSGGLGIEDEYRLHETSTEPDVSLGSTWLSDFPQAWAETGGMGLAVRQAPLIIPLKATSTPVSIQQYPMSHEARLGIKPHIQRLLDQGILVPCQSPWNTPLLPVKKPGTNDYRPVQDLREVNKRVEDIHPTVPNPYNLLSGLPPSHQWYTVLDLKDAFFCLRLHPTSQPLFAFEWRDPGMGISGQLTWTRLPQGFKNSPTLFNEALHRDLADFRIQHPDLILLQYVDDILLAATSELDCQQGTRALLQTLGDLGYRASAKKAQICQKQVKYLGYLLREGQRWLTEARKETVMGQPVPKTPRQLREFLGKAGFCRLFIPGFAEMAAPLYPLTKPGTLFSWGPDQQKAYQEIKQALLTAPALGLPDLTKPFELFVDEKQGYAKGVLTQKLGPWRRPVAYLSKKLDPVAAGWPPCLRMVAAIAVLTKDAGKLTMGQPLVILAPHAVEALVKQPPDRWLSNARMTHYQAMLLDTDRVQFGPVVALNPATLLPLPEEGAPHDCLEILAETHGTRPDLTDQPIPDADHTWYTDGSSFLQEGQRKAGAAVTTETEVIWAGALPAGTSAQRAELIALTQALKMAEGKRLNVYTDSRYAFATAHIHGEIYRRRGWLTSEGREIKNKSEILALLKALFLPKRLSIIHCLGHQKGDSAEARGNRLADQAAREAAIKTPPDTSTLLIAGKRTADGSEFEKRTADGSEFESPKKKAKVE

SEQ ID NO: 2117 - protein, 2096 aa, synthetic construct
MPAAKRVKLDGGDKKYSIGLDIGTNSVGWAVITDEYKVPSKKFKVLGNTDRHSIKKNLIGALLFDSGETAEATRLKRTARRRYTRRKNRICYLQEIFSNEMAKVDDSFFHRLEESFLVEEDKKHERHPIFGNIVDEVAYHEKYPTIYHLRKKLVDSTDKADLRLIYLALAHMIKFRGHFLIEGDLNPDNSDVDKLFIQLVQTYNQLFEENPINASGVDAKAILSARLSKSRRLENLIAQLPGEKKNGLFGNLIALSLGLTPNFKSNFDLAEDAKLQLSKDTYDDDLDNLLAQIGDQYADLFLAAKNLSDAILLSDILRVNTEITKAPLSASMIKRYDEHHQDLTLLKALVRQQLPEKYKEIFFDQSKNGYAGYIDGGASQEEFYKFIKPILEKMDGTEELLVKLNREDLLRKQRTFDNGSIPHQIHLGELHAILRRQEDFYPFLKDNREKIEKILTFRIPYYVGPLARGNSRFAWMTRKSEETITPWNFEEVVDKGASAQSFIERMTNFDKNLPNEKVLPKHSLLYEYFTVYNELTKVKYVTEGMRKPAFLSGEQKKAIVDLLFKTNRKVTVKQLKEDYFKKIECFDSVEISGVEDRFNASLGTYHDLLKIIKDKDFLDNEENEDILEDIVLTLTLFEDREMIEERLKTYAHLFDDKVMKQLKRRRYTGWGRLSRKLINGIRDKQSGKTILDFLKSDGFANRNFMQLIHDDSLTFKEDIQKAQVSGQGDSLHEHIANLAGSPAIKKGILQTVKVVDELVKVMGRHKPENIVIEMARENQTTQKGQKNSRERMKRIEEGIKELGSQILKEHPVENTQLQNEKLYLYYLQNGRDMYVDQELDINRLSDYDVDHIVPQSFLKDDSIDNKVLTRSDKARGKSDNVPSEEVVKKMKNYWRQLLNAKLITQRKFDNLTKAERGGLSELDKAGFIKRQLVETRQITKHVAQILDSRMNTKYDENDKLIREVKVITLKSKLVSDFRKDFQFYKVREINNYHHAHDAYLNAVVGTALIKKYPKLESEFVYGDYKVYDVRKMIAKSEQEIGKATAKYFFYSNIMNFFKTEITLANGEIRKRPLIETNGETGEIVWDKGRDFATVRKVLSMPQVNIVKKTEVQTGGFSKESILPKRNSDKLIARKKDWDPKKYGGFDSPTVAYSVLVVAKVEKGKSKKLKSVKELLGITIMERSSFEKNPIDFLEAKGYKEVKKDLIIKLPKYSLFELENGRKRMLASAGELQKGNELALPSKYVNFLYLASHYEKLKGSPEDNEQKQLFVEQHKHYLDEIIEQISEFSKRVILADANLDKVLSAYNKHRDKPIREQAENIIHLFTLTNLGAPAAFKYFDTTIDRKRYTSTKEVLDATLIHQSITGLYETRIDLSQLGGDGGGSSGGSEAAAKGGLGIEDEYRLHETSTEPDVSLGSTWLSDFPQAWAETGGMGLAVRQAPLIIPLKATSTPVSIQQYPMSHEARLGIKPHIQRLLDQGILVPCQSPWNTPLLPVKKPGTNDYRPVQDLREVNKRVEDIHPTVPNPYNLLSGLPPSHQWYTVLDLKDAFFCLRLHPTSQPLFAFEWRDPGMGISGQLTWTRLPQGFKNSPTLFNEALHRDLADFRIQHPDLILLQYVDDILLAATSELDCQQGTRALLQTLGDLGYRASAKKAQICQKQVKYLGYLLREGQRWLTEARKETVMGQPVPKTPRQLREFLGKAGFCRLFIPGFAEMAAPLYPLTKPGTLFSWGPDQQKAYQEIKQALLTAPALGLPDLTKPFELFVDEKQGYAKGVLTQKLGPWRRPVAYLSKKLDPVAAGWPPCLRMVAAIAVLTKDAGKLTMGQPLVILAPHAVEALVKQPPDRWLSNARMTHYQAMLLDTDRVQFGPVVALNPATLLPLPEEGAPHDCLEILAETHGTRPDLTDQPIPDADHTWYTDGSSFLQEGQRKAGAAVTTETEVIWAGALPAGTSAQRAELIALTQALKMAEGKRLNVYTDSRYAFATAHIHGEIYRRRGWLTSEGREIKNKSEILALLKALFLPKRLSIIHCLGHQKGDSAEARGNRLADQAAREAAIKTPPDTSTLLIAGKRTADGSEFEKRTADGSEFESPKKKAKVE

SEQ ID NO: 2118 - protein, 2100 aa, synthetic construct
MPAAKRVKLDGGDKKYSIGLDIGTNSVGWAVITDEYKVPSKKFKVLGNTDRHSIKKNLIGALLFDSGETAEATRLKRTARRRYTRRKNRICYLQEIFSNEMAKVDDSFFHRLEESFLVEEDKKHERHPIFGNIVDEVAYHEKYPTIYHLRKKLVDSTDKADLRLIYLALAHMIKFRGHFLIEGDLNPDNSDVDKLFIQLVQTYNQLFEENPINASGVDAKAILSARLSKSRRLENLIAQLPGEKKNGLFGNLIALSLGLTPNFKSNFDLAEDAKLQLSKDTYDDDLDNLLAQIGDQYADLFLAAKNLSDAILLSDILRVNTEITKAPLSASMIKRYDEHHQDLTLLKALVRQQLPEKYKEIFFDQSKNGYAGYIDGGASQEEFYKFIKPILEKMDGTEELLVKLNREDLLRKQRTFDNGSIPHQIHLGELHAILRRQEDFYPFLKDNREKIEKILTFRIPYYVGPLARGNSRFAWMTRKSEETITPWNFEEVVDKGASAQSFIERMTNFDKNLPNEKVLPKHSLLYEYFTVYNELTKVKYVTEGMRKPAFLSGEQKKAIVDLLFKTNRKVTVKQLKEDYFKKIECFDSVEISGVEDRFNASLGTYHDLLKIIKDKDFLDNEENEDILEDIVLTLTLFEDREMIEERLKTYAHLFDDKVMKQLKRRRYTGWGRLSRKLINGIRDKQSGKTILDFLKSDGFANRNFMQLIHDDSLTFKEDIQKAQVSGQGDSLHEHIANLAGSPAIKKGILQTVKVVDELVKVMGRHKPENIVIEMARENQTTQKGQKNSRERMKRIEEGIKELGSQILKEHPVENTQLQNEKLYLYYLQNGRDMYVDQELDINRLSDYDVDHIVPQSFLKDDSIDNKVLTRSDKARGKSDNVPSEEVVKKMKNYWRQLLNAKLITQRKFDNLTKAERGGLSELDKAGFIKRQLVETRQITKHVAQILDSRMNTKYDENDKLIREVKVITLKSKLVSDFRKDFQFYKVREINNYHHAHDAYLNAVVGTALIKKYPKLESEFVYGDYKVYDVRKMIAKSEQEIGKATAKYFFYSNIMNFFKTEITLANGEIRKRPLIETNGETGEIVWDKGRDFATVRKVLSMPQVNIVKKTEVQTGGFSKESILPKRNSDKLIARKKDWDPKKYGGFDSPTVAYSVLVVAKVEKGKSKKLKSVKELLGITIMERSSFEKNPIDFLEAKGYKEVKKDLIIKLPKYSLFELENGRKRMLASAGELQKGNELALPSKYVNFLYLASHYEKLKGSPEDNEQKQLFVEQHKHYLDEIIEQISEFSKRVILADANLDKVLSAYNKHRDKPIREQAENIIHLFTLTNLGAPAAFKYFDTTIDRKRYTSTKEVLDATLIHQSITGLYETRIDLSQLGGDGGGGSGGSGGSGGSGGSGGLGIEDEYRLHETSTEPDVSLGSTWLSDFPQAWAETGGMGLAVRQAPLIIPLKATSTPVSIQQYPMSHEARLGIKPHIQRLLDQGILVPCQSPWNTPLLPVKKPGTNDYRPVQDLREVNKRVEDIHPTVPNPYNLLSGLPPSHQWYTVLDLKDAFFCLRLHPTSQPLFAFEWRDPGMGISGQLTWTRLPQGFKNSPTLFNEALHRDLADFRIQHPDLILLQYVDDILLAATSELDCQQGTRALLQTLGDLGYRASAKKAQICQKQVKYLGYLLREGQRWLTEARKETVMGQPVPKTPRQLREFLGKAGFCRLFIPGFAEMAAPLYPLTKPGTLFSWGPDQQKAYQEIKQALLTAPALGLPDLTKPFELFVDEKQGYAKGVLTQKLGPWRRPVAYLSKKLDPVAAGWPPCLRMVAAIAVLTKDAGKLTMGQPLVILAPHAVEALVKQPPDRWLSNARMTHYQAMLLDTDRVQFGPVVALNPATLLPLPEEGAPHDCLEILAETHGTRPDLTDQPIPDADHTWYTDGSSFLQEGQRKAGAAVTTETEVIWAGALPAGTSAQRAELIALTQALKMAEGKRLNVYTDSRYAFATAHIHGEIYRRRGWLTSEGREIKNKSEILALLKALFLPKRLSIIHCLGHQKGDSAEARGNRLADQAAREAAIKTPPDTSTLLIAGKRTADGSEFEKRTADGSEFESPKKKAKVE

SEQ ID NO: 2119 - protein, 2096 aa, synthetic construct
MPAAKRVKLDGGDKKYSIGLDIGTNSVGWAVITDEYKVPSKKFKVLGNTDRHSIKKNLIGALLFDSGETAEATRLKRTARRRYTRRKNRICYLQEIFSNEMAKVDDSFFHRLEESFLVEEDKKHERHPIFGNIVDEVAYHEKYPTIYHLRKKLVDSTDKADLRLIYLALAHMIKFRGHFLIEGDLNPDNSDVDKLFIQLVQTYNQLFEENPINASGVDAKAILSARLSKSRRLENLIAQLPGEKKNGLFGNLIALSLGLTPNFKSNFDLAEDAKLQLSKDTYDDDLDNLLAQIGDQYADLFLAAKNLSDAILLSDILRVNTEITKAPLSASMIKRYDEHHQDLTLLKALVRQQLPEKYKEIFFDQSKNGYAGYIDGGASQEEFYKFIKPILEKMDGTEELLVKLNREDLLRKQRTFDNGSIPHQIHLGELHAILRRQEDFYPFLKDNREKIEKILTFRIPYYVGPLARGNSRFAWMTRKSEETITPWNFEEVVDKGASAQSFIERMTNFDKNLPNEKVLPKHSLLYEYFTVYNELTKVKYVTEGMRKPAFLSGEQKKAIVDLLFKTNRKVTVKQLKEDYFKKIECFDSVEISGVEDRFNASLGTYHDLLKIIKDKDFLDNEENEDILEDIVLTLTLFEDREMIEERLKTYAHLFDDKVMKQLKRRRYTGWGRLSRKLINGIRDKQSGKTILDFLKSDGFANRNFMQLIHDDSLTFKEDIQKAQVSGQGDSLHEHIANLAGSPAIKKGILQTVKVVDELVKVMGRHKPENIVIEMARENQTTQKGQKNSRERMKRIEEGIKELGSQILKEHPVENTQLQNEKLYLYYLQNGRDMYVDQELDINRLSDYDVDHIVPQSFLKDDSIDNKVLTRSDKARGKSDNVPSEEVVKKMKNYWRQLLNAKLITQRKFDNLTKAERGGLSELDKAGFIKRQLVETRQITKHVAQILDSRMNTKYDENDKLIREVKVITLKSKLVSDFRKDFQFYKVREINNYHHAHDAYLNAVVGTALIKKYPKLESEFVYGDYKVYDVRKMIAKSEQEIGKATAKYFFYSNIMNFFKTEITLANGEIRKRPLIETNGETGEIVWDKGRDFATVRKVLSMPQVNIVKKTEVQTGGFSKESILPKRNSDKLIARKKDWDPKKYGGFDSPTVAYSVLVVAKVEKGKSKKLKSVKELLGITIMERSSFEKNPIDFLEAKGYKEVKKDLIIKLPKYSLFELENGRKRMLASAGELQKGNELALPSKYVNFLYLASHYEKLKGSPEDNEQKQLFVEQHKHYLDEIIEQISEFSKRVILADANLDKVLSAYNKHRDKPIREQAENIIHLFTLTNLGAPAAFKYFDTTIDRKRYTSTKEVLDATLIHQSITGLYETRIDLSQLGGDGGEAAAKGSSGGSGGLGIEDEYRLHETSTEPDVSLGSTWLSDFPQAWAETGGMGLAVRQAPLIIPLKATSTPVSIQQYPMSHEARLGIKPHIQRLLDQGILVPCQSPWNTPLLPVKKPGTNDYRPVQDLREVNKRVEDIHPTVPNPYNLLSGLPPSHQWYTVLDLKDAFFCLRLHPTSQPLFAFEWRDPGMGISGQLTWTRLPQGFKNSPTLFNEALHRDLADFRIQHPDLILLQYVDDILLAATSELDCQQGTRALLQTLGDLGYRASAKKAQICQKQVKYLGYLLREGQRWLTEARKETVMGQPVPKTPRQLREFLGKAGFCRLFIPGFAEMAAPLYPLTKPGTLFSWGPDQQKAYQEIKQALLTAPALGLPDLTKPFELFVDEKQGYAKGVLTQKLGPWRRPVAYLSKKLDPVAAGWPPCLRMVAAIAVLTKDAGKLTMGQPLVILAPHAVEALVKQPPDRWLSNARMTHYQAMLLDTDRVQFGPVVALNPATLLPLPEEGAPHDCLEILAETHGTRPDLTDQPIPDADHTWYTDGSSFLQEGQRKAGAAVTTETEVIWAGALPAGTSAQRAELIALTQALKMAEGKRLNVYTDSRYAFATAHIHGEIYRRRGWLTSEGREIKNKSEILALLKALFLPKRLSIIHCLGHQKGDSAEARGNRLADQAAREAAIKTPPDTSTLLIAGKRTADGSEFEKRTADGSEFESPKKKAKVE

SEQ ID NO: 2120 - protein, 2096 aa, synthetic construct
MPAAKRVKLDGGDKKYSIGLDIGTNSVGWAVITDEYKVPSKKFKVLGNTDRHSIKKNLIGALLFDSGETAEATRLKRTARRRYTRRKNRICYLQEIFSNEMAKVDDSFFHRLEESFLVEEDKKHERHPIFGNIVDEVAYHEKYPTIYHLRKKLVDSTDKADLRLIYLALAHMIKFRGHFLIEGDLNPDNSDVDKLFIQLVQTYNQLFEENPINASGVDAKAILSARLSKSRRLENLIAQLPGEKKNGLFGNLIALSLGLTPNFKSNFDLAEDAKLQLSKDTYDDDLDNLLAQIGDQYADLFLAAKNLSDAILLSDILRVNTEITKAPLSASMIKRYDEHHQDLTLLKALVRQQLPEKYKEIFFDQSKNGYAGYIDGGASQEEFYKFIKPILEKMDGTEELLVKLNREDLLRKQRTFDNGSIPHQIHLGELHAILRRQEDFYPFLKDNREKIEKILTFRIPYYVGPLARGNSRFAWMTRKSEETITPWNFEEVVDKGASAQSFIERMTNFDKNLPNEKVLPKHSLLYEYFTVYNELTKVKYVTEGMRKPAFLSGEQKKAIVDLLFKTNRKVTVKQLKEDYFKKIECFDSVEISGVEDRFNASLGTYHDLLKIIKDKDFLDNEENEDILEDIVLTLTLFEDREMIEERLKTYAHLFDDKVMKQLKRRRYTGWGRLSRKLINGIRDKQSGKTILDFLKSDGFANRNFMQLIHDDSLTFKEDIQKAQVSGQGDSLHEHIANLAGSPAIKKGILQTVKVVDELVKVMGRHKPENIVIEMARENQTTQKGQKNSRERMKRIEEGIKELGSQILKEHPVENTQLQNEKLYLYYLQNGRDMYVDQELDINRLSDYDVDHIVPQSFLKDDSIDNKVLTRSDKARGKSDNVPSEEVVKKMKNYWRQLLNAKLITQRKFDNLTKAERGGLSELDKAGFIKRQLVETRQITKHVAQILDSRMNTKYDENDKLIREVKVITLKSKLVSDFRKDFQFYKVREINNYHHAHDAYLNAVVGTALIKKYPKLESEFVYGDYKVYDVRKMIAKSEQEIGKATAKYFFYSNIMNFFKTEITLANGEIRKRPLIETNGETGEIVWDKGRDFATVRKVLSMPQVNIVKKTEVQTGGFSKESILPKRNSDKLIARKKDWDPKKYGGFDSPTVAYSVLVVAKVEKGKSKKLKSVKELLGITIMERSSFEKNPIDFLEAKGYKEVKKDLIIKLPKYSLFELENGRKRMLASAGELQKGNELALPSKYVNFLYLASHYEKLKGSPEDNEQKQLFVEQHKHYLDEIIEQISEFSKRVILADANLDKVLSAYNKHRDKPIREQAENIIHLFTLTNLGAPAAFKYFDTTIDRKRYTSTKEVLDATLIHQSITGLYETRIDLSQLGGDGGPAPEAAAKGGGGGLGIEDEYRLHETSTEPDVSLGSTWLSDFPQAWAETGGMGLAVRQAPLIIPLKATSTPVSIQQYPMSHEARLGIKPHIQRLLDQGILVPCQSPWNTPLLPVKKPGTNDYRPVQDLREVNKRVEDIHPTVPNPYNLLSGLPPSHQWYTVLDLKDAFFCLRLHPTSQPLFAFEWRDPGMGISGQLTWTRLPQGFKNSPTLFNEALHRDLADFRIQHPDLILLQYVDDILLAATSELDCQQGTRALLQTLGDLGYRASAKKAQICQKQVKYLGYLLREGQRWLTEARKETVMGQPVPKTPRQLREFLGKAGFCRLFIPGFAEMAAPLYPLTKPGTLFSWGPDQQKAYQEIKQALLTAPALGLPDLTKPFELFVDEKQGYAKGVLTQKLGPWRRPVAYLSKKLDPVAAGWPPCLRMVAAIAVLTKDAGKLTMGQPLVILAPHAVEALVKQPPDRWLSNARMTHYQAMLLDTDRVQFGPVVALNPATLLPLPEEGAPHDCLEILAETHGTRPDLTDQPIPDADHTWYTDGSSFLQEGQRKAGAAVTTETEVIWAGALPAGTSAQRAELIALTQALKMAEGKRLNVYTDSRYAFATAHIHGEIYRRRGWLTSEGREIKNKSEILALLKALFLPKRLSIIHCLGHQKGDSAEARGNRLADQAAREAAIKTPPDTSTLLIAGKRTADGSEFEKRTADGSEFESPKKKAKVE

SEQ ID NO: 2121 - protein, 2101 aa, synthetic construct
MPAAKRVKLDGGDKKYSIGLDIGTNSVGWAVITDEYKVPSKKFKVLGNTDRHSIKKNLIGALLFDSGETAEATRLKRTARRRYTRRKNRICYLQEIFSNEMAKVDDSFFHRLEESFLVEEDKKHERHPIFGNIVDEVAYHEKYPTIYHLRKKLVDSTDKADLRLIYLALAHMIKFRGHFLIEGDLNPDNSDVDKLFIQLVQTYNQLFEENPINASGVDAKAILSARLSKSRRLENLIAQLPGEKKNGLFGNLIALSLGLTPNFKSNFDLAEDAKLQLSKDTYDDDLDNLLAQIGDQYADLFLAAKNLSDAILLSDILRVNTEITKAPLSASMIKRYDEHHQDLTLLKALVRQQLPEKYKEIFFDQSKNGYAGYIDGGASQEEFYKFIKPILEKMDGTEELLVKLNREDLLRKQRTFDNGSIPHQIHLGELHAILRRQEDFYPFLKDNREKIEKILTFRIPYYVGPLARGNSRFAWMTRKSEETITPWNFEEVVDKGASAQSFIERMTNFDKNLPNEKVLPKHSLLYEYFTVYNELTKVKYVTEGMRKPAFLSGEQKKAIVDLLFKTNRKVTVKQLKEDYFKKIECFDSVEISGVEDRFNASLGTYHDLLKIIKDKDFLDNEENEDILEDIVLTLTLFEDREMIEERLKTYAHLFDDKVMKQLKRRRYTGWGRLSRKLINGIRDKQSGKTILDFLKSDGFANRNFMQLIHDDSLTFKEDIQKAQVSGQGDSLHEHIANLAGSPAIKKGILQTVKVVDELVKVMGRHKPENIVIEMARENQTTQKGQKNSRERMKRIEEGIKELGSQILKEHPVENTQLQNEKLYLYYLQNGRDMYVDQELDINRLSDYDVDHIVPQSFLKDDSIDNKVLTRSDKARGKSDNVPSEEVVKKMKNYWRQLLNAKLITQRKFDNLTKAERGGLSELDKAGFIKRQLVETRQITKHVAQILDSRMNTKYDENDKLIREVKVITLKSKLVSDFRKDFQFYKVREINNYHHAHDAYLNAVVGTALIKKYPKLESEFVYGDYKVYDVRKMIAKSEQEIGKATAKYFFYSNIMNFFKTEITLANGEIRKRPLIETNGETGEIVWDKGRDFATVRKVLSMPQVNIVKKTEVQTGGFSKESILPKRNSDKLIARKKDWDPKKYGGFDSPTVAYSVLVVAKVEKGKSKKLKSVKELLGITIMERSSFEKNPIDFLEAKGYKEVKKDLIIKLPKYSLFELENGRKRMLASAGELQKGNELALPSKYVNFLYLASHYEKLKGSPEDNEQKQLFVEQHKHYLDEIIEQISEFSKRVILADANLDKVLSAYNKHRDKPIREQAENIIHLFTLTNLGAPAAFKYFDTTIDRKRYTSTKEVLDATLIHQSITGLYETRIDLSQLGGDGGSGSETPGTSESATPESGGLGIEDEYRLHETSTEPDVSLGSTWLSDFPQAWAETGGMGLAVRQAPLIIPLKATSTPVSIQQYPMSHEARLGIKPHIQRLLDQGILVPCQSPWNTPLLPVKKPGTNDYRPVQDLREVNKRVEDIHPTVPNPYNLLSGLPPSHQWYTVLDLKDAFFCLRLHPTSQPLFAFEWRDPGMGISGQLTWTRLPQGFKNSPTLFNEALHRDLADFRIQHPDLILLQYVDDILLAATSELDCQQGTRALLQTLGDLGYRASAKKAQICQKQVKYLGYLLREGQRWLTEARKETVMGQPVPKTPRQLREFLGKAGFCRLFIPGFAEMAAPLYPLTKPGTLFSWGPDQQKAYQEIKQALLTAPALGLPDLTKPFELFVDEKQGYAKGVLTQKLGPWRRPVAYLSKKLDPVAAGWPPCLRMVAAIAVLTKDAGKLTMGQPLVILAPHAVEALVKQPPDRWLSNARMTHYQAMLLDTDRVQFGPVVALNPATLLPLPEEGAPHDCLEILAETHGTRPDLTDQPIPDADHTWYTDGSSFLQEGQRKAGAAVTTETEVIWAGALPAGTSAQRAELIALTQALKMAEGKRLNVYTDSRYAFATAHIHGEIYRRRGWLTSEGREIKNKSEILALLKALFLPKRLSIIHCLGHQKGDSAEARGNRLADQAAREAAIKTPPDTSTLLIAGKRTADGSEFEKRTADGSEFESPKKKAKVE

SEQ ID NO: 2122 - protein, 2094 aa, synthetic construct; identical to SEQ ID NO: 2058

SEQ ID NO: 2123 - protein, 2096 aa, synthetic construct; identical to SEQ ID NO: 2054

SEQ ID NO: 2124 - protein, 2091 aa, synthetic construct
MPAAKRVKLDGGDKKYSIGLDIGTNSVGWAVITDEYKVPSKKFKVLGNTDRHSIKKNLIGALLFDSGETAEATRLKRTARRRYTRRKNRICYLQEIFSNEMAKVDDSFFHRLEESFLVEEDKKHERHPIFGNIVDEVAYHEKYPTIYHLRKKLVDSTDKADLRLIYLALAHMIKFRGHFLIEGDLNPDNSDVDKLFIQLVQTYNQLFEENPINASGVDAKAILSARLSKSRRLENLIAQLPGEKKNGLFGNLIALSLGLTPNFKSNFDLAEDAKLQLSKDTYDDDLDNLLAQIGDQYADLFLAAKNLSDAILLSDILRVNTEITKAPLSASMIKRYDEHHQDLTLLKALVRQQLPEKYKEIFFDQSKNGYAGYIDGGASQEEFYKFIKPILEKMDGTEELLVKLNREDLLRKQRTFDNGSIPHQIHLGELHAILRRQEDFYPFLKDNREKIEKILTFRIPYYVGPLARGNSRFAWMTRKSEETITPWNFEEVVDKGASAQSFIERMTNFDKNLPNEKVLPKHSLLYEYFTVYNELTKVKYVTEGMRKPAFLSGEQKKAIVDLLFKTNRKVTVKQLKEDYFKKIECFDSVEISGVEDRFNASLGTYHDLLKIIKDKDFLDNEENEDILEDIVLTLTLFEDREMIEERLKTYAHLFDDKVMKQLKRRRYTGWGRLSRKLINGIRDKQSGKTILDFLKSDGFANRNFMQLIHDDSLTFKEDIQKAQVSGQGDSLHEHIANLAGSPAIKKGILQTVKVVDELVKVMGRHKPENIVIEMARENQTTQKGQKNSRERMKRIEEGIKELGSQILKEHPVENTQLQNEKLYLYYLQNGRDMYVDQELDINRLSDYDVDHIVPQSFLKDDSIDNKVLTRSDKARGKSDNVPSEEVVKKMKNYWRQLLNAKLITQRKFDNLTKAERGGLSELDKAGFIKRQLVETRQITKHVAQILDSRMNTKYDENDKLIREVKVITLKSKLVSDFRKDFQFYKVREINNYHHAHDAYLNAVVGTALIKKYPKLESEFVYGDYKVYDVRKMIAKSEQEIGKATAKYFFYSNIMNFFKTEITLANGEIRKRPLIETNGETGEIVWDKGRDFATVRKVLSMPQVNIVKKTEVQTGGFSKESILPKRNSDKLIARKKDWDPKKYGGFDSPTVAYSVLVVAKVEKGKSKKLKSVKELLGITIMERSSFEKNPIDFLEAKGYKEVKKDLIIKLPKYSLFELENGRKRMLASAGELQKGNELALPSKYVNFLYLASHYEKLKGSPEDNEQKQLFVEQHKHYLDEIIEQISEFSKRVILADANLDKVLSAYNKHRDKPIREQAENIIHLFTLTNLGAPAAFKYFDTTIDRKRYTSTKEVLDATLIHQSITGLYETRIDLSQLGGDGGGSSPAPGGLGIEDEYRLHETSTEPDVSLGSTWLSDFPQAWAETGGMGLAVRQAPLIIPLKATSTPVSIQQYPMSHEARLGIKPHIQRLLDQGILVPCQSPWNTPLLPVKKPGTNDYRPVQDLREVNKRVEDIHPTVPNPYNLLSGLPPSHQWYTVLDLKDAFFCLRLHPTSQPLFAFEWRDPGMGISGQLTWTRLPQGFKNSPTLFNEALHRDLADFRIQHPDLILLQYVDDILLAATSELDCQQGTRALLQTLGDLGYRASAKKAQICQKQVKYLGYLLREGQRWLTEARKETVMGQPVPKTPRQLREFLGKAGFCRLFIPGFAEMAAPLYPLTKPGTLFSWGPDQQKAYQEIKQALLTAPALGLPDLTKPFELFVDEKQGYAKGVLTQKLGPWRRPVAYLSKKLDPVAAGWPPCLRMVAAIAVLTKDAGKLTMGQPLVILAPHAVEALVKQPPDRWLSNARMTHYQAMLLDTDRVQFGPVVALNPATLLPLPEEGAPHDCLEILAETHGTRPDLTDQPIPDADHTWYTDGSSFLQEGQRKAGAAVTTETEVIWAGALPAGTSAQRAELIALTQALKMAEGKRLNVYTDSRYAFATAHIHGEIYRRRGWLTSEGREIKNKSEILALLKALFLPKRLSIIHCLGHQKGDSAEARGNRLADQAAREAAIKTPPDTSTLLIAGKRTADGSEFEKRTADGSEFESPKKKAKVE

SEQ ID NO: 2125 - protein, 2090 aa, synthetic construct
MPAAKRVKLDGGDKKYSIGLDIGTNSVGWAVITDEYKVPSKKFKVLGNTDRHSIKKNLIGALLFDSGETAEATRLKRTARRRYTRRKNRICYLQEIFSNEMAKVDDSFFHRLEESFLVEEDKKHERHPIFGNIVDEVAYHEKYPTIYHLRKKLVDSTDKADLRLIYLALAHMIKFRGHFLIEGDLNPDNSDVDKLFIQLVQTYNQLFEENPINASGVDAKAILSARLSKSRRLENLIAQLPGEKKNGLFGNLIALSLGLTPNFKSNFDLAEDAKLQLSKDTYDDDLDNLLAQIGDQYADLFLAAKNLSDAILLSDILRVNTEITKAPLSASMIKRYDEHHQDLTLLKALVRQQLPEKYKEIFFDQSKNGYAGYIDGGASQEEFYKFIKPILEKMDGTEELLVKLNREDLLRKQRTFDNGSIPHQIHLGELHAILRRQEDFYPFLKDNREKIEKILTFRIPYYVGPLARGNSRFAWMTRKSEETITPWNFEEVVDKGASAQSFIERMTNFDKNLPNEKVLPKHSLLYEYFTVYNELTKVKYVTEGMRKPAFLSGEQKKAIVDLLFKTNRKVTVKQLKEDYFKKIECFDSVEISGVEDRFNASLGTYHDLLKIIKDKDFLDNEENEDILEDIVLTLTLFEDREMIEERLKTYAHLFDDKVMKQLKRRRYTGWGRLSRKLINGIRDKQSGKTILDFLKSDGFANRNFMQLIHDDSLTFKEDIQKAQVSGQGDSLHEHIANLAGSPAIKKGILQTVKVVDELVKVMGRHKPENIVIEMARENQTTQKGQKNSRERMKRIEEGIKELGSQILKEHPVENTQLQNEKLYLYYLQNGRDMYVDQELDINRLSDYDVDHIVPQSFLKDDSIDNKVLTRSDKARGKSDNVPSEEVVKKMKNYWRQLLNAKLITQRKFDNLTKAERGGLSELDKAGFIKRQLVETRQITKHVAQILDSRMNTKYDENDKLIREVKVITLKSKLVSDFRKDFQFYKVREINNYHHAHDAYLNAVVGTALIKKYPKLESEFVYGDYKVYDVRKMIAKSEQEIGKATAKYFFYSNIMNFFKTEITLANGEIRKRPLIETNGETGEIVWDKGRDFATVRKVLSMPQVNIVKKTEVQTGGFSKESILPKRNSDKLIARKKDWDPKKYGGFDSPTVAYSVLVVAKVEKGKSKKLKSVKELLGITIMERSSFEKNPIDFLEAKGYKEVKKDLIIKLPKYSLFELENGRKRMLASAGELQKGNELALPSKYVNFLYLASHYEKLKGSPEDNEQKQLFVEQHKHYLDEIIEQISEFSKRVILADANLDKVLSAYNKHRDKPIREQAENIIHLFTLTNLGAPAAFKYFDTTIDRKRYTSTKEVLDATLIHQSITGLYETRIDLSQLGGDGGGGGGSGGLGIEDEYRLHETSTEPDVSLGSTWLSDFPQAWAETGGMGLAVRQAPLIIPLKATSTPVSIQQYPMSHEARLGIKPHIQRLLDQGILVPCQSPWNTPLLPVKKPGTNDYRPVQDLREVNKRVEDIHPTVPNPYNLLSGLPPSHQWYTVLDLKDAFFCLRLHPTSQPLFAFEWRDPGMGISGQLTWTRLPQGFKNSPTLFNEALHRDLADFRIQHPDLILLQYVDDILLAATSELDCQQGTRALLQTLGDLGYRASAKKAQICQKQVKYLGYLLREGQRWLTEARKETVMGQPVPKTPRQLREFLGKAGFCRLFIPGFAEMAAPLYPLTKPGTLFSWGPDQQKAYQEIKQALLTAPALGLPDLTKPFELFVDEKQGYAKGVLTQKLGPWRRPVAYLSKKLDPVAAGWPPCLRMVAAIAVLTKDAGKLTMGQPLVILAPHAVEALVKQPPDRWLSNARMTHYQAMLLDTDRVQFGPVVALNPATLLPLPEEGAPHDCLEILAETHGTRPDLTDQPIPDADHTWYTDGSSFLQEGQRKAGAAVTTETEVIWAGALPAGTSAQRAELIALTQALKMAEGKRLNVYTDSRYAFATAHIHGEIYRRRGWLTSEGREIKNKSEILALLKALFLPKRLSIIHCLGHQKGDSAEARGNRLADQAAREAAIKTPPDTSTLLIAGKRTADGSEFEKRTADGSEFESPKKKAKVE

SEQ ID NO: 2126 - protein, 2096 aa, synthetic construct; identical to SEQ ID NO: 2052

SEQ ID NO: 2127 - protein, 2091 aa, synthetic construct
MPAAKRVKLDGGDKKYSIGLDIGTNSVGWAVITDEYKVPSKKFKVLGNTDRHSIKKNLIGALLFDSGETAEATRLKRTARRRYTRRKNRICYLQEIFSNEMAKVDDSFFHRLEESFLVEEDKKHERHPIFGNIVDEVAYHEKYPTIYHLRKKLVDSTDKADLRLIYLALAHMIKFRGHFLIEGDLNPDNSDVDKLFIQLVQTYNQLFEENPINASGVDAKAILSARLSKSRRLENLIAQLPGEKKNGLFGNLIALSLGLTPNFKSNFDLAEDAKLQLSKDTYDDDLDNLLAQIGDQYADLFLAAKNLSDAILLSDILRVNTEITKAPLSASMIKRYDEHHQDLTLLKALVRQQLPEKYKEIFFDQSKNGYAGYIDGGASQEEFYKFIKPILEKMDGTEELLVKLNREDLLRKQRTFDNGSIPHQIHLGELHAILRRQEDFYPFLKDNREKIEKILTFRIPYYVGPLARGNSRFAWMTRKSEETITPWNFEEVVDKGASAQSFIERMTNFDKNLPNEKVLPKHSLLYEYFTVYNELTKVKYVTEGMRKPAFLSGEQKKAIVDLLFKTNRKVTVKQLKEDYFKKIECFDSVEISGVEDRFNASLGTYHDLLKIIKDKDFLDNEENEDILEDIVLTLTLFEDREMIEERLKTYAHLFDDKVMKQLKRRRYTGWGRLSRKLINGIRDKQSGKTILDFLKSDGFANRNFMQLIHDDSLTFKEDIQKAQVSGQGDSLHEHIANLAGSPAIKKGILQTVKVVDELVKVMGRHKPENIVIEMARENQTTQKGQKNSRERMKRIEEGIKELGSQILKEHPVENTQLQNEKLYLYYLQNGRDMYVDQELDINRLSDYDVDHIVPQSFLKDDSIDNKVLTRSDKARGKSDNVPSEEVVKKMKNYWRQLLNAKLITQRKFDNLTKAERGGLSELDKAGFIKRQLVETRQITKHVAQILDSRMNTKYDENDKLIREVKVITLKSKLVSDFRKDFQFYKVREINNYHHAHDAYLNAVVGTALIKKYPKLESEFVYGDYKVYDVRKMIAKSEQEIGKATAKYFFYSNIMNFFKTEITLANGEIRKRPLIETNGETGEIVWDKGRDFATVRKVLSMPQVNIVKKTEVQTGGFSKESILPKRNSDKLIARKKDWDPKKYGGFDSPTVAYSVLVVAKVEKGKSKKLKSVKELLGITIMERSSFEKNPIDFLEAKGYKEVKKDLIIKLPKYSLFELENGRKRMLASAGELQKGNELALPSKYVNFLYLASHYEKLKGSPEDNEQKQLFVEQHKHYLDEIIEQISEFSKRVILADANLDKVLSAYNKHRDKPIREQAENIIHLFTLTNLGAPAAFKYFDTTIDRKRYTSTKEVLDATLIHQSITGLYETRIDLSQLGGDGGGGGPAPGGLGIEDEYRLHETSTEPDVSLGSTWLSDFPQAWAETGGMGLAVRQAPLIIPLKATSTPVSIQQYPMSHEARLGIKPHIQRLLDQGILVPCQSPWNTPLLPVKKPGTNDYRPVQDLREVNKRVEDIHPTVPNPYNLLSGLPPSHQWYTVLDLKDAFFCLRLHPTSQPLFAFEWRDPGMGISGQLTWTRLPQGFKNSPTLFNEALHRDLADFRIQHPDLILLQYVDDILLAATSELDCQQGTRALLQTLGDLGYRASAKKAQICQKQVKYLGYLLREGQRWLTEARKETVMGQPVPKTPRQLREFLGKAGFCRLFIPGFAEMAAPLYPLTKPGTLFSWGPDQQKAYQEIKQALLTAPALGLPDLTKPFELFVDEKQGYAKGVLTQKLGPWRRPVAYLSKKLDPVAAGWPPCLRMVAAIAVLTKDAGKLTMGQPLVILAPHAVEALVKQPPDRWLSNARMTHYQAMLLDTDRVQFGPVVALNPATLLPLPEEGAPHDCLEILAETHGTRPDLTDQPIPDADHTWYTDGSSFLQEGQRKAGAAVTTETEVIWAGALPAGTSAQRAELIALTQALKMAEGKRLNVYTDSRYAFATAHIHGEIYRRRGWLTSEGREIKNKSEILALLKALFLPKRLSIIHCLGHQKGDSAEARGNRLADQAAREAAIKTPPDTSTLLIAGKRTADGSEFEKRTADGSEFESPKKKAKVE

SEQ ID NO: 2128 - protein, 2095 aa, synthetic construct
MPAAKRVKLDGGDKKYSIGLDIGTNSVGWAVITDEYKVPSKKFKVLGNTDRHSIKKNLIGALLFDSGETAEATRLKRTARRRYTRRKNRICYLQEIFSNEMAKVDDSFFHRLEESFLVEEDKKHERHPIFGNIVDEVAYHEKYPTIYHLRKKLVDSTDKADLRLIYLALAHMIKFRGHFLIEGDLNPDNSDVDKLFIQLVQTYNQLFEENPINASGVDAKAILSARLSKSRRLENLIAQLPGEKKNGLFGNLIALSLGLTPNFKSNFDLAEDAKLQLSKDTYDDDLDNLLAQIGDQYADLFLAAKNLSDAILLSDILRVNTEITKAPLSASMIKRYDEHHQDLTLLKALVRQQLPEKYKEIFFDQSKNGYAGYIDGGASQEEFYKFIKPILEKMDGTEELLVKLNREDLLRKQRTFDNGSIPHQIHLGELHAILRRQEDFYPFLKDNREKIEKILTFRIPYYVGPLARGNSRFAWMTRKSEETITPWNFEEVVDKGASAQSFIERMTNFDKNLPNEKVLPKHSLLYEYFTVYNELTKVKYVTEGMRKPAFLSGEQKKAIVDLLFKTNRKVTVKQLKEDYFKKIECFDSVEISGVEDRFNASLGTYHDLLKIIKDKDFLDNEENEDILEDIVLTLTLFEDREMIEERLKTYAHLFDDKVMKQLKRRRYTGWGRLSRKLINGIRDKQSGKTILDFLKSDGFANRNFMQLIHDDSLTFKEDIQKAQVSGQGDSLHEHIANLAGSPAIKKGILQTVKVVDELVKVMGRHKPENIVIEMARENQTTQKGQKNSRERMKRIEEGIKELGSQILKEHPVENTQLQNEKLYLYYLQNGRDMYVDQELDINRLSDYDVDHIVPQSFLKDDSIDNKVLTRSDKARGKSDNVPSEEVVKKMKNYWRQLLNAKLITQRKFDNLTKAERGGLSELDKAGFIKRQLVETRQITKHVAQILDSRMNTKYDENDKLIREVKVITLKSKLVSDFRKDFQFYKVREINNYHHAHDAYLNAVVGTALIKKYPKLESEFVYGDYKVYDVRKMIAKSEQEIGKATAKYFFYSNIMNFFKTEITLANGEIRKRPLIETNGETGEIVWDKGRDFATVRKVLSMPQVNIVKKTEVQTGGFSKESILPKRNSDKLIARKKDWDPKKYGGFDSPTVAYSVLVVAKVEKGKSKKLKSVKELLGITIMERSSFEKNPIDFLEAKGYKEVKKDLIIKLPKYSLFELENGRKRMLASAGELQKGNELALPSKYVNFLYLASHYEKLKGSPEDNEQKQLFVEQHKHYLDEIIEQISEFSKRVILADANLDKVLSAYNKHRDKPIREQAENIIHLFTLTNLGAPAAFKYFDTTIDRKRYTSTKEVLDATLIHQSITGLYETRIDLSQLGGDGGEAAAKEAAAKGGLGIEDEYRLHETSTEPDVSLGSTWLSDFPQAWAETGGMGLAVRQAPLIIPLKATSTPVSIQQYPMSHEARLGIKPHIQRLLDQGILVPCQSPWNTPLLPVKKPGTNDYRPVQDLREVNKRVEDIHPTVPNPYNLLSGLPPSHQWYTVLDLKDAFFCLRLHPTSQPLFAFEWRDPGMGISGQLTWTRLPQGFKNSPTLFNEALHRDLADFRIQHPDLILLQYVDDILLAATSELDCQQGTRALLQTLGDLGYRASAKKAQICQKQVKYLGYLLREGQRWLTEARKETVMGQPVPKTPRQLREFLGKAGFCRLFIPGFAEMAAPLYPLTKPGTLFSWGPDQQKAYQEIKQALLTAPALGLPDLTKPFELFVDEKQGYAKGVLTQKLGPWRRPVAYLSKKLDPVAAGWPPCLRMVAAIAVLTKDAGKLTMGQPLVILAPHAVEALVKQPPDRWLSNARMTHYQAMLLDTDRVQFGPVVALNPATLLPLPEEGAPHDCLEILAETHGTRPDLTDQPIPDADHTWYTDGSSFLQEGQRKAGAAVTTETEVIWAGALPAGTSAQRAELIALTQALKMAEGKRLNVYTDSRYAFATAHIHGEIYRRRGWLTSEGREIKNKSEILALLKALFLPKRLSIIHCLGHQKGDSAEARGNRLADQAAREAAIKTPPDTSTLLIAGKRTADGSEFEKRTADGSEFESPKKKAKVE

SEQ ID NO: 2129 - protein, 2096 aa, synthetic construct; identical to SEQ ID NO: 2059

SEQ ID NO: 2130 - protein, 2096 aa, synthetic construct
MPAAKRVKLDGGDKKYSIGLDIGTNSVGWAVITDEYKVPSKKFKVLGNTDRHSIKKNLIGALLFDSGETAEATRLKRTARRRYTRRKNRICYLQEIFSNEMAKVDDSFFHRLEESFLVEEDKKHERHPIFGNIVDEVAYHEKYPTIYHLRKKLVDSTDKADLRLIYLALAHMIKFRGHFLIEGDLNPDNSDVDKLFIQLVQTYNQLFEENPINASGVDAKAILSARLSKSRRLENLIAQLPGEKKNGLFGNLIALSLGLTPNFKSNFDLAEDAKLQLSKDTYDDDLDNLLAQIGDQYADLFLAAKNLSDAILLSDILRVNTEITKAPLSASMIKRYDEHHQDLTLLKALVRQQLPEKYKEIFFDQSKNGYAGYIDGGASQEEFYKFIKPILEKMDGTEELLVKLNREDLLRKQRTFDNGSIPHQIHLGELHAILRRQEDFYPFLKDNREKIEKILTFRIPYYVGPLARGNSRFAWMTRKSEETITPWNFEEVVDKGASAQSFIERMTNFDKNLPNEKVLPKHSLLYEYFTVYNELTKVKYVTEGMRKPAFLSGEQKKAIVDLLFKTNRKVTVKQLKEDYFKKIECFDSVEISGVEDRFNASLGTYHDLLKIIKDKDFLDNEENEDILEDIVLTLTLFEDREMIEERLKTYAHLFDDKVMKQLKRRRYTGWGRLSRKLINGIRDKQSGKTILDFLKSDGFANRNFMQLIHDDSLTFKEDIQKAQVSGQGDSLHEHIANLAGSPAIKKGILQTVKVVDELVKVMGRHKPENIVIEMARENQTTQKGQKNSRERMKRIEEGIKELGSQILKEHPVENTQLQNEKLYLYYLQNGRDMYVDQELDINRLSDYDVDHIVPQSFLKDDSIDNKVLTRSDKARGKSDNVPSEEVVKKMKNYWRQLLNAKLITQRKFDNLTKAERGGLSELDKAGFIKRQLVETRQITKHVAQILDSRMNTKYDENDKLIREVKVITLKSKLVSDFRKDFQFYKVREINNYHHAHDAYLNAVVGTALIKKYPKLESEFVYGDYKVYDVRKMIAKSEQEIGKATAKYFFYSNIMNFFKTEITLANGEIRKRPLIETNGETGEIVWDKGRDFATVRKVLSMPQVNIVKKTEVQTGGFSKESILPKRNSDKLIARKKDWDPKKYGGFDSPTVAYSVLVVAKVEKGKSKKLKSVKELLGITIMERSSFEKNPIDFLEAKGYKEVKKDLIIKLPKYSLFELENGRKRMLASAGELQKGNELALPSKYVNFLYLASHYEKLKGSPEDNEQKQLFVEQHKHYLDEIIEQISEFSKRVILADANLDKVLSAYNKHRDKPIREQAENIIHLFTLTNLGAPAAFKYFDTTIDRKRYTSTKEVLDATLIHQSITGLYETRIDLSQLGGDGGEAAAKPAPGGGGGLGIEDEYRLHETSTEPDVSLGSTWLSDFPQAWAETGGMGLAVRQAPLIIPLKATSTPVSIQQYPMSHEARLGIKPHIQRLLDQGILVPCQSPWNTPLLPVKKPGTNDYRPVQDLREVNKRVEDIHPTVPNPYNLLSGLPPSHQWYTVLDLKDAFFCLRLHPTSQPLFAFEWRDPGMGISGQLTWTRLPQGFKNSPTLFNEALHRDLADFRIQHPDLILLQYVDDILLAATSELDCQQGTRALLQTLGDLGYRASAKKAQICQKQVKYLGYLLREGQRWLTEARKETVMGQPVPKTPRQLREFLGKAGFCRLFIPGFAEMAAPLYPLTKPGTLFSWGPDQQKAYQEIKQALLTAPALGLPDLTKPFELFVDEKQGYAKGVLTQKLGPWRRPVAYLSKKLDPVAAGWPPCLRMVAAIAVLTKDAGKLTMGQPLVILAPHAVEALVKQPPDRWLSNARMTHYQAMLLDTDRVQFGPVVALNPATLLPLPEEGAPHDCLEILAETHGTRPDLTDQPIPDADHTWYTDGSSFLQEGQRKAGAAVTTETEVIWAGALPAGTSAQRAELIALTQALKMAEGKRLNVYTDSRYAFATAHIHGEIYRRRGWLTSEGREIKNKSEILALLKALFLPKRLSIIHCLGHQKGDSAEARGNRLADQAAREAAIKTPPDTSTLLIAGKRTADGSEFEKRTADGSEFESPKKKAKVE

SEQ ID NO: 2131 - protein, 2088 aa, synthetic construct
MPAAKRVKLDGGDKKYSIGLDIGTNSVGWAVITDEYKVPSKKFKVLGNTDRHSIKKNLIGALLFDSGETAEATRLKRTARRRYTRRKNRICYLQEIFSNEMAKVDDSFFHRLEESFLVEEDKKHERHPIFGNIVDEVAYHEKYPTIYHLRKKLVDSTDKADLRLIYLALAHMIKFRGHFLIEGDLNPDNSDVDKLFIQLVQTYNQLFEENPINASGVDAKAILSARLSKSRRLENLIAQLPGEKKNGLFGNLIALSLGLTPNFKSNFDLAEDAKLQLSKDTYDDDLDNLLAQIGDQYADLFLAAKNLSDAILLSDILRVNTEITKAPLSASMIKRYDEHHQDLTLLKALVRQQLPEKYKEIFFDQSKNGYAGYIDGGASQEEFYKFIKPILEKMDGTEELLVKLNREDLLRKQRTFDNGSIPHQIHLGELHAILRRQEDFYPFLKDNREKIEKILTFRIPYYVGPLARGNSRFAWMTRKSEETITPWNFEEVVDKGASAQSFIERMTNFDKNLPNEKVLPKHSLLYEYFTVYNELTKVKYVTEGMRKPAFLSGEQKKAIVDLLFKTNRKVTVKQLKEDYFKKIECFDSVEISGVEDRFNASLGTYHDLLKIIKDKDFLDNEENEDILEDIVLTLTLFEDREMIEERLKTYAHLFDDKVMKQLKRRRYTGWGRLSRKLINGIRDKQSGKTILDFLKSDGFANRNFMQLIHDDSLTFKEDIQKAQVSGQGDSLHEHIANLAGSPAIKKGILQTVKVVDELVKVMGRHKPENIVIEMARENQTTQKGQKNSRERMKRIEEGIKELGSQILKEHPVENTQLQNEKLYLYYLQNGRDMYVDQELDINRLSDYDVDHIVPQSFLKDDSIDNKVLTRSDKARGKSDNVPSEEVVKKMKNYWRQLLNAKLITQRKFDNLTKAERGGLSELDKAGFIKRQLVETRQITKHVAQILDSRMNTKYDENDKLIREVKVITLKSKLVSDFRKDFQFYKVREINNYHHAHDAYLNAVVGTALIKKYPKLESEFVYGDYKVYDVRKMIAKSEQEIGKATAKYFFYSNIMNFFKTEITLANGEIRKRPLIETNGETGEIVWDKGRDFATVRKVLSMPQVNIVKKTEVQTGGFSKESILPKRNSDKLIARKKDWDPKKYGGFDSPTVAYSVLVVAKVEKGKSKKLKSVKELLGITIMERSSFEKNPIDFLEAKGYKEVKKDLIIKLPKYSLFELENGRKRMLASAGELQKGNELALPSKYVNFLYLASHYEKLKGSPEDNEQKQLFVEQHKHYLDEIIEQISEFSKRVILADANLDKVLSAYNKHRDKPIREQAENIIHLFTLTNLGAPAAFKYFDTTIDRKRYTSTKEVLDATLIHQSITGLYETRIDLSQLGGDGGGGSGGLGIEDEYRLHETSTEPDVSLGSTWLSDFPQAWAETGGMGLAVRQAPLIIPLKATSTPVSIQQYPMSHEARLGIKPHIQRLLDQGILVPCQSPWNTPLLPVKKPGTNDYRPVQDLREVNKRVEDIHPTVPNPYNLLSGLPPSHQWYTVLDLKDAFFCLRLHPTSQPLFAFEWRDPGMGISGQLTWTRLPQGFKNSPTLFNEALHRDLADFRIQHPDLILLQYVDDILLAATSELDCQQGTRALLQTLGDLGYRASAKKAQICQKQVKYLGYLLREGQRWLTEARKETVMGQPVPKTPRQLREFLGKAGFCRLFIPGFAEMAAPLYPLTKPGTLFSWGPDQQKAYQEIKQALLTAPALGLPDLTKPFELFVDEKQGYAKGVLTQKLGPWRRPVAYLSKKLDPVAAGWPPCLRMVAAIAVLTKDAGKLTMGQPLVILAPHAVEALVKQPPDRWLSNARMTHYQAMLLDTDRVQFGPVVALNPATLLPLPEEGAPHDCLEILAETHGTRPDLTDQPIPDADHTWYTDGSSFLQEGQRKAGAAVTTETEVIWAGALPAGTSAQRAELIALTQALKMAEGKRLNVYTDSRYAFATAHIHGEIYRRRGWLTSEGREIKNKSEILALLKALFLPKRLSIIHCLGHQKGDSAEARGNRLADQAAREAAIKTPPDTSTLLIAGKRTADGSEFEKRTADGSEFESPKKKAKVE

SEQ ID NO: 2132 - protein, 2096 aa, synthetic construct
MPAAKRVKLDGGDKKYSIGLDIGTNSVGWAVITDEYKVPSKKFKVLGNTDRHSIKKNLIGALLFDSGETAEATRLKRTARRRYTRRKNRICYLQEIFSNEMAKVDDSFFHRLEESFLVEEDKKHERHPIFGNIVDEVAYHEKYPTIYHLRKKLVDSTDKADLRLIYLALAHMIKFRGHFLIEGDLNPDNSDVDKLFIQLVQTYNQLFEENPINASGVDAKAILSARLSKSRRLENLIAQLPGEKKNGLFGNLIALSLGLTPNFKSNFDLAEDAKLQLSKDTYDDDLDNLLAQIGDQYADLFLAAKNLSDAILLSDILRVNTEITKAPLSASMIKRYDEHHQDLTLLKALVRQQLPEKYKEIFFDQSKNGYAGYIDGGASQEEFYKFIKPILEKMDGTEELLVKLNREDLLRKQRTFDNGSIPHQIHLGELHAILRRQEDFYPFLKDNREKIEKILTFRIPYYVGPLARGNSRFAWMTRKSEETITPWNFEEVVDKGASAQSFIERMTNFDKNLPNEKVLPKHSLLYEYFTVYNELTKVKYVTEGMRKPAFLSGEQKKAIVDLLFKTNRKVTVKQLKEDYFKKIECFDSVEISGVEDRFNASLGTYHDLLKIIKDKDFLDNEENEDILEDIVLTLTLFEDREMIEERLKTYAHLFDDKVMKQLKRRRYTGWGRLSRKLINGIRDKQSGKTILDFLKSDGFANRNFMQLIHDDSLTFKEDIQKAQVSGQGDSLHEHIANLAGSPAIKKGILQTVKVVDELVKVMGRHKPENIVIEMARENQTTQKGQKNSRERMKRIEEGIKELGSQILKEHPVENTQLQNEKLYLYYLQNGRDMYVDQELDINRLSDYDVDHIVPQSFLKDDSIDNKVLTRSDKARGKSDNVPSEEVVKKMKNYWRQLLNAKLITQRKFDNLTKAERGGLSELDKAGFIKRQLVETRQITKHVAQILDSRMNTKYDENDKLIREVKVITLKSKLVSDFRKDFQFYKVREINNYHHAHDAYLNAVVGTALIKKYPKLESEFVYGDYKVYDVRKMIAKSEQEIGKATAKYFFYSNIMNFFKTEITLANGEIRKRPLIETNGETGEIVWDKGRDFATVRKVLSMPQVNIVKKTEVQTGGFSKESILPKRNSDKLIARKKDWDPKKYGGFDSPTVAYSVLVVAKVEKGKSKKLKSVKELLGITIMERSSFEKNPIDFLEAKGYKEVKKDLIIKLPKYSLFELENGRKRMLASAGELQKGNELALPSKYVNFLYLASHYEKLKGSPEDNEQKQLFVEQHKHYLDEIIEQISEFSKRVILADANLDKVLSAYNKHRDKPIREQAENIIHLFTLTNLGAPAAFKYFDTTIDRKRYTSTKEVLDATLIHQSITGLYETRIDLSQLGGDGGGGGEAAAKGGSGGLGIEDEYRLHETSTEPDVSLGSTWLSDFPQAWAETGGMGLAVRQAPLIIPLKATSTPVSIQQYPMSHEARLGIKPHIQRLLDQGILVPCQSPWNTPLLPVKKPGTNDYRPVQDLREVNKRVEDIHPTVPNPYNLLSGLPPSHQWYTVLDLKDAFFCLRLHPTSQPLFAFEWRDPGMGISGQLTWTRLPQGFKNSPTLFNEALHRDLADFRIQHPDLILLQYVDDILLAATSELDCQQGTRALLQTLGDLGYRASAKKAQICQKQVKYLGYLLREGQRWLTEARKETVMGQPVPKTPRQLREFLGKAGFCRLFIPGFAEMAAPLYPLTKPGTLFSWGPDQQKAYQEIKQALLTAPALGLPDLTKPFELFVDEKQGYAKGVLTQKLGPWRRPVAYLSKKLDPVAAGWPPCLRMVAAIAVLTKDAGKLTMGQPLVILAPHAVEALVKQPPDRWLSNARMTHYQAMLLDTDRVQFGPVVALNPATLLPLPEEGAPHDCLEILAETHGTRPDLTDQPIPDADHTWYTDGSSFLQEGQRKAGAAVTTETEVIWAGALPAGTSAQRAELIALTQALKMAEGKRLNVYTDSRYAFATAHIHGEIYRRRGWLTSEGREIKNKSEILALLKALFLPKRLSIIHCLGHQKGDSAEARGNRLADQAAREAAIKTPPDTSTLLIAGKRTADGSEFEKRTADGSEFESPKKKAKVE

SEQ ID NO: 2133 - protein, 2094 aa, synthetic construct
MPAAKRVKLDGGDKKYSIGLDIGTNSVGWAVITDEYKVPSKKFKVLGNTDRHSIKKNLIGALLFDSGETAEATRLKRTARRRYTRRKNRICYLQEIFSNEMAKVDDSFFHRLEESFLVEEDKKHERHPIFGNIVDEVAYHEKYPTIYHLRKKLVDSTDKADLRLIYLALAHMIKFRGHFLIEGDLNPDNSDVDKLFIQLVQTYNQLFEENPINASGVDAKAILSARLSKSRRLENLIAQLPGEKKNGLFGNLIALSLGLTPNFKSNFDLAEDAKLQLSKDTYDDDLDNLLAQIGDQYADLFLAAKNLSDAILLSDILRVNTEITKAPLSASMIKRYDEHHQDLTLLKALVRQQLPEKYKEIFFDQSKNGYAGYIDGGASQEEFYKFIKPILEKMDGTEELLVKLNREDLLRKQRTFDNGSIPHQIHLGELHAILRRQEDFYPFLKDNREKIEKILTFRIPYYVGPLARGNSRFAWMTRKSEETITPWNFEEVVDKGASAQSFIERMTNFDKNLPNEKVLPKHSLLYEYFTVYNELTKVKYVTEGMRKPAFLSGEQKKAIVDLLFKTNRKVTVKQLKEDYFKKIECFDSVEISGVEDRFNASLGTYHDLLKIIKDKDFLDNEENEDILEDIVLTLTLFEDREMIEERLKTYAHLFDDKVMKQLKRRRYTGWGRLSRKLINGIRDKQSGKTILDFLKSDGFANRNFMQLIHDDSLTFKEDIQKAQVSGQGDSLHEHIANLAGSPAIKKGILQTVKVVDELVKVMGRHKPENIVIEMARENQTTQKGQKNSRERMKRIEEGIKELGSQILKEHPVENTQLQNEKLYLYYLQNGRDMYVDQELDINRLSDYDVDHIVPQSFLKDDSIDNKVLTRSDKARGKSDNVPSEEVVKKMKNYWRQLLNAKLITQRKFDNLTKAERGGLSELDKAGFIKRQLVETRQITKHVAQILDSRMNTKYDENDKLIREVKVITLKSKLVSDFRKDFQFYKVREINNYHHAHDAYLNAVVGTALIKKYPKLESEFVYGDYKVYDVRKMIAKSEQEIGKATAKYFFYSNIMNFFKTEITLANGEIRKRPLIETNGETGEIVWDKGRDFATVRKVLSMPQVNIVKKTEVQTGGFSKESILPKRNSDKLIARKKDWDPKKYGGFDSPTVAYSVLVVAKVEKGKSKKLKSVKELLGITIMERSSFEKNPIDFLEAKGYKEVKKDLIIKLPKYSLFELENGRKRMLASAGELQKGNELALPSKYVNFLYLASHYEKLKGSPEDNEQKQLFVEQHKHYLDEIIEQISEFSKRVILADANLDKVLSAYNKHRDKPIREQAENIIHLFTLTNLGAPAAFKYFDTTIDRKRYTSTKEVLDATLIHQSITGLYETRIDLSQLGGDGGGGGGGSPAPGGLGIEDEYRLHETSTEPDVSLGSTWLSDFPQAWAETGGMGLAVRQAPLIIPLKATSTPVSIQQYPMSHEARLGIKPHIQRLLDQGILVPCQSPWNTPLLPVKKPGTNDYRPVQDLREVNKRVEDIHPTVPNPYNLLSGLPPSHQWYTVLDLKDAFFCLRLHPTSQPLFAFEWRDPGMGISGQLTWTRLPQGFKNSPTLFNEALHRDLADFRIQHPDLILLQYVDDILLAATSELDCQQGTRALLQTLGDLGYRASAKKAQICQKQVKYLGYLLREGQRWLTEARKETVMGQPVPKTPRQLREFLGKAGFCRLFIPGFAEMAAPLYPLTKPGTLFSWGPDQQKAYQEIKQALLTAPALGLPDLTKPFELFVDEKQGYAKGVLTQKLGPWRRPVAYLSKKLDPVAAGWPPCLRMVAAIAVLTKDAGKLTMGQPLVILAPHAVEALVKQPPDRWLSNARMTHYQAMLLDTDRVQFGPVVALNPATLLPLPEEGAPHDCLEILAETHGTRPDLTDQPIPDADHTWYTDGSSFLQEGQRKAGAAVTTETEVIWAGALPAGTSAQRAELIALTQALKMAEGKRLNVYTDSRYAFATAHIHGEIYRRRGWLTSEGREIKNKSEILALLKALFLPKRLSIIHCLGHQKGDSAEARGNRLADQAAREAAIKTPPDTSTLLIAGKRTADGSEFEKRTADGSEFESPKKKAKVE

SEQ ID NO: 2134 - protein, 2091 aa, synthetic construct
MPAAKRVKLDGGDKKYSIGLDIGTNSVGWAVITDEYKVPSKKFKVLGNTDRHSIKKNLIGALLFDSGETAEATRLKRTARRRYTRRKNRICYLQEIFSNEMAKVDDSFFHRLEESFLVEEDKKHERHPIFGNIVDEVAYHEKYPTIYHLRKKLVDSTDKADLRLIYLALAHMIKFRGHFLIEGDLNPDNSDVDKLFIQLVQTYNQLFEENPINASGVDAKAILSARLSKSRRLENLIAQLPGEKKNGLFGNLIALSLGLTPNFKSNFDLAEDAKLQLSKDTYDDDLDNLLAQIGDQYADLFLAAKNLSDAILLSDILRVNTEITKAPLSASMIKRYDEHHQDLTLLKALVRQQLPEKYKEIFFDQSKNGYAGYIDGGASQEEFYKFIKPILEKMDGTEELLVKLNREDLLRKQRTFDNGSIPHQIHLGELHAILRRQEDFYPFLKDNREKIEKILTFRIPYYVGPLARGNSRFAWMTRKSEETITPWNFEEVVDKGASAQSFIERMTNFDKNLPNEKVLPKHSLLYEYFTVYNELTKVKYVTEGMRKPAFLSGEQKKAIVDLLFKTNRKVTVKQLKEDYFKKIECFDSVEISGVEDRFNASLGTYHDLLKIIKDKDFLDNEENEDILEDIVLTLTLFEDREMIEERLKTYAHLFDDKVMKQLKRRRYTGWGRLSRKLINGIRDKQSGKTILDFLKSDGFANRNFMQLIHDDSLTFKEDIQKAQVSGQGDSLHEHIANLAGSPAIKKGILQTVKVVDELVKVMGRHKPENIVIEMARENQTTQKGQKNSRERMKRIEEGIKELGSQILKEHPVENTQLQNEKLYLYYLQNGRDMYVDQELDINRLSDYDVDHIVPQSFLKDDSIDNKVLTRSDKARGKSDNVPSEEVVKKMKNYWRQLLNAKLITQRKFDNLTKAERGGLSELDKAGFIKRQLVETRQITKHVAQILDSRMNTKYDENDKLIREVKVITLKSKLVSDFRKDFQFYKVREINNYHHAHDAYLNAVVGTALIKKYPKLESEFVYGDYKVYDVRKMIAKSEQEIGKATAKYFFYSNIMNFFKTEITLANGEIRKRPLIETNGETGEIVWDKGRDFATVRKVLSMPQVNIVKKTEVQTGGFSKESILPKRNSDKLIARKKDWDPKKYGGFDSPTVAYSVLVVAKVEKGKSKKLKSVKELLGITIMERSSFEKNPIDFLEAKGYKEVKKDLIIKLPKYSLFELENGRKRMLASAGELQKGNELALPSKYVNFLYLASHYEKLKGSPEDNEQKQLFVEQHKHYLDEIIEQISEFSKRVILADANLDKVLSAYNKHRDKPIREQAENIIHLFTLTNLGAPAAFKYFDTTIDRKRYTSTKEVLDATLIHQSITGLYETRIDLSQLGGDGGPAPGGGGGLGIEDEYRLHETSTEPDVSLGSTWLSDFPQAWAETGGMGLAVRQAPLIIPLKATSTPVSIQQYPMSHEARLGIKPHIQRLLDQGILVPCQSPWNTPLLPVKKPGTNDYRPVQDLREVNKRVEDIHPTVPNPYNLLSGLPPSHQWYTVLDLKDAFFCLRLHPTSQPLFAFEWRDPGMGISGQLTWTRLPQGFKNSPTLFNEALHRDLADFRIQHPDLILLQYVDDILLAATSELDCQQGTRALLQTLGDLGYRASAKKAQICQKQVKYLGYLLREGQRWLTEARKETVMGQPVPKTPRQLREFLGKAGFCRLFIPGFAEMAAPLYPLTKPGTLFSWGPDQQKAYQEIKQALLTAPALGLPDLTKPFELFVDEKQGYAKGVLTQKLGPWRRPVAYLSKKLDPVAAGWPPCLRMVAAIAVLTKDAGKLTMGQPLVILAPHAVEALVKQPPDRWLSNARMTHYQAMLLDTDRVQFGPVVALNPATLLPLPEEGAPHDCLEILAETHGTRPDLTDQPIPDADHTWYTDGSSFLQEGQRKAGAAVTTETEVIWAGALPAGTSAQRAELIALTQALKMAEGKRLNVYTDSRYAFATAHIHGEIYRRRGWLTSEGREIKNKSEILALLKALFLPKRLSIIHCLGHQKGDSAEARGNRLADQAAREAAIKTPPDTSTLLIAGKRTADGSEFEKRTADGSEFESPKKKAKVE

SEQ ID NO: 2135 - protein, 2096 aa, synthetic construct
MPAAKRVKLDGGDKKYSIGLDIGTNSVGWAVITDEYKVPSKKFKVLGNTDRHSIKKNLIGALLFDSGETAEATRLKRTARRRYTRRKNRICYLQEIFSNEMAKVDDSFFHRLEESFLVEEDKKHERHPIFGNIVDEVAYHEKYPTIYHLRKKLVDSTDKADLRLIYLALAHMIKFRGHFLIEGDLNPDNSDVDKLFIQLVQTYNQLFEENPINASGVDAKAILSARLSKSRRLENLIAQLPGEKKNGLFGNLIALSLGLTPNFKSNFDLAEDAKLQLSKDTYDDDLDNLLAQIGDQYADLFLAAKNLSDAILLSDILRVNTEITKAPLSASMIKRYDEHHQDLTLLKALVRQQLPEKYKEIFFDQSKNGYAGYIDGGASQEEFYKFIKPILEKMDGTEELLVKLNREDLLRKQRTFDNGSIPHQIHLGELHAILRRQEDFYPFLKDNREKIEKILTFRIPYYVGPLARGNSRFAWMTRKSEETITPWNFEEVVDKGASAQSFIERMTNFDKNLPNEKVLPKHSLLYEYFTVYNELTKVKYVTEGMRKPAFLSGEQKKAIVDLLFKTNRKVTVKQLKEDYFKKIECFDSVEISGVEDRFNASLGTYHDLLKIIKDKDFLDNEENEDILEDIVLTLTLFEDREMIEERLKTYAHLFDDKVMKQLKRRRYTGWGRLSRKLINGIRDKQSGKTILDFLKSDGFANRNFMQLIHDDSLTFKEDIQKAQVSGQGDSLHEHIANLAGSPAIKKGILQTVKVVDELVKVMGRHKPENIVIEMARENQTTQKGQKNSRERMKRIEEGIKELGSQILKEHPVENTQLQNEKLYLYYLQNGRDMYVDQELDINRLSDYDVDHIVPQSFLKDDSIDNKVLTRSDKARGKSDNVPSEEVVKKMKNYWRQLLNAKLITQRKFDNLTKAERGGLSELDKAGFIKRQLVETRQITKHVAQILDSRMNTKYDENDKLIREVKVITLKSKLVSDFRKDFQFYKVREINNYHHAHDAYLNAVVGTALIKKYPKLESEFVYGDYKVYDVRKMIAKSEQEIGKATAKYFFYSNIMNFFKTEITLANGEIRKRPLIETNGETGEIVWDKGRDFATVRKVLSMPQVNIVKKTEVQTGGFSKESILPKRNSDKLIARKKDWDPKKYGGFDSPTVAYSVLVVAKVEKGKSKKLKSVKELLGITIMERSSFEKNPIDFLEAKGYKEVKKDLIIKLPKYSLFELENGRKRMLASAGELQKGNELALPSKYVNFLYLASHYEKLKGSPEDNEQKQLFVEQHKHYLDEIIEQISEFSKRVILADANLDKVLSAYNKHRDKPIREQAENIIHLFTLTNLGAPAAFKYFDTTIDRKRYTSTKEVLDATLIHQSITGLYETRIDLSQLGGDGGGGGEAAAKPAPGGLGIEDEYRLHETSTEPDVSLGSTWLSDFPQAWAETGGMGLAVRQAPLIIPLKATSTPVSIQQYPMSHEARLGIKPHIQRLLDQGILVPCQSPWNTPLLPVKKPGTNDYRPVQDLREVNKRVEDIHPTVPNPYNLLSGLPPSHQWYTVLDLKDAFFCLRLHPTSQPLFAFEWRDPGMGISGQLTWTRLPQGFKNSPTLFNEALHRDLADFRIQHPDLILLQYVDDILLAATSELDCQQGTRALLQTLGDLGYRASAKKAQICQKQVKYLGYLLREGQRWLTEARKETVMGQPVPKTPRQLREFLGKAGFCRLFIPGFAEMAAPLYPLTKPGTLFSWGPDQQKAYQEIKQALLTAPALGLPDLTKPFELFVDEKQGYAKGVLTQKLGPWRRPVAYLSKKLDPVAAGWPPCLRMVAAIAVLTKDAGKLTMGQPLVILAPHAVEALVKQPPDRWLSNARMTHYQAMLLDTDRVQFGPVVALNPATLLPLPEEGAPHDCLEILAETHGTRPDLTDQPIPDADHTWYTDGSSFLQEGQRKAGAAVTTETEVIWAGALPAGTSAQRAELIALTQALKMAEGKRLNVYTDSRYAFATAHIHGEIYRRRGWLTSEGREIKNKSEILALLKALFLPKRLSIIHCLGHQKGDSAEARGNRLADQAAREAAIKTPPDTSTLLIAGKRTADGSEFEKRTADGSEFESPKKKAKVE

SEQ ID NO: 2136 - protein, 2091 aa, synthetic construct
MPAAKRVKLDGGDKKYSIGLDIGTNSVGWAVITDEYKVPSKKFKVLGNTDRHSIKKNLIGALLFDSGETAEATRLKRTARRRYTRRKNRICYLQEIFSNEMAKVDDSFFHRLEESFLVEEDKKHERHPIFGNIVDEVAYHEKYPTIYHLRKKLVDSTDKADLRLIYLALAHMIKFRGHFLIEGDLNPDNSDVDKLFIQLVQTYNQLFEENPINASGVDAKAILSARLSKSRRLENLIAQLPGEKKNGLFGNLIALSLGLTPNFKSNFDLAEDAKLQLSKDTYDDDLDNLLAQIGDQYADLFLAAKNLSDAILLSDILRVNTEITKAPLSASMIKRYDEHHQDLTLLKALVRQQLPEKYKEIFFDQSKNGYAGYIDGGASQEEFYKFIKPILEKMDGTEELLVKLNREDLLRKQRTFDNGSIPHQIHLGELHAILRRQEDFYPFLKDNREKIEKILTFRIPYYVGPLARGNSRFAWMTRKSEETITPWNFEEVVDKGASAQSFIERMTNFDKNLPNEKVLPKHSLLYEYFTVYNELTKVKYVTEGMRKPAFLSGEQKKAIVDLLFKTNRKVTVKQLKEDYFKKIECFDSVEISGVEDRFNASLGTYHDLLKIIKDKDFLDNEENEDILEDIVLTLTLFEDREMIEERLKTYAHLFDDKVMKQLKRRRYTGWGRLSRKLINGIRDKQSGKTILDFLKSDGFANRNFMQLIHDDSLTFKEDIQKAQVSGQGDSLHEHIANLAGSPAIKKGILQTVKVVDELVKVMGRHKPENIVIEMARENQTTQKGQKNSRERMKRIEEGIKELGSQILKEHPVENTQLQNEKLYLYYLQNGRDMYVDQELDINRLSDYDVDHIVPQSFLKDDSIDNKVLTRSDKARGKSDNVPSEEVVKKMKNYWRQLLNAKLITQRKFDNLTKAERGGLSELDKAGFIKRQLVETRQITKHVAQILDSRMNTKYDENDKLIREVKVITLKSKLVSDFRKDFQFYKVREINNYHHAHDAYLNAVVGTALIKKYPKLESEFVYGDYKVYDVRKMIAKSEQEIGKATAKYFFYSNIMNFFKTEITLANGEIRKRPLIETNGETGEIVWDKGRDFATVRKVLSMPQVNIVKKTEVQTGGFSKESILPKRNSDKLIARKKDWDPKKYGGFDSPTVAYSVLVVAKVEKGKSKKLKSVKELLGITIMERSSFEKNPIDFLEAKGYKEVKKDLIIKLPKYSLFELENGRKRMLASAGELQKGNELALPSKYVNFLYLASHYEKLKGSPEDNEQKQLFVEQHKHYLDEIIEQISEFSKRVILADANLDKVLSAYNKHRDKPIREQAENIIHLFTLTNLGAPAAFKYFDTTIDRKRYTSTKEVLDATLIHQSITGLYETRIDLSQLGGDGGGGSPAPGGLGIEDEYRLHETSTEPDVSLGSTWLSDFPQAWAETGGMGLAVRQAPLIIPLKATSTPVSIQQYPMSHEARLGIKPHIQRLLDQGILVPCQSPWNTPLLPVKKPGTNDYRPVQDLREVNKRVEDIHPTVPNPYNLLSGLPPSHQWYTVLDLKDAFFCLRLHPTSQPLFAFEWRDPGMGISGQLTWTRLPQGFKNSPTLFNEALHRDLADFRIQHPDLILLQYVDDILLAATSELDCQQGTRALLQTLGDLGYRASAKKAQICQKQVKYLGYLLREGQRWLTEARKETVMGQPVPKTPRQLREFLGKAGFCRLFIPGFAEMAAPLYPLTKPGTLFSWGPDQQKAYQEIKQALLTAPALGLPDLTKPFELFVDEKQGYAKGVLTQKLGPWRRPVAYLSKKLDPVAAGWPPCLRMVAAIAVLTKDAGKLTMGQPLVILAPHAVEALVKQPPDRWLSNARMTHYQAMLLDTDRVQFGPVVALNPATLLPLPEEGAPHDCLEILAETHGTRPDLTDQPIPDADHTWYTDGSSFLQEGQRKAGAAVTTETEVIWAGALPAGTSAQRAELIALTQALKMAEGKRLNVYTDSRYAFATAHIHGEIYRRRGWLTSEGREIKNKSEILALLKALFLPKRLSIIHCLGHQKGDSAEARGNRLADQAAREAAIKTPPDTSTLLIAGKRTADGSEFEKRTADGSEFESPKKKAKVE

SEQ ID NO: 2137 - protein, 2097 aa, synthetic construct
MPAAKRVKLDGGDKKYSIGLDIGTNSVGWAVITDEYKVPSKKFKVLGNTDRHSIKKNLIGALLFDSGETAEATRLKRTARRRYTRRKNRICYLQEIFSNEMAKVDDSFFHRLEESFLVEEDKKHERHPIFGNIVDEVAYHEKYPTIYHLRKKLVDSTDKADLRLIYLALAHMIKFRGHFLIEGDLNPDNSDVDKLFIQLVQTYNQLFEENPINASGVDAKAILSARLSKSRRLENLIAQLPGEKKNGLFGNLIALSLGLTPNFKSNFDLAEDAKLQLSKDTYDDDLDNLLAQIGDQYADLFLAAKNLSDAILLSDILRVNTEITKAPLSASMIKRYDEHHQDLTLLKALVRQQLPEKYKEIFFDQSKNGYAGYIDGGASQEEFYKFIKPILEKMDGTEELLVKLNREDLLRKQRTFDNGSIPHQIHLGELHAILRRQEDFYPFLKDNREKIEKILTFRIPYYVGPLARGNSRFAWMTRKSEETITPWNFEEVVDKGASAQSFIERMTNFDKNLPNEKVLPKHSLLYEYFTVYNELTKVKYVTEGMRKPAFLSGEQKKAIVDLLFKTNRKVTVKQLKEDYFKKIECFDSVEISGVEDRFNASLGTYHDLLKIIKDKDFLDNEENEDILEDIVLTLTLFEDREMIEERLKTYAHLFDDKVMKQLKRRRYTGWGRLSRKLINGIRDKQSGKTILDFLKSDGFANRNFMQLIHDDSLTFKEDIQKAQVSGQGDSLHEHIANLAGSPAIKKGILQTVKVVDELVKVMGRHKPENIVIEMARENQTTQKGQKNSRERMKRIEEGIKELGSQILKEHPVENTQLQNEKLYLYYLQNGRDMYVDQELDINRLSDYDVDHIVPQSFLKDDSIDNKVLTRSDKARGKSDNVPSEEVVKKMKNYWRQLLNAKLITQRKFDNLTKAERGGLSELDKAGFIKRQLVETRQITKHVAQILDSRMNTKYDENDKLIREVKVITLKSKLVSDFRKDFQFYKVREINNYHHAHDAYLNAVVGTALIKKYPKLESEFVYGDYKVYDVRKMIAKSEQEIGKATAKYFFYSNIMNFFKTEITLANGEIRKRPLIETNGETGEIVWDKGRDFATVRKVLSMPQVNIVKKTEVQTGGFSKESILPKRNSDKLIARKKDWDPKKYGGFDSPTVAYSVLVVAKVEKGKSKKLKSVKELLGITIMERSSFEKNPIDFLEAKGYKEVKKDLIIKLPKYSLFELENGRKRMLASAGELQKGNELALPSKYVNFLYLASHYEKLKGSPEDNEQKQLFVEQHKHYLDEIIEQISEFSKRVILADANLDKVLSAYNKHRDKPIREQAENIIHLFTLTNLGAPAAFKYFDTTIDRKRYTSTKEVLDATLIHQSITGLYETRIDLSQLGGDGGGGSGGSGGSGGSGGLGIEDEYRLHETSTEPDVSLGSTWLSDFPQAWAETGGMGLAVRQAPLIIPLKATSTPVSIQQYPMSHEARLGIKPHIQRLLDQGILVPCQSPWNTPLLPVKKPGTNDYRPVQDLREVNKRVEDIHPTVPNPYNLLSGLPPSHQWYTVLDLKDAFFCLRLHPTSQPLFAFEWRDPGMGISGQLTWTRLPQGFKNSPTLFNEALHRDLADFRIQHPDLILLQYVDDILLAATSELDCQQGTRALLQTLGDLGYRASAKKAQICQKQVKYLGYLLREGQRWLTEARKETVMGQPVPKTPRQLREFLGKAGFCRLFIPGFAEMAAPLYPLTKPGTLFSWGPDQQKAYQEIKQALLTAPALGLPDLTKPFELFVDEKQGYAKGVLTQKLGPWRRPVAYLSKKLDPVAAGWPPCLRMVAAIAVLTKDAGKLTMGQPLVILAPHAVEALVKQPPDRWLSNARMTHYQAMLLDTDRVQFGPVVALNPATLLPLPEEGAPHDCLEILAETHGTRPDLTDQPIPDADHTWYTDGSSFLQEGQRKAGAAVTTETEVIWAGALPAGTSAQRAELIALTQALKMAEGKRLNVYTDSRYAFATAHIHGEIYRRRGWLTSEGREIKNKSEILALLKALFLPKRLSIIHCLGHQKGDSAEARGNRLADQAAREAAIKTPPDTSTLLIAGKRTADGSEFEKRTADGSEFESPKKKAKVE

SEQ ID NO: 2138 - protein, 2094 aa, synthetic construct; identical to SEQ ID NO: 2061

SEQ ID NO: 2139 - protein, 2096 aa, synthetic construct
MPAAKRVKLDGGDKKYSIGLDIGTNSVGWAVITDEYKVPSKKFKVLGNTDRHSIKKNLIGALLFDSGETAEATRLKRTARRRYTRRKNRICYLQEIFSNEMAKVDDSFFHRLEESFLVEEDKKHERHPIFGNIVDEVAYHEKYPTIYHLRKKLVDSTDKADLRLIYLALAHMIKFRGHFLIEGDLNPDNSDVDKLFIQLVQTYNQLFEENPINASGVDAKAILSARLSKSRRLENLIAQLPGEKKNGLFGNLIALSLGLTPNFKSNFDLAEDAKLQLSKDTYDDDLDNLLAQIGDQYADLFLAAKNLSDAILLSDILRVNTEITKAPLSASMIKRYDEHHQDLTLLKALVRQQLPEKYKEIFFDQSKNGYAGYIDGGASQEEFYKFIKPILEKMDGTEELLVKLNREDLLRKQRTFDNGSIPHQIHLGELHAILRRQEDFYPFLKDNREKIEKILTFRIPYYVGPLARGNSRFAWMTRKSEETITPWNFEEVVDKGASAQSFIERMTNFDKNLPNEKVLPKHSLLYEYFTVYNELTKVKYVTEGMRKPAFLSGEQKKAIVDLLFKTNRKVTVKQLKEDYFKKIECFDSVEISGVEDRFNASLGTYHDLLKIIKDKDFLDNEENEDILEDIVLTLTLFEDREMIEERLKTYAHLFDDKVMKQLKRRRYTGWGRLSRKLINGIRDKQSGKTILDFLKSDGFANRNFMQLIHDDSLTFKEDIQKAQVSGQGDSLHEHIANLAGSPAIKKGILQTVKVVDELVKVMGRHKPENIVIEMARENQTTQKGQKNSRERMKRIEEGIKELGSQILKEHPVENTQLQNEKLYLYYLQNGRDMYVDQELDINRLSDYDVDHIVPQSFLKDDSIDNKVLTRSDKARGKSDNVPSEEVVKKMKNYWRQLLNAKLITQRKFDNLTKAERGGLSELDKAGFIKRQLVETRQITKHVAQILDSRMNTKYDENDKLIREVKVITLKSKLVSDFRKDFQFYKVREINNYHHAHDAYLNAVVGTALIKKYPKLESEFVYGDYKVYDVRKMIAKSEQEIGKATAKYFFYSNIMNFFKTEITLANGEIRKRPLIETNGETGEIVWDKGRDFATVRKVLSMPQVNIVKKTEVQTGGFSKESILPKRNSDKLIARKKDWDPKKYGGFDSPTVAYSVLVVAKVEKGKSKKLKSVKELLGITIMERSSFEKNPIDFLEAKGYKEVKKDLIIKLPKYSLFELENGRKRMLASAGELQKGNELALPSKYVNFLYLASHYEKLKGSPEDNEQKQLFVEQHKHYLDEIIEQISEFSKRVILADANLDKVLSAYNKHRDKPIREQAENIIHLFTLTNLGAPAAFKYFDTTIDRKRYTSTKEVLDATLIHQSITGLYETRIDLSQLGGDGGGGSPAPEAAAKGGLGIEDEYRLHETSTEPDVSLGSTWLSDFPQAWAETGGMGLAVRQAPLIIPLKATSTPVSIQQYPMSHEARLGIKPHIQRLLDQGILVPCQSPWNTPLLPVKKPGTNDYRPVQDLREVNKRVEDIHPTVPNPYNLLSGLPPSHQWYTVLDLKDAFFCLRLHPTSQPLFAFEWRDPGMGISGQLTWTRLPQGFKNSPTLFNEALHRDLADFRIQHPDLILLQYVDDILLAATSELDCQQGTRALLQTLGDLGYRASAKKAQICQKQVKYLGYLLREGQRWLTEARKETVMGQPVPKTPRQLREFLGKAGFCRLFIPGFAEMAAPLYPLTKPGTLFSWGPDQQKAYQEIKQALLTAPALGLPDLTKPFELFVDEKQGYAKGVLTQKLGPWRRPVAYLSKKLDPVAAGWPPCLRMVAAIAVLTKDAGKLTMGQPLVILAPHAVEALVKQPPDRWLSNARMTHYQAMLLDTDRVQFGPVVALNPATLLPLPEEGAPHDCLEILAETHGTRPDLTDQPIPDADHTWYTDGSSFLQEGQRKAGAAVTTETEVIWAGALPAGTSAQRAELIALTQALKMAEGKRLNVYTDSRYAFATAHIHGEIYRRRGWLTSEGREIKNKSEILALLKALFLPKRLSIIHCLGHQKGDSAEARGNRLADQAAREAAIKTPPDTSTLLIAGKRTADGSEFEKRTADGSEFESPKKKAKVE

SEQ ID NO: 2140 - protein, 2103 aa, synthetic construct
MPAAKRVKLDGGDKKYSIGLDIGTNSVGWAVITDEYKVPSKKFKVLGNTDRHSIKKNLIGALLFDSGETAEATRLKRTARRRYTRRKNRICYLQEIFSNEMAKVDDSFFHRLEESFLVEEDKKHERHPIFGNIVDEVAYHEKYPTIYHLRKKLVDSTDKADLRLIYLALAHMIKFRGHFLIEGDLNPDNSDVDKLFIQLVQTYNQLFEENPINASGVDAKAILSARLSKSRRLENLIAQLPGEKKNGLFGNLIALSLGLTPNFKSNFDLAEDAKLQLSKDTYDDDLDNLLAQIGDQYADLFLAAKNLSDAILLSDILRVNTEITKAPLSASMIKRYDEHHQDLTLLKALVRQQLPEKYKEIFFDQSKNGYAGYIDGGASQEEFYKFIKPILEKMDGTEELLVKLNREDLLRKQRTFDNGSIPHQIHLGELHAILRRQEDFYPFLKDNREKIEKILTFRIPYYVGPLARGNSRFAWMTRKSEETITPWNFEEVVDKGASAQSFIERMTNFDKNLPNEKVLPKHSLLYEYFTVYNELTKVKYVTEGMRKPAFLSGEQKKAIVDLLFKTNRKVTVKQLKEDYFKKIECFDSVEISGVEDRFNASLGTYHDLLKIIKDKDFLDNEENEDILEDIVLTLTLFEDREMIEERLKTYAHLFDDKVMKQLKRRRYTGWGRLSRKLINGIRDKQSGKTILDFLKSDGFANRNFMQLIHDDSLTFKEDIQKAQVSGQGDSLHEHIANLAGSPAIKKGILQTVKVVDELVKVMGRHKPENIVIEMARENQTTQKGQKNSRERMKRIEEGIKELGSQILKEHPVENTQLQNEKLYLYYLQNGRDMYVDQELDINRLSDYDVDHIVPQSFLKDDSIDNKVLTRSDKARGKSDNVPSEEVVKKMKNYWRQLLNAKLITQRKFDNLTKAERGGLSELDKAGFIKRQLVETRQITKHVAQILDSRMNTKYDENDKLIREVKVITLKSKLVSDFRKDFQFYKVREINNYHHAHDAYLNAVVGTALIKKYPKLESEFVYGDYKVYDVRKMIAKSEQEIGKATAKYFFYSNIMNFFKTEITLANGEIRKRPLIETNGETGEIVWDKGRDFATVRKVLSMPQVNIVKKTEVQTGGFSKESILPKRNSDKLIARKKDWDPKKYGGFDSPTVAYSVLVVAKVEKGKSKKLKSVKELLGITIMERSSFEKNPIDFLEAKGYKEVKKDLIIKLPKYSLFELENGRKRMLASAGELQKGNELALPSKYVNFLYLASHYEKLKGSPEDNEQKQLFVEQHKHYLDEIIEQISEFSKRVILADANLDKVLSAYNKHRDKPIREQAENIIHLFTLTNLGAPAAFKYFDTTIDRKRYTSTKEVLDATLIHQSITGLYETRIDLSQLGGDGGGSSGSSGSSGSSGSSGSSGGLGIEDEYRLHETSTEPDVSLGSTWLSDFPQAWAETGGMGLAVRQAPLIIPLKATSTPVSIQQYPMSHEARLGIKPHIQRLLDQGILVPCQSPWNTPLLPVKKPGTNDYRPVQDLREVNKRVEDIHPTVPNPYNLLSGLPPSHQWYTVLDLKDAFFCLRLHPTSQPLFAFEWRDPGMGISGQLTWTRLPQGFKNSPTLFNEALHRDLADFRIQHPDLILLQYVDDILLAATSELDCQQGTRALLQTLGDLGYRASAKKAQICQKQVKYLGYLLREGQRWLTEARKETVMGQPVPKTPRQLREFLGKAGFCRLFIPGFAEMAAPLYPLTKPGTLFSWGPDQQKAYQEIKQALLTAPALGLPDLTKPFELFVDEKQGYAKGVLTQKLGPWRRPVAYLSKKLDPVAAGWPPCLRMVAAIAVLTKDAGKLTMGQPLVILAPHAVEALVKQPPDRWLSNARMTHYQAMLLDTDRVQFGPVVALNPATLLPLPEEGAPHDCLEILAETHGTRPDLTDQPIPDADHTWYTDGSSFLQEGQRKAGAAVTTETEVIWAGALPAGTSAQRAELIALTQALKMAEGKRLNVYTDSRYAFATAHIHGEIYRRRGWLTSEGREIKNKSEILALLKALFLPKRLSIIHCLGHQKGDSAEARGNRLADQAAREAAIKTPPDTSTLLIAGKRTADGSEFEKRTADGSEFESPKKKAKVE

SEQ ID NO: 2141 - protein, 2096 aa, synthetic construct
MPAAKRVKLDGGDKKYSIGLDIGTNSVGWAVITDEYKVPSKKFKVLGNTDRHSIKKNLIGALLFDSGETAEATRLKRTARRRYTRRKNRICYLQEIFSNEMAKVDDSFFHRLEESFLVEEDKKHERHPIFGNIVDEVAYHEKYPTIYHLRKKLVDSTDKADLRLIYLALAHMIKFRGHFLIEGDLNPDNSDVDKLFIQLVQTYNQLFEENPINASGVDAKAILSARLSKSRRLENLIAQLPGEKKNGLFGNLIALSLGLTPNFKSNFDLAEDAKLQLSKDTYDDDLDNLLAQIGDQYADLFLAAKNLSDAILLSDILRVNTEITKAPLSASMIKRYDEHHQDLTLLKALVRQQLPEKYKEIFFDQSKNGYAGYIDGGASQEEFYKFIKPILEKMDGTEELLVKLNREDLLRKQRTFDNGSIPHQIHLGELHAILRRQEDFYPFLKDNREKIEKILTFRIPYYVGPLARGNSRFAWMTRKSEETITPWNFEEVVDKGASAQSFIERMTNFDKNLPNEKVLPKHSLLYEYFTVYNELTKVKYVTEGMRKPAFLSGEQKKAIVDLLFKTNRKVTVKQLKEDYFKKIECFDSVEISGVEDRFNASLGTYHDLLKIIKDKDFLDNEENEDILEDIVLTLTLFEDREMIEERLKTYAHLFDDKVMKQLKRRRYTGWGRLSRKLINGIRDKQSGKTILDFLKSDGFANRNFMQLIHDDSLTFKEDIQKAQVSGQGDSLHEHIANLAGSPAIKKGILQTVKVVDELVKVMGRHKPENIVIEMARENQTTQKGQKNSRERMKRIEEGIKELGSQILKEHPVENTQLQNEKLYLYYLQNGRDMYVDQELDINRLSDYDVDHIVPQSFLKDDSIDNKVLTRSDKARGKSDNVPSEEVVKKMKNYWRQLLNAKLITQRKFDNLTKAERGGLSELDKAGFIKRQLVETRQITKHVAQILDSRMNTKYDENDKLIREVKVITLKSKLVSDFRKDFQFYKVREINNYHHAHDAYLNAVVGTALIKKYPKLESEFVYGDYKVYDVRKMIAKSEQEIGKATAKYFFYSNIMNFFKTEITLANGEIRKRPLIETNGETGEIVWDKGRDFATVRKVLSMPQVNIVKKTEVQTGGFSKESILPKRNSDKLIARKKDWDPKKYGGFDSPTVAYSVLVVAKVEKGKSKKLKSVKELLGITIMERSSFEKNPIDFLEAKGYKEVKKDLIIKLPKYSLFELENGRKRMLASAGELQKGNELALPSKYVNFLYLASHYEKLKGSPEDNEQKQLFVEQHKHYLDEIIEQISEFSKRVILADANLDKVLSAYNKHRDKPIREQAENIIHLFTLTNLGAPAAFKYFDTTIDRKRYTSTKEVLDATLIHQSITGLYETRIDLSQLGGDGGEAAAKGSSGGGGGLGIEDEYRLHETSTEPDVSLGSTWLSDFPQAWAETGGMGLAVRQAPLIIPLKATSTPVSIQQYPMSHEARLGIKPHIQRLLDQGILVPCQSPWNTPLLPVKKPGTNDYRPVQDLREVNKRVEDIHPTVPNPYNLLSGLPPSHQWYTVLDLKDAFFCLRLHPTSQPLFAFEWRDPGMGISGQLTWTRLPQGFKNSPTLFNEALHRDLADFRIQHPDLILLQYVDDILLAATSELDCQQGTRALLQTLGDLGYRASAKKAQICQKQVKYLGYLLREGQRWLTEARKETVMGQPVPKTPRQLREFLGKAGFCRLFIPGFAEMAAPLYPLTKPGTLFSWGPDQQKAYQEIKQALLTAPALGLPDLTKPFELFVDEKQGYAKGVLTQKLGPWRRPVAYLSKKLDPVAAGWPPCLRMVAAIAVLTKDAGKLTMGQPLVILAPHAVEALVKQPPDRWLSNARMTHYQAMLLDTDRVQFGPVVALNPATLLPLPEEGAPHDCLEILAETHGTRPDLTDQPIPDADHTWYTDGSSFLQEGQRKAGAAVTTETEVIWAGALPAGTSAQRAELIALTQALKMAEGKRLNVYTDSRYAFATAHIHGEIYRRRGWLTSEGREIKNKSEILALLKALFLPKRLSIIHCLGHQKGDSAEARGNRLADQAAREAAIKTPPDTSTLLIAGKRTADGSEFEKRTADGSEFESPKKKAKVE

SEQ ID NO: 2142 - protein, 2094 aa, synthetic construct
MPAAKRVKLDGGDKKYSIGLDIGTNSVGWAVITDEYKVPSKKFKVLGNTDRHSIKKNLIGALLFDSGETAEATRLKRTARRRYTRRKNRICYLQEIFSNEMAKVDDSFFHRLEESFLVEEDKKHERHPIFGNIVDEVAYHEKYPTIYHLRKKLVDSTDKADLRLIYLALAHMIKFRGHFLIEGDLNPDNSDVDKLFIQLVQTYNQLFEENPINASGVDAKAILSARLSKSRRLENLIAQLPGEKKNGLFGNLIALSLGLTPNFKSNFDLAEDAKLQLSKDTYDDDLDNLLAQIGDQYADLFLAAKNLSDAILLSDILRVNTEITKAPLSASMIKRYDEHHQDLTLLKALVRQQLPEKYKEIFFDQSKNGYAGYIDGGASQEEFYKFIKPILEKMDGTEELLVKLNREDLLRKQRTFDNGSIPHQIHLGELHAILRRQEDFYPFLKDNREKIEKILTFRIPYYVGPLARGNSRFAWMTRKSEETITPWNFEEVVDKGASAQSFIERMTNFDKNLPNEKVLPKHSLLYEYFTVYNELTKVKYVTEGMRKPAFLSGEQKKAIVDLLFKTNRKVTVKQLKEDYFKKIECFDSVEISGVEDRFNASLGTYHDLLKIIKDKDFLDNEENEDILEDIVLTLTLFEDREMIEERLKTYAHLFDDKVMKQLKRRRYTGWGRLSRKLINGIRDKQSGKTILDFLKSDGFANRNFMQLIHDDSLTFKEDIQKAQVSGQGDSLHEHIANLAGSPAIKKGILQTVKVVDELVKVMGRHKPENIVIEMARENQTTQKGQKNSRERMKRIEEGIKELGSQILKEHPVENTQLQNEKLYLYYLQNGRDMYVDQELDINRLSDYDVDHIVPQSFLKDDSIDNKVLTRSDKARGKSDNVPSEEVVKKMKNYWRQLLNAKLITQRKFDNLTKAERGGLSELDKAGFIKRQLVETRQITKHVAQILDSRMNTKYDENDKLIREVKVITLKSKLVSDFRKDFQFYKVREINNYHHAHDAYLNAVVGTALIKKYPKLESEFVYGDYKVYDVRKMIAKSEQEIGKATAKYFFYSNIMNFFKTEITLANGEIRKRPLIETNGETGEIVWDKGRDFATVRKVLSMPQVNIVKKTEVQTGGFSKESILPKRNSDKLIARKKDWDPKKYGGFDSPTVAYSVLVVAKVEKGKSKKLKSVKELLGITIMERSSFEKNPIDFLEAKGYKEVKKDLIIKLPKYSLFELENGRKRMLASAGELQKGNELALPSKYVNFLYLASHYEKLKGSPEDNEQKQLFVEQHKHYLDEIIEQISEFSKRVILADANLDKVLSAYNKHRDKPIREQAENIIHLFTLTNLGAPAAFKYFDTTIDRKRYTSTKEVLDATLIHQSITGLYETRIDLSQLGGDGGGSSGSSGSSGGLGIEDEYRLHETSTEPDVSLGSTWLSDFPQAWAETGGMGLAVRQAPLIIPLKATSTPVSIQQYPMSHEARLGIKPHIQRLLDQGILVPCQSPWNTPLLPVKKPGTNDYRPVQDLREVNKRVEDIHPTVPNPYNLLSGLPPSHQWYTVLDLKDAFFCLRLHPTSQPLFAFEWRDPGMGISGQLTWTRLPQGFKNSPTLFNEALHRDLADFRIQHPDLILLQYVDDILLAATSELDCQQGTRALLQTLGDLGYRASAKKAQICQKQVKYLGYLLREGQRWLTEARKETVMGQPVPKTPRQLREFLGKAGFCRLFIPGFAEMAAPLYPLTKPGTLFSWGPDQQKAYQEIKQALLTAPALGLPDLTKPFELFVDEKQGYAKGVLTQKLGPWRRPVAYLSKKLDPVAAGWPPCLRMVAAIAVLTKDAGKLTMGQPLVILAPHAVEALVKQPPDRWLSNARMTHYQAMLLDTDRVQFGPVVALNPATLLPLPEEGAPHDCLEILAETHGTRPDLTDQPIPDADHTWYTDGSSFLQEGQRKAGAAVTTETEVIWAGALPAGTSAQRAELIALTQALKMAEGKRLNVYTDSRYAFATAHIHGEIYRRRGWLTSEGREIKNKSEILALLKALFLPKRLSIIHCLGHQKGDSAEARGNRLADQAAREAAIKTPPDTSTLLIAGKRTADGSEFEKRTADGSEFESPKKKAKVE

SEQ ID NO: 2143 - protein, 2094 aa, synthetic construct
MPAAKRVKLDGGDKKYSIGLDIGTNSVGWAVITDEYKVPSKKFKVLGNTDRHSIKKNLIGALLFDSGETAEATRLKRTARRRYTRRKNRICYLQEIFSNEMAKVDDSFFHRLEESFLVEEDKKHERHPIFGNIVDEVAYHEKYPTIYHLRKKLVDSTDKADLRLIYLALAHMIKFRGHFLIEGDLNPDNSDVDKLFIQLVQTYNQLFEENPINASGVDAKAILSARLSKSRRLENLIAQLPGEKKNGLFGNLIALSLGLTPNFKSNFDLAEDAKLQLSKDTYDDDLDNLLAQIGDQYADLFLAAKNLSDAILLSDILRVNTEITKAPLSASMIKRYDEHHQDLTLLKALVRQQLPEKYKEIFFDQSKNGYAGYIDGGASQEEFYKFIKPILEKMDGTEELLVKLNREDLLRKQRTFDNGSIPHQIHLGELHAILRRQEDFYPFLKDNREKIEKILTFRIPYYVGPLARGNSRFAWMTRKSEETITPWNFEEVVDKGASAQSFIERMTNFDKNLPNEKVLPKHSLLYEYFTVYNELTKVKYVTEGMRKPAFLSGEQKKAIVDLLFKTNRKVTVKQLKEDYFKKIECFDSVEISGVEDRFNASLGTYHDLLKIIKDKDFLDNEENEDILEDIVLTLTLFEDREMIEERLKTYAHLFDDKVMKQLKRRRYTGWGRLSRKLINGIRDKQSGKTILDFLKSDGFANRNFMQLIHDDSLTFKEDIQKAQVSGQGDSLHEHIANLAGSPAIKKGILQTVKVVDELVKVMGRHKPENIVIEMARENQTTQKGQKNSRERMKRIEEGIKELGSQILKEHPVENTQLQNEKLYLYYLQNGRDMYVDQELDINRLSDYDVDHIVPQSFLKDDSIDNKVLTRSDKARGKSDNVPSEEVVKKMKNYWRQLLNAKLITQRKFDNLTKAERGGLSELDKAGFIKRQLVETRQITKHVAQILDSRMNTKYDENDKLIREVKVITLKSKLVSDFRKDFQFYKVREINNYHHAHDAYLNAVVGTALIKKYPKLESEFVYGDYKVYDVRKMIAKSEQEIGKATAKYFFYSNIMNFFKTEITLANGEIRKRPLIETNGETGEIVWDKGRDFATVRKVLSMPQVNIVKKTEVQTGGFSKESILPKRNSDKLIARKKDWDPKKYGGFDSPTVAYSVLVVAKVEKGKSKKLKSVKELLGITIMERSSFEKNPIDFLEAKGYKEVKKDLIIKLPKYSLFELENGRKRMLASAGELQKGNELALPSKYVNFLYLASHYEKLKGSPEDNEQKQLFVEQHKHYLDEIIEQISEFSKRVILADANLDKVLSAYNKHRDKPIREQAENIIHLFTLTNLGAPAAFKYFDTTIDRKRYTSTKEVLDATLIHQSITGLYETRIDLSQLGGDGGGSSGGSPAPGGLGIEDEYRLHETSTEPDVSLGSTWLSDFPQAWAETGGMGLAVRQAPLIIPLKATSTPVSIQQYPMSHEARLGIKPHIQRLLDQGILVPCQSPWNTPLLPVKKPGTNDYRPVQDLREVNKRVEDIHPTVPNPYNLLSGLPPSHQWYTVLDLKDAFFCLRLHPTSQPLFAFEWRDPGMGISGQLTWTRLPQGFKNSPTLFNEALHRDLADFRIQHPDLILLQYVDDILLAATSELDCQQGTRALLQTLGDLGYRASAKKAQICQKQVKYLGYLLREGQRWLTEARKETVMGQPVPKTPRQLREFLGKAGFCRLFIPGFAEMAAPLYPLTKPGTLFSWGPDQQKAYQEIKQALLTAPALGLPDLTKPFELFVDEKQGYAKGVLTQKLGPWRRPVAYLSKKLDPVAAGWPPCLRMVAAIAVLTKDAGKLTMGQPLVILAPHAVEALVKQPPDRWLSNARMTHYQAMLLDTDRVQFGPVVALNPATLLPLPEEGAPHDCLEILAETHGTRPDLTDQPIPDADHTWYTDGSSFLQEGQRKAGAAVTTETEVIWAGALPAGTSAQRAELIALTQALKMAEGKRLNVYTDSRYAFATAHIHGEIYRRRGWLTSEGREIKNKSEILALLKALFLPKRLSIIHCLGHQKGDSAEARGNRLADQAAREAAIKTPPDTSTLLIAGKRTADGSEFEKRTADGSEFESPKKKAKVE

SEQ ID NO: 2144 - protein, 2090 aa, synthetic construct
MPAAKRVKLDGGDKKYSIGLDIGTNSVGWAVITDEYKVPSKKFKVLGNTDRHSIKKNLIGALLFDSGETAEATRLKRTARRRYTRRKNRICYLQEIFSNEMAKVDDSFFHRLEESFLVEEDKKHERHPIFGNIVDEVAYHEKYPTIYHLRKKLVDSTDKADLRLIYLALAHMIKFRGHFLIEGDLNPDNSDVDKLFIQLVQTYNQLFEENPINASGVDAKAILSARLSKSRRLENLIAQLPGEKKNGLFGNLIALSLGLTPNFKSNFDLAEDAKLQLSKDTYDDDLDNLLAQIGDQYADLFLAAKNLSDAILLSDILRVNTEITKAPLSASMIKRYDEHHQDLTLLKALVRQQLPEKYKEIFFDQSKNGYAGYIDGGASQEEFYKFIKPILEKMDGTEELLVKLNREDLLRKQRTFDNGSIPHQIHLGELHAILRRQEDFYPFLKDNREKIEKILTFRIPYYVGPLARGNSRFAWMTRKSEETITPWNFEEVVDKGASAQSFIERMTNFDKNLPNEKVLPKHSLLYEYFTVYNELTKVKYVTEGMRKPAFLSGEQKKAIVDLLFKTNRKVTVKQLKEDYFKKIECFDSVEISGVEDRFNASLGTYHDLLKIIKDKDFLDNEENEDILEDIVLTLTLFEDREMIEERLKTYAHLFDDKVMKQLKRRRYTGWGRLSRKLINGIRDKQSGKTILDFLKSDGFANRNFMQLIHDDSLTFKEDIQKAQVSGQGDSLHEHIANLAGSPAIKKGILQTVKVVDELVKVMGRHKPENIVIEMARENQTTQKGQKNSRERMKRIEEGIKELGSQILKEHPVENTQLQNEKLYLYYLQNGRDMYVDQELDINRLSDYDVDHIVPQSFLKDDSIDNKVLTRSDKARGKSDNVPSEEVVKKMKNYWRQLLNAKLITQRKFDNLTKAERGGLSELDKAGFIKRQLVETRQITKHVAQILDSRMNTKYDENDKLIREVKVITLKSKLVSDFRKDFQFYKVREINNYHHAHDAYLNAVVGTALIKKYPKLESEFVYGDYKVYDVRKMIAKSEQEIGKATAKYFFYSNIMNFFKTEITLANGEIRKRPLIETNGETGEIVWDKGRDFATVRKVLSMPQVNIVKKTEVQTGGFSKESILPKRNSDKLIARKKDWDPKKYGGFDSPTVAYSVLVVAKVEKGKSKKLKSVKELLGITIMERSSFEKNPIDFLEAKGYKEVKKDLIIKLPKYSLFELENGRKRMLASAGELQKGNELALPSKYVNFLYLASHYEKLKGSPEDNEQKQLFVEQHKHYLDEIIEQISEFSKRVILADANLDKVLSAYNKHRDKPIREQAENIIHLFTLTNLGAPAAFKYFDTTIDRKRYTSTKEVLDATLIHQSITGLYETRIDLSQLGGDGGPAPAPGGLGIEDEYRLHETSTEPDVSLGSTWLSDFPQAWAETGGMGLAVRQAPLIIPLKATSTPVSIQQYPMSHEARLGIKPHIQRLLDQGILVPCQSPWNTPLLPVKKPGTNDYRPVQDLREVNKRVEDIHPTVPNPYNLLSGLPPSHQWYTVLDLKDAFFCLRLHPTSQPLFAFEWRDPGMGISGQLTWTRLPQGFKNSPTLFNEALHRDLADFRIQHPDLILLQYVDDILLAATSELDCQQGTRALLQTLGDLGYRASAKKAQICQKQVKYLGYLLREGQRWLTEARKETVMGQPVPKTPRQLREFLGKAGFCRLFIPGFAEMAAPLYPLTKPGTLFSWGPDQQKAYQEIKQALLTAPALGLPDLTKPFELFVDEKQGYAKGVLTQKLGPWRRPVAYLSKKLDPVAAGWPPCLRMVAAIAVLTKDAGKLTMGQPLVILAPHAVEALVKQPPDRWLSNARMTHYQAMLLDTDRVQFGPVVALNPATLLPLPEEGAPHDCLEILAETHGTRPDLTDQPIPDADHTWYTDGSSFLQEGQRKAGAAVTTETEVIWAGALPAGTSAQRAELIALTQALKMAEGKRLNVYTDSRYAFATAHIHGEIYRRRGWLTSEGREIKNKSEILALLKALFLPKRLSIIHCLGHQKGDSAEARGNRLADQAAREAAIKTPPDTSTLLIAGKRTADGSEFEKRTADGSEFESPKKKAKVE

SEQ ID NO: 2145 - protein, 2096 aa, synthetic construct
MPAAKRVKLDGGDKKYSIGLDIGTNSVGWAVITDEYKVPSKKFKVLGNTDRHSIKKNLIGALLFDSGETAEATRLKRTARRRYTRRKNRICYLQEIFSNEMAKVDDSFFHRLEESFLVEEDKKHERHPIFGNIVDEVAYHEKYPTIYHLRKKLVDSTDKADLRLIYLALAHMIKFRGHFLIEGDLNPDNSDVDKLFIQLVQTYNQLFEENPINASGVDAKAILSARLSKSRRLENLIAQLPGEKKNGLFGNLIALSLGLTPNFKSNFDLAEDAKLQLSKDTYDDDLDNLLAQIGDQYADLFLAAKNLSDAILLSDILRVNTEITKAPLSASMIKRYDEHHQDLTLLKALVRQQLPEKYKEIFFDQSKNGYAGYIDGGASQEEFYKFIKPILEKMDGTEELLVKLNREDLLRKQRTFDNGSIPHQIHLGELHAILRRQEDFYPFLKDNREKIEKILTFRIPYYVGPLARGNSRFAWMTRKSEETITPWNFEEVVDKGASAQSFIERMTNFDKNLPNEKVLPKHSLLYEYFTVYNELTKVKYVTEGMRKPAFLSGEQKKAIVDLLFKTNRKVTVKQLKEDYFKKIECFDSVEISGVEDRFNASLGTYHDLLKIIKDKDFLDNEENEDILEDIVLTLTLFEDREMIEERLKTYAHLFDDKVMKQLKRRRYTGWGRLSRKLINGIRDKQSGKTILDFLKSDGFANRNFMQLIHDDSLTFKEDIQKAQVSGQGDSLHEHIANLAGSPAIKKGILQTVKVVDELVKVMGRHKPENIVIEMARENQTTQKGQKNSRERMKRIEEGIKELGSQILKEHPVENTQLQNEKLYLYYLQNGRDMYVDQELDINRLSDYDVDHIVPQSFLKDDSIDNKVLTRSDKARGKSDNVPSEEVVKKMKNYWRQLLNAKLITQRKFDNLTKAERGGLSELDKAGFIKRQLVETRQITKHVAQILDSRMNTKYDENDKLIREVKVITLKSKLVSDFRKDFQFYKVREINNYHHAHDAYLNAVVGTALIKKYPKLESEFVYGDYKVYDVRKMIAKSEQEIGKATAKYFFYSNIMNFFKTEITLANGEIRKRPLIETNGETGEIVWDKGRDFATVRKVLSMPQVNIVKKTEVQTGGFSKESILPKRNSDKLIARKKDWDPKKYGGFDSPTVAYSVLVVAKVEKGKSKKLKSVKELLGITIMERSSFEKNPIDFLEAKGYKEVKKDLIIKLPKYSLFELENGRKRMLASAGELQKGNELALPSKYVNFLYLASHYEKLKGSPEDNEQKQLFVEQHKHYLDEIIEQISEFSKRVILADANLDKVLSAYNKHRDKPIREQAENIIHLFTLTNLGAPAAFKYFDTTIDRKRYTSTKEVLDATLIHQSITGLYETRIDLSQLGGDGGGGGGSSEAAAKGGLGIEDEYRLHETSTEPDVSLGSTWLSDFPQAWAETGGMGLAVRQAPLIIPLKATSTPVSIQQYPMSHEARLGIKPHIQRLLDQGILVPCQSPWNTPLLPVKKPGTNDYRPVQDLREVNKRVEDIHPTVPNPYNLLSGLPPSHQWYTVLDLKDAFFCLRLHPTSQPLFAFEWRDPGMGISGQLTWTRLPQGFKNSPTLFNEALHRDLADFRIQHPDLILLQYVDDILLAATSELDCQQGTRALLQTLGDLGYRASAKKAQICQKQVKYLGYLLREGQRWLTEARKETVMGQPVPKTPRQLREFLGKAGFCRLFIPGFAEMAAPLYPLTKPGTLFSWGPDQQKAYQEIKQALLTAPALGLPDLTKPFELFVDEKQGYAKGVLTQKLGPWRRPVAYLSKKLDPVAAGWPPCLRMVAAIAVLTKDAGKLTMGQPLVILAPHAVEALVKQPPDRWLSNARMTHYQAMLLDTDRVQFGPVVALNPATLLPLPEEGAPHDCLEILAETHGTRPDLTDQPIPDADHTWYTDGSSFLQEGQRKAGAAVTTETEVIWAGALPAGTSAQRAELIALTQALKMAEGKRLNVYTDSRYAFATAHIHGEIYRRRGWLTSEGREIKNKSEILALLKALFLPKRLSIIHCLGHQKGDSAEARGNRLADQAAREAAIKTPPDTSTLLIAGKRTADGSEFEKRTADGSEFESPKKKAKVE

SEQ ID NO: 2146 - protein, 2096 aa, synthetic construct
MPAAKRVKLDGGDKKYSIGLDIGTNSVGWAVITDEYKVPSKKFKVLGNTDRHSIKKNLIGALLFDSGETAEATRLKRTARRRYTRRKNRICYLQEIFSNEMAKVDDSFFHRLEESFLVEEDKKHERHPIFGNIVDEVAYHEKYPTIYHLRKKLVDSTDKADLRLIYLALAHMIKFRGHFLIEGDLNPDNSDVDKLFIQLVQTYNQLFEENPINASGVDAKAILSARLSKSRRLENLIAQLPGEKKNGLFGNLIALSLGLTPNFKSNFDLAEDAKLQLSKDTYDDDLDNLLAQIGDQYADLFLAAKNLSDAILLSDILRVNTEITKAPLSASMIKRYDEHHQDLTLLKALVRQQLPEKYKEIFFDQSKNGYAGYIDGGASQEEFYKFIKPILEKMDGTEELLVKLNREDLLRKQRTFDNGSIPHQIHLGELHAILRRQEDFYPFLKDNREKIEKILTFRIPYYVGPLARGNSRFAWMTRKSEETITPWNFEEVVDKGASAQSFIERMTNFDKNLPNEKVLPKHSLLYEYFTVYNELTKVKYVTEGMRKPAFLSGEQKKAIVDLLFKTNRKVTVKQLKEDYFKKIECFDSVEISGVEDRFNASLGTYHDLLKIIKDKDFLDNEENEDILEDIVLTLTLFEDREMIEERLKTYAHLFDDKVMKQLKRRRYTGWGRLSRKLINGIRDKQSGKTILDFLKSDGFANRNFMQLIHDDSLTFKEDIQKAQVSGQGDSLHEHIANLAGSPAIKKGILQTVKVVDELVKVMGRHKPENIVIEMARENQTTQKGQKNSRERMKRIEEGIKELGSQILKEHPVENTQLQNEKLYLYYLQNGRDMYVDQELDINRLSDYDVDHIVPQSFLKDDSIDNKVLTRSDKARGKSDNVPSEEVVKKMKNYWRQLLNAKLITQRKFDNLTKAERGGLSELDKAGFIKRQLVETRQITKHVAQILDSRMNTKYDENDKLIREVKVITLKSKLVSDFRKDFQFYKVREINNYHHAHDAYLNAVVGTALIKKYPKLESEFVYGDYKVYDVRKMIAKSEQEIGKATAKYFFYSNIMNFFKTEITLANGEIRKRPLIETNGETGEIVWDKGRDFATVRKVLSMPQVNIVKKTEVQTGGFSKESILPKRNSDKLIARKKDWDPKKYGGFDSPTVAYSVLVVAKVEKGKSKKLKSVKELLGITIMERSSFEKNPIDFLEAKGYKEVKKDLIIKLPKYSLFELENGRKRMLASAGELQKGNELALPSKYVNFLYLASHYEKLKGSPEDNEQKQLFVEQHKHYLDEIIEQISEFSKRVILADANLDKVLSAYNKHRDKPIREQAENIIHLFTLTNLGAPAAFKYFDTTIDRKRYTSTKEVLDATLIHQSITGLYETRIDLSQLGGDGGGGSEAAAKPAPGGLGIEDEYRLHETSTEPDVSLGSTWLSDFPQAWAETGGMGLAVRQAPLIIPLKATSTPVSIQQYPMSHEARLGIKPHIQRLLDQGILVPCQSPWNTPLLPVKKPGTNDYRPVQDLREVNKRVEDIHPTVPNPYNLLSGLPPSHQWYTVLDLKDAFFCLRLHPTSQPLFAFEWRDPGMGISGQLTWTRLPQGFKNSPTLFNEALHRDLADFRIQHPDLILLQYVDDILLAATSELDCQQGTRALLQTLGDLGYRASAKKAQICQKQVKYLGYLLREGQRWLTEARKETVMGQPVPKTPRQLREFLGKAGFCRLFIPGFAEMAAPLYPLTKPGTLFSWGPDQQKAYQEIKQALLTAPALGLPDLTKPFELFVDEKQGYAKGVLTQKLGPWRRPVAYLSKKLDPVAAGWPPCLRMVAAIAVLTKDAGKLTMGQPLVILAPHAVEALVKQPPDRWLSNARMTHYQAMLLDTDRVQFGPVVALNPATLLPLPEEGAPHDCLEILAETHGTRPDLTDQPIPDADHTWYTDGSSFLQEGQRKAGAAVTTETEVIWAGALPAGTSAQRAELIALTQALKMAEGKRLNVYTDSRYAFATAHIHGEIYRRRGWLTSEGREIKNKSEILALLKALFLPKRLSIIHCLGHQKGDSAEARGNRLADQAAREAAIKTPPDTSTLLIAGKRTADGSEFEKRTADGSEFESPKKKAKVE

SEQ ID NO: 2147 - protein, 2093 aa, synthetic construct
MPAAKRVKLDGGDKKYSIGLDIGTNSVGWAVITDEYKVPSKKFKVLGNTDRHSIKKNLIGALLFDSGETAEATRLKRTARRRYTRRKNRICYLQEIFSNEMAKVDDSFFHRLEESFLVEEDKKHERHPIFGNIVDEVAYHEKYPTIYHLRKKLVDSTDKADLRLIYLALAHMIKFRGHFLIEGDLNPDNSDVDKLFIQLVQTYNQLFEENPINASGVDAKAILSARLSKSRRLENLIAQLPGEKKNGLFGNLIALSLGLTPNFKSNFDLAEDAKLQLSKDTYDDDLDNLLAQIGDQYADLFLAAKNLSDAILLSDILRVNTEITKAPLSASMIKRYDEHHQDLTLLKALVRQQLPEKYKEIFFDQSKNGYAGYIDGGASQEEFYKFIKPILEKMDGTEELLVKLNREDLLRKQRTFDNGSIPHQIHLGELHAILRRQEDFYPFLKDNREKIEKILTFRIPYYVGPLARGNSRFAWMTRKSEETITPWNFEEVVDKGASAQSFIERMTNFDKNLPNEKVLPKHSLLYEYFTVYNELTKVKYVTEGMRKPAFLSGEQKKAIVDLLFKTNRKVTVKQLKEDYFKKIECFDSVEISGVEDRFNASLGTYHDLLKIIKDKDFLDNEENEDILEDIVLTLTLFEDREMIEERLKTYAHLFDDKVMKQLKRRRYTGWGRLSRKLINGIRDKQSGKTILDFLKSDGFANRNFMQLIHDDSLTFKEDIQKAQVSGQGDSLHEHIANLAGSPAIKKGILQTVKVVDELVKVMGRHKPENIVIEMARENQTTQKGQKNSRERMKRIEEGIKELGSQILKEHPVENTQLQNEKLYLYYLQNGRDMYVDQELDINRLSDYDVDHIVPQSFLKDDSIDNKVLTRSDKARGKSDNVPSEEVVKKMKNYWRQLLNAKLITQRKFDNLTKAERGGLSELDKAGFIKRQLVETRQITKHVAQILDSRMNTKYDENDKLIREVKVITLKSKLVSDFRKDFQFYKVREINNYHHAHDAYLNAVVGTALIKKYPKLESEFVYGDYKVYDVRKMIAKSEQEIGKATAKYFFYSNIMNFFKTEITLANGEIRKRPLIETNGETGEIVWDKGRDFATVRKVLSMPQVNIVKKTEVQTGGFSKESILPKRNSDKLIARKKDWDPKKYGGFDSPTVAYSVLVVAKVEKGKSKKLKSVKELLGITIMERSSFEKNPIDFLEAKGYKEVKKDLIIKLPKYSLFELENGRKRMLASAGELQKGNELALPSKYVNFLYLASHYEKLKGSPEDNEQKQLFVEQHKHYLDEIIEQISEFSKRVILADANLDKVLSAYNKHRDKPIREQAENIIHLFTLTNLGAPAAFKYFDTTIDRKRYTSTKEVLDATLIHQSITGLYETRIDLSQLGGDGGEAAAKPAPGGLGIEDEYRLHETSTEPDVSLGSTWLSDFPQAWAETGGMGLAVRQAPLIIPLKATSTPVSIQQYPMSHEARLGIKPHIQRLLDQGILVPCQSPWNTPLLPVKKPGTNDYRPVQDLREVNKRVEDIHPTVPNPYNLLSGLPPSHQWYTVLDLKDAFFCLRLHPTSQPLFAFEWRDPGMGISGQLTWTRLPQGFKNSPTLFNEALHRDLADFRIQHPDLILLQYVDDILLAATSELDCQQGTRALLQTLGDLGYRASAKKAQICQKQVKYLGYLLREGQRWLTEARKETVMGQPVPKTPRQLREFLGKAGFCRLFIPGFAEMAAPLYPLTKPGTLFSWGPDQQKAYQEIKQALLTAPALGLPDLTKPFELFVDEKQGYAKGVLTQKLGPWRRPVAYLSKKLDPVAAGWPPCLRMVAAIAVLTKDAGKLTMGQPLVILAPHAVEALVKQPPDRWLSNARMTHYQAMLLDTDRVQFGPVVALNPATLLPLPEEGAPHDCLEILAETHGTRPDLTDQPIPDADHTWYTDGSSFLQEGQRKAGAAVTTETEVIWAGALPAGTSAQRAELIALTQALKMAEGKRLNVYTDSRYAFATAHIHGEIYRRRGWLTSEGREIKNKSEILALLKALFLPKRLSIIHCLGHQKGDSAEARGNRLADQAAREAAIKTPPDTSTLLIAGKRTADGSEFEKRTADGSEFESPKKKAKVE

SEQ ID NO: 2148 - protein, 2091 aa, synthetic construct
MPAAKRVKLDGGDKKYSIGLDIGTNSVGWAVITDEYKVPSKKFKVLGNTDRHSIKKNLIGALLFDSGETAEATRLKRTARRRYTRRKNRICYLQEIFSNEMAKVDDSFFHRLEESFLVEEDKKHERHPIFGNIVDEVAYHEKYPTIYHLRKKLVDSTDKADLRLIYLALAHMIKFRGHFLIEGDLNPDNSDVDKLFIQLVQTYNQLFEENPINASGVDAKAILSARLSKSRRLENLIAQLPGEKKNGLFGNLIALSLGLTPNFKSNFDLAEDAKLQLSKDTYDDDLDNLLAQIGDQYADLFLAAKNLSDAILLSDILRVNTEITKAPLSASMIKRYDEHHQDLTLLKALVRQQLPEKYKEIFFDQSKNGYAGYIDGGASQEEFYKFIKPILEKMDGTEELLVKLNREDLLRKQRTFDNGSIPHQIHLGELHAILRRQEDFYPFLKDNREKIEKILTFRIPYYVGPLARGNSRFAWMTRKSEETITPWNFEEVVDKGASAQSFIERMTNFDKNLPNEKVLPKHSLLYEYFTVYNELTKVKYVTEGMRKPAFLSGEQKKAIVDLLFKTNRKVTVKQLKEDYFKKIECFDSVEISGVEDRFNASLGTYHDLLKIIKDKDFLDNEENEDILEDIVLTLTLFEDREMIEERLKTYAHLFDDKVMKQLKRRRYTGWGRLSRKLINGIRDKQSGKTILDFLKSDGFANRNFMQLIHDDSLTFKEDIQKAQVSGQGDSLHEHIANLAGSPAIKKGILQTVKVVDELVKVMGRHKPENIVIEMARENQTTQKGQKNSRERMKRIEEGIKELGSQILKEHPVENTQLQNEKLYLYYLQNGRDMYVDQELDINRLSDYDVDHIVPQSFLKDDSIDNKVLTRSDKARGKSDNVPSEEVVKKMKNYWRQLLNAKLITQRKFDNLTKAERGGLSELDKAGFIKRQLVETRQITKHVAQILDSRMNTKYDENDKLIREVKVITLKSKLVSDFRKDFQFYKVREINNYHHAHDAYLNAVVGTALIKKYPKLESEFVYGDYKVYDVRKMIAKSEQEIGKATAKYFFYSNIMNFFKTEITLANGEIRKRPLIETNGETGEIVWDKGRDFATVRKVLSMPQVNIVKKTEVQTGGFSKESILPKRNSDKLIARKKDWDPKKYGGFDSPTVAYSVLVVAKVEKGKSKKLKSVKELLGITIMERSSFEKNPIDFLEAKGYKEVKKDLIIKLPKYSLFELENGRKRMLASAGELQKGNELALPSKYVNFLYLASHYEKLKGSPEDNEQKQLFVEQHKHYLDEIIEQISEFSKRVILADANLDKVLSAYNKHRDKPIREQAENIIHLFTLTNLGAPAAFKYFDTTIDRKRYTSTKEVLDATLIHQSITGLYETRIDLSQLGGDGGGGSGGGGGLGIEDEYRLHETSTEPDVSLGSTWLSDFPQAWAETGGMGLAVRQAPLIIPLKATSTPVSIQQYPMSHEARLGIKPHIQRLLDQGILVPCQSPWNTPLLPVKKPGTNDYRPVQDLREVNKRVEDIHPTVPNPYNLLSGLPPSHQWYTVLDLKDAFFCLRLHPTSQPLFAFEWRDPGMGISGQLTWTRLPQGFKNSPTLFNEALHRDLADFRIQHPDLILLQYVDDILLAATSELDCQQGTRALLQTLGDLGYRASAKKAQICQKQVKYLGYLLREGQRWLTEARKETVMGQPVPKTPRQLREFLGKAGFCRLFIPGFAEMAAPLYPLTKPGTLFSWGPDQQKAYQEIKQALLTAPALGLPDLTKPFELFVDEKQGYAKGVLTQKLGPWRRPVAYLSKKLDPVAAGWPPCLRMVAAIAVLTKDAGKLTMGQPLVILAPHAVEALVKQPPDRWLSNARMTHYQAMLLDTDRVQFGPVVALNPATLLPLPEEGAPHDCLEILAETHGTRPDLTDQPIPDADHTWYTDGSSFLQEGQRKAGAAVTTETEVIWAGALPAGTSAQRAELIALTQALKMAEGKRLNVYTDSRYAFATAHIHGEIYRRRGWLTSEGREIKNKSEILALLKALFLPKRLSIIHCLGHQKGDSAEARGNRLADQAAREAAIKTPPDTSTLLIAGKRTADGSEFEKRTADGSEFESPKKKAKVE

SEQ ID NO: 2149 - protein, 2096 aa, synthetic construct
MPAAKRVKLDGGDKKYSIGLDIGTNSVGWAVITDEYKVPSKKFKVLGNTDRHSIKKNLIGALLFDSGETAEATRLKRTARRRYTRRKNRICYLQEIFSNEMAKVDDSFFHRLEESFLVEEDKKHERHPIFGNIVDEVAYHEKYPTIYHLRKKLVDSTDKADLRLIYLALAHMIKFRGHFLIEGDLNPDNSDVDKLFIQLVQTYNQLFEENPINASGVDAKAILSARLSKSRRLENLIAQLPGEKKNGLFGNLIALSLGLTPNFKSNFDLAEDAKLQLSKDTYDDDLDNLLAQIGDQYADLFLAAKNLSDAILLSDILRVNTEITKAPLSASMIKRYDEHHQDLTLLKALVRQQLPEKYKEIFFDQSKNGYAGYIDGGASQEEFYKFIKPILEKMDGTEELLVKLNREDLLRKQRTFDNGSIPHQIHLGELHAILRRQEDFYPFLKDNREKIEKILTFRIPYYVGPLARGNSRFAWMTRKSEETITPWNFEEVVDKGASAQSFIERMTNFDKNLPNEKVLPKHSLLYEYFTVYNELTKVKYVTEGMRKPAFLSGEQKKAIVDLLFKTNRKVTVKQLKEDYFKKIECFDSVEISGVEDRFNASLGTYHDLLKIIKDKDFLDNEENEDILEDIVLTLTLFEDREMIEERLKTYAHLFDDKVMKQLKRRRYTGWGRLSRKLINGIRDKQSGKTILDFLKSDGFANRNFMQLIHDDSLTFKEDIQKAQVSGQGDSLHEHIANLAGSPAIKKGILQTVKVVDELVKVMGRHKPENIVIEMARENQTTQKGQKNSRERMKRIEEGIKELGSQILKEHPVENTQLQNEKLYLYYLQNGRDMYVDQELDINRLSDYDVDHIVPQSFLKDDSIDNKVLTRSDKARGKSDNVPSEEVVKKMKNYWRQLLNAKLITQRKFDNLTKAERGGLSELDKAGFIKRQLVETRQITKHVAQILDSRMNTKYDENDKLIREVKVITLKSKLVSDFRKDFQFYKVREINNYHHAHDAYLNAVVGTALIKKYPKLESEFVYGDYKVYDVRKMIAKSEQEIGKATAKYFFYSNIMNFFKTEITLANGEIRKRPLIETNGETGEIVWDKGRDFATVRKVLSMPQVNIVKKTEVQTGGFSKESILPKRNSDKLIARKKDWDPKKYGGFDSPTVAYSVLVVAKVEKGKSKKLKSVKELLGITIMERSSFEKNPIDFLEAKGYKEVKKDLIIKLPKYSLFELENGRKRMLASAGELQKGNELALPSKYVNFLYLASHYEKLKGSPEDNEQKQLFVEQHKHYLDEIIEQISEFSKRVILADANLDKVLSAYNKHRDKPIREQAENIIHLFTLTNLGAPAAFKYFDTTIDRKRYTSTKEVLDATLIHQSITGLYETRIDLSQLGGDGGGSSPAPEAAAKGGLGIEDEYRLHETSTEPDVSLGSTWLSDFPQAWAETGGMGLAVRQAPLIIPLKATSTPVSIQQYPMSHEARLGIKPHIQRLLDQGILVPCQSPWNTPLLPVKKPGTNDYRPVQDLREVNKRVEDIHPTVPNPYNLLSGLPPSHQWYTVLDLKDAFFCLRLHPTSQPLFAFEWRDPGMGISGQLTWTRLPQGFKNSPTLFNEALHRDLADFRIQHPDLILLQYVDDILLAATSELDCQQGTRALLQTLGDLGYRASAKKAQICQKQVKYLGYLLREGQRWLTEARKETVMGQPVPKTPRQLREFLGKAGFCRLFIPGFAEMAAPLYPLTKPGTLFSWGPDQQKAYQEIKQALLTAPALGLPDLTKPFELFVDEKQGYAKGVLTQKLGPWRRPVAYLSKKLDPVAAGWPPCLRMVAAIAVLTKDAGKLTMGQPLVILAPHAVEALVKQPPDRWLSNARMTHYQAMLLDTDRVQFGPVVALNPATLLPLPEEGAPHDCLEILAETHGTRPDLTDQPIPDADHTWYTDGSSFLQEGQRKAGAAVTTETEVIWAGALPAGTSAQRAELIALTQALKMAEGKRLNVYTDSRYAFATAHIHGEIYRRRGWLTSEGREIKNKSEILALLKALFLPKRLSIIHCLGHQKGDSAEARGNRLADQAAREAAIKTPPDTSTLLIAGKRTADGSEFEKRTADGSEFESPKKKAKVE

SEQ ID NO: 2150 - protein, 2091 aa, synthetic construct; identical to SEQ ID NO: 2057

SEQ ID NO: 2151 - protein, 2094 aa, synthetic construct
MPAAKRVKLDGGDKKYSIGLDIGTNSVGWAVITDEYKVPSKKFKVLGNTDRHSIKKNLIGALLFDSGETAEATRLKRTARRRYTRRKNRICYLQEIFSNEMAKVDDSFFHRLEESFLVEEDKKHERHPIFGNIVDEVAYHEKYPTIYHLRKKLVDSTDKADLRLIYLALAHMIKFRGHFLIEGDLNPDNSDVDKLFIQLVQTYNQLFEENPINASGVDAKAILSARLSKSRRLENLIAQLPGEKKNGLFGNLIALSLGLTPNFKSNFDLAEDAKLQLSKDTYDDDLDNLLAQIGDQYADLFLAAKNLSDAILLSDILRVNTEITKAPLSASMIKRYDEHHQDLTLLKALVRQQLPEKYKEIFFDQSKNGYAGYIDGGASQEEFYKFIKPILEKMDGTEELLVKLNREDLLRKQRTFDNGSIPHQIHLGELHAILRRQEDFYPFLKDNREKIEKILTFRIPYYVGPLARGNSRFAWMTRKSEETITPWNFEEVVDKGASAQSFIERMTNFDKNLPNEKVLPKHSLLYEYFTVYNELTKVKYVTEGMRKPAFLSGEQKKAIVDLLFKTNRKVTVKQLKEDYFKKIECFDSVEISGVEDRFNASLGTYHDLLKIIKDKDFLDNEENEDILEDIVLTLTLFEDREMIEERLKTYAHLFDDKVMKQLKRRRYTGWGRLSRKLINGIRDKQSGKTILDFLKSDGFANRNFMQLIHDDSLTFKEDIQKAQVSGQGDSLHEHIANLAGSPAIKKGILQTVKVVDELVKVMGRHKPENIVIEMARENQTTQKGQKNSRERMKRIEEGIKELGSQILKEHPVENTQLQNEKLYLYYLQNGRDMYVDQELDINRLSDYDVDHIVPQSFLKDDSIDNKVLTRSDKARGKSDNVPSEEVVKKMKNYWRQLLNAKLITQRKFDNLTKAERGGLSELDKAGFIKRQLVETRQITKHVAQILDSRMNTKYDENDKLIREVKVITLKSKLVSDFRKDFQFYKVREINNYHHAHDAYLNAVVGTALIKKYPKLESEFVYGDYKVYDVRKMIAKSEQEIGKATAKYFFYSNIMNFFKTEITLANGEIRKRPLIETNGETGEIVWDKGRDFATVRKVLSMPQVNIVKKTEVQTGGFSKESILPKRNSDKLIARKKDWDPKKYGGFDSPTVAYSVLVVAKVEKGKSKKLKSVKELLGITIMERSSFEKNPIDFLEAKGYKEVKKDLIIKLPKYSLFELENGRKRMLASAGELQKGNELALPSKYVNFLYLASHYEKLKGSPEDNEQKQLFVEQHKHYLDEIIEQISEFSKRVILADANLDKVLSAYNKHRDKPIREQAENIIHLFTLTNLGAPAAFKYFDTTIDRKRYTSTKEVLDATLIHQSITGLYETRIDLSQLGGDGGPAPGGGGGSGGLGIEDEYRLHETSTEPDVSLGSTWLSDFPQAWAETGGMGLAVRQAPLIIPLKATSTPVSIQQYPMSHEARLGIKPHIQRLLDQGILVPCQSPWNTPLLPVKKPGTNDYRPVQDLREVNKRVEDIHPTVPNPYNLLSGLPPSHQWYTVLDLKDAFFCLRLHPTSQPLFAFEWRDPGMGISGQLTWTRLPQGFKNSPTLFNEALHRDLADFRIQHPDLILLQYVDDILLAATSELDCQQGTRALLQTLGDLGYRASAKKAQICQKQVKYLGYLLREGQRWLTEARKETVMGQPVPKTPRQLREFLGKAGFCRLFIPGFAEMAAPLYPLTKPGTLFSWGPDQQKAYQEIKQALLTAPALGLPDLTKPFELFVDEKQGYAKGVLTQKLGPWRRPVAYLSKKLDPVAAGWPPCLRMVAAIAVLTKDAGKLTMGQPLVILAPHAVEALVKQPPDRWLSNARMTHYQAMLLDTDRVQFGPVVALNPATLLPLPEEGAPHDCLEILAETHGTRPDLTDQPIPDADHTWYTDGSSFLQEGQRKAGAAVTTETEVIWAGALPAGTSAQRAELIALTQALKMAEGKRLNVYTDSRYAFATAHIHGEIYRRRGWLTSEGREIKNKSEILALLKALFLPKRLSIIHCLGHQKGDSAEARGNRLADQAAREAAIKTPPDTSTLLIAGKRTADGSEFEKRTADGSEFESPKKKAKVE

SEQ ID NO: 2152 - protein, 2093 aa, synthetic construct
MPAAKRVKLDGGDKKYSIGLDIGTNSVGWAVITDEYKVPSKKFKVLGNTDRHSIKKNLIGALLFDSGETAEATRLKRTARRRYTRRKNRICYLQEIFSNEMAKVDDSFFHRLEESFLVEEDKKHERHPIFGNIVDEVAYHEKYPTIYHLRKKLVDSTDKADLRLIYLALAHMIKFRGHFLIEGDLNPDNSDVDKLFIQLVQTYNQLFEENPINASGVDAKAILSARLSKSRRLENLIAQLPGEKKNGLFGNLIALSLGLTPNFKSNFDLAEDAKLQLSKDTYDDDLDNLLAQIGDQYADLFLAAKNLSDAILLSDILRVNTEITKAPLSASMIKRYDEHHQDLTLLKALVRQQLPEKYKEIFFDQSKNGYAGYIDGGASQEEFYKFIKPILEKMDGTEELLVKLNREDLLRKQRTFDNGSIPHQIHLGELHAILRRQEDFYPFLKDNREKIEKILTFRIPYYVGPLARGNSRFAWMTRKSEETITPWNFEEVVDKGASAQSFIERMTNFDKNLPNEKVLPKHSLLYEYFTVYNELTKVKYVTEGMRKPAFLSGEQKKAIVDLLFKTNRKVTVKQLKEDYFKKIECFDSVEISGVEDRFNASLGTYHDLLKIIKDKDFLDNEENEDILEDIVLTLTLFEDREMIEERLKTYAHLFDDKVMKQLKRRRYTGWGRLSRKLINGIRDKQSGKTILDFLKSDGFANRNFMQLIHDDSLTFKEDIQKAQVSGQGDSLHEHIANLAGSPAIKKGILQTVKVVDELVKVMGRHKPENIVIEMARENQTTQKGQKNSRERMKRIEEGIKELGSQILKEHPVENTQLQNEKLYLYYLQNGRDMYVDQELDINRLSDYDVDHIVPQSFLKDDSIDNKVLTRSDKARGKSDNVPSEEVVKKMKNYWRQLLNAKLITQRKFDNLTKAERGGLSELDKAGFIKRQLVETRQITKHVAQILDSRMNTKYDENDKLIREVKVITLKSKLVSDFRKDFQFYKVREINNYHHAHDAYLNAVVGTALIKKYPKLESEFVYGDYKVYDVRKMIAKSEQEIGKATAKYFFYSNIMNFFKTEITLANGEIRKRPLIETNGETGEIVWDKGRDFATVRKVLSMPQVNIVKKTEVQTGGFSKESILPKRNSDKLIARKKDWDPKKYGGFDSPTVAYSVLVVAKVEKGKSKKLKSVKELLGITIMERSSFEKNPIDFLEAKGYKEVKKDLIIKLPKYSLFELENGRKRMLASAGELQKGNELALPSKYVNFLYLASHYEKLKGSPEDNEQKQLFVEQHKHYLDEIIEQISEFSKRVILADANLDKVLSAYNKHRDKPIREQAENIIHLFTLTNLGAPAAFKYFDTTIDRKRYTSTKEVLDATLIHQSITGLYETRIDLSQLGGDGGEAAAKGGGGGLGIEDEYRLHETSTEPDVSLGSTWLSDFPQAWAETGGMGLAVRQAPLIIPLKATSTPVSIQQYPMSHEARLGIKPHIQRLLDQGILVPCQSPWNTPLLPVKKPGTNDYRPVQDLREVNKRVEDIHPTVPNPYNLLSGLPPSHQWYTVLDLKDAFFCLRLHPTSQPLFAFEWRDPGMGISGQLTWTRLPQGFKNSPTLFNEALHRDLADFRIQHPDLILLQYVDDILLAATSELDCQQGTRALLQTLGDLGYRASAKKAQICQKQVKYLGYLLREGQRWLTEARKETVMGQPVPKTPRQLREFLGKAGFCRLFIPGFAEMAAPLYPLTKPGTLFSWGPDQQKAYQEIKQALLTAPALGLPDLTKPFELFVDEKQGYAKGVLTQKLGPWRRPVAYLSKKLDPVAAGWPPCLRMVAAIAVLTKDAGKLTMGQPLVILAPHAVEALVKQPPDRWLSNARMTHYQAMLLDTDRVQFGPVVALNPATLLPLPEEGAPHDCLEILAETHGTRPDLTDQPIPDADHTWYTDGSSFLQEGQRKAGAAVTTETEVIWAGALPAGTSAQRAELIALTQALKMAEGKRLNVYTDSRYAFATAHIHGEIYRRRGWLTSEGREIKNKSEILALLKALFLPKRLSIIHCLGHQKGDSAEARGNRLADQAAREAAIKTPPDTSTLLIAGKRTADGSEFEKRTADGSEFESPKKKAKVE

SEQ ID NO: 2153 - protein, 2094 aa, synthetic construct
MPAAKRVKLDGGDKKYSIGLDIGTNSVGWAVITDEYKVPSKKFKVLGNTDRHSIKKNLIGALLFDSGETAEATRLKRTARRRYTRRKNRICYLQEIFSNEMAKVDDSFFHRLEESFLVEEDKKHERHPIFGNIVDEVAYHEKYPTIYHLRKKLVDSTDKADLRLIYLALAHMIKFRGHFLIEGDLNPDNSDVDKLFIQLVQTYNQLFEENPINASGVDAKAILSARLSKSRRLENLIAQLPGEKKNGLFGNLIALSLGLTPNFKSNFDLAEDAKLQLSKDTYDDDLDNLLAQIGDQYADLFLAAKNLSDAILLSDILRVNTEITKAPLSASMIKRYDEHHQDLTLLKALVRQQLPEKYKEIFFDQSKNGYAGYIDGGASQEEFYKFIKPILEKMDGTEELLVKLNREDLLRKQRTFDNGSIPHQIHLGELHAILRRQEDFYPFLKDNREKIEKILTFRIPYYVGPLARGNSRFAWMTRKSEETITPWNFEEVVDKGASAQSFIERMTNFDKNLPNEKVLPKHSLLYEYFTVYNELTKVKYVTEGMRKPAFLSGEQKKAIVDLLFKTNRKVTVKQLKEDYFKKIECFDSVEISGVEDRFNASLGTYHDLLKIIKDKDFLDNEENEDILEDIVLTLTLFEDREMIEERLKTYAHLFDDKVMKQLKRRRYTGWGRLSRKLINGIRDKQSGKTILDFLKSDGFANRNFMQLIHDDSLTFKEDIQKAQVSGQGDSLHEHIANLAGSPAIKKGILQTVKVVDELVKVMGRHKPENIVIEMARENQTTQKGQKNSRERMKRIEEGIKELGSQILKEHPVENTQLQNEKLYLYYLQNGRDMYVDQELDINRLSDYDVDHIVPQSFLKDDSIDNKVLTRSDKARGKSDNVPSEEVVKKMKNYWRQLLNAKLITQRKFDNLTKAERGGLSELDKAGFIKRQLVETRQITKHVAQILDSRMNTKYDENDKLIREVKVITLKSKLVSDFRKDFQFYKVREINNYHHAHDAYLNAVVGTALIKKYPKLESEFVYGDYKVYDVRKMIAKSEQEIGKATAKYFFYSNIMNFFKTEITLANGEIRKRPLIETNGETGEIVWDKGRDFATVRKVLSMPQVNIVKKTEVQTGGFSKESILPKRNSDKLIARKKDWDPKKYGGFDSPTVAYSVLVVAKVEKGKSKKLKSVKELLGITIMERSSFEKNPIDFLEAKGYKEVKKDLIIKLPKYSLFELENGRKRMLASAGELQKGNELALPSKYVNFLYLASHYEKLKGSPEDNEQKQLFVEQHKHYLDEIIEQISEFSKRVILADANLDKVLSAYNKHRDKPIREQAENIIHLFTLTNLGAPAAFKYFDTTIDRKRYTSTKEVLDATLIHQSITGLYETRIDLSQLGGDGGPAPGGSGGGGGLGIEDEYRLHETSTEPDVSLGSTWLSDFPQAWAETGGMGLAVRQAPLIIPLKATSTPVSIQQYPMSHEARLGIKPHIQRLLDQGILVPCQSPWNTPLLPVKKPGTNDYRPVQDLREVNKRVEDIHPTVPNPYNLLSGLPPSHQWYTVLDLKDAFFCLRLHPTSQPLFAFEWRDPGMGISGQLTWTRLPQGFKNSPTLFNEALHRDLADFRIQHPDLILLQYVDDILLAATSELDCQQGTRALLQTLGDLGYRASAKKAQICQKQVKYLGYLLREGQRWLTEARKETVMGQPVPKTPRQLREFLGKAGFCRLFIPGFAEMAAPLYPLTKPGTLFSWGPDQQKAYQEIKQALLTAPALGLPDLTKPFELFVDEKQGYAKGVLTQKLGPWRRPVAYLSKKLDPVAAGWPPCLRMVAAIAVLTKDAGKLTMGQPLVILAPHAVEALVKQPPDRWLSNARMTHYQAMLLDTDRVQFGPVVALNPATLLPLPEEGAPHDCLEILAETHGTRPDLTDQPIPDADHTWYTDGSSFLQEGQRKAGAAVTTETEVIWAGALPAGTSAQRAELIALTQALKMAEGKRLNVYTDSRYAFATAHIHGEIYRRRGWLTSEGREIKNKSEILALLKALFLPKRLSIIHCLGHQKGDSAEARGNRLADQAAREAAIKTPPDTSTLLIAGKRTADGSEFEKRTADGSEFESPKKKAKVE

SEQ ID NO: 2154 - protein, 2094 aa, synthetic construct
MPAAKRVKLDGGDKKYSIGLDIGTNSVGWAVITDEYKVPSKKFKVLGNTDRHSIKKNLIGALLFDSGETAEATRLKRTARRRYTRRKNRICYLQEIFSNEMAKVDDSFFHRLEESFLVEEDKKHERHPIFGNIVDEVAYHEKYPTIYHLRKKLVDSTDKADLRLIYLALAHMIKFRGHFLIEGDLNPDNSDVDKLFIQLVQTYNQLFEENPINASGVDAKAILSARLSKSRRLENLIAQLPGEKKNGLFGNLIALSLGLTPNFKSNFDLAEDAKLQLSKDTYDDDLDNLLAQIGDQYADLFLAAKNLSDAILLSDILRVNTEITKAPLSASMIKRYDEHHQDLTLLKALVRQQLPEKYKEIFFDQSKNGYAGYIDGGASQEEFYKFIKPILEKMDGTEELLVKLNREDLLRKQRTFDNGSIPHQIHLGELHAILRRQEDFYPFLKDNREKIEKILTFRIPYYVGPLARGNSRFAWMTRKSEETITPWNFEEVVDKGASAQSFIERMTNFDKNLPNEKVLPKHSLLYEYFTVYNELTKVKYVTEGMRKPAFLSGEQKKAIVDLLFKTNRKVTVKQLKEDYFKKIECFDSVEISGVEDRFNASLGTYHDLLKIIKDKDFLDNEENEDILEDIVLTLTLFEDREMIEERLKTYAHLFDDKVMKQLKRRRYTGWGRLSRKLINGIRDKQSGKTILDFLKSDGFANRNFMQLIHDDSLTFKEDIQKAQVSGQGDSLHEHIANLAGSPAIKKGILQTVKVVDELVKVMGRHKPENIVIEMARENQTTQKGQKNSRERMKRIEEGIKELGSQILKEHPVENTQLQNEKLYLYYLQNGRDMYVDQELDINRLSDYDVDHIVPQSFLKDDSIDNKVLTRSDKARGKSDNVPSEEVVKKMKNYWRQLLNAKLITQRKFDNLTKAERGGLSELDKAGFIKRQLVETRQITKHVAQILDSRMNTKYDENDKLIREVKVITLKSKLVSDFRKDFQFYKVREINNYHHAHDAYLNAVVGTALIKKYPKLESEFVYGDYKVYDVRKMIAKSEQEIGKATAKYFFYSNIMNFFKTEITLANGEIRKRPLIETNGETGEIVWDKGRDFATVRKVLSMPQVNIVKKTEVQTGGFSKESILPKRNSDKLIARKKDWDPKKYGGFDSPTVAYSVLVVAKVEKGKSKKLKSVKELLGITIMERSSFEKNPIDFLEAKGYKEVKKDLIIKLPKYSLFELENGRKRMLASAGELQKGNELALPSKYVNFLYLASHYEKLKGSPEDNEQKQLFVEQHKHYLDEIIEQISEFSKRVILADANLDKVLSAYNKHRDKPIREQAENIIHLFTLTNLGAPAAFKYFDTTIDRKRYTSTKEVLDATLIHQSITGLYETRIDLSQLGGDGGGGGPAPGGSGGLGIEDEYRLHETSTEPDVSLGSTWLSDFPQAWAETGGMGLAVRQAPLIIPLKATSTPVSIQQYPMSHEARLGIKPHIQRLLDQGILVPCQSPWNTPLLPVKKPGTNDYRPVQDLREVNKRVEDIHPTVPNPYNLLSGLPPSHQWYTVLDLKDAFFCLRLHPTSQPLFAFEWRDPGMGISGQLTWTRLPQGFKNSPTLFNEALHRDLADFRIQHPDLILLQYVDDILLAATSELDCQQGTRALLQTLGDLGYRASAKKAQICQKQVKYLGYLLREGQRWLTEARKETVMGQPVPKTPRQLREFLGKAGFCRLFIPGFAEMAAPLYPLTKPGTLFSWGPDQQKAYQEIKQALLTAPALGLPDLTKPFELFVDEKQGYAKGVLTQKLGPWRRPVAYLSKKLDPVAAGWPPCLRMVAAIAVLTKDAGKLTMGQPLVILAPHAVEALVKQPPDRWLSNARMTHYQAMLLDTDRVQFGPVVALNPATLLPLPEEGAPHDCLEILAETHGTRPDLTDQPIPDADHTWYTDGSSFLQEGQRKAGAAVTTETEVIWAGALPAGTSAQRAELIALTQALKMAEGKRLNVYTDSRYAFATAHIHGEIYRRRGWLTSEGREIKNKSEILALLKALFLPKRLSIIHCLGHQKGDSAEARGNRLADQAAREAAIKTPPDTSTLLIAGKRTADGSEFEKRTADGSEFESPKKKAKVE

SEQ ID NO: 2155 - protein, 2097 aa, synthetic construct; identical to SEQ ID NO: 2056

SEQ ID NO: 2156 - protein, 2094 aa, synthetic construct
MPAAKRVKLDGGDKKYSIGLDIGTNSVGWAVITDEYKVPSKKFKVLGNTDRHSIKKNLIGALLFDSGETAEATRLKRTARRRYTRRKNRICYLQEIFSNEMAKVDDSFFHRLEESFLVEEDKKHERHPIFGNIVDEVAYHEKYPTIYHLRKKLVDSTDKADLRLIYLALAHMIKFRGHFLIEGDLNPDNSDVDKLFIQLVQTYNQLFEENPINASGVDAKAILSARLSKSRRLENLIAQLPGEKKNGLFGNLIALSLGLTPNFKSNFDLAEDAKLQLSKDTYDDDLDNLLAQIGDQYADLFLAAKNLSDAILLSDILRVNTEITKAPLSASMIKRYDEHHQDLTLLKALVRQQLPEKYKEIFFDQSKNGYAGYIDGGASQEEFYKFIKPILEKMDGTEELLVKLNREDLLRKQRTFDNGSIPHQIHLGELHAILRRQEDFYPFLKDNREKIEKILTFRIPYYVGPLARGNSRFAWMTRKSEETITPWNFEEVVDKGASAQSFIERMTNFDKNLPNEKVLPKHSLLYEYFTVYNELTKVKYVTEGMRKPAFLSGEQKKAIVDLLFKTNRKVTVKQLKEDYFKKIECFDSVEISGVEDRFNASLGTYHDLLKIIKDKDFLDNEENEDILEDIVLTLTLFEDREMIEERLKTYAHLFDDKVMKQLKRRRYTGWGRLSRKLINGIRDKQSGKTILDFLKSDGFANRNFMQLIHDDSLTFKEDIQKAQVSGQGDSLHEHIANLAGSPAIKKGILQTVKVVDELVKVMGRHKPENIVIEMARENQTTQKGQKNSRERMKRIEEGIKELGSQILKEHPVENTQLQNEKLYLYYLQNGRDMYVDQELDINRLSDYDVDHIVPQSFLKDDSIDNKVLTRSDKARGKSDNVPSEEVVKKMKNYWRQLLNAKLITQRKFDNLTKAERGGLSELDKAGFIKRQLVETRQITKHVAQILDSRMNTKYDENDKLIREVKVITLKSKLVSDFRKDFQFYKVREINNYHHAHDAYLNAVVGTALIKKYPKLESEFVYGDYKVYDVRKMIAKSEQEIGKATAKYFFYSNIMNFFKTEITLANGEIRKRPLIETNGETGEIVWDKGRDFATVRKVLSMPQVNIVKKTEVQTGGFSKESILPKRNSDKLIARKKDWDPKKYGGFDSPTVAYSVLVVAKVEKGKSKKLKSVKELLGITIMERSSFEKNPIDFLEAKGYKEVKKDLIIKLPKYSLFELENGRKRMLASAGELQKGNELALPSKYVNFLYLASHYEKLKGSPEDNEQKQLFVEQHKHYLDEIIEQISEFSKRVILADANLDKVLSAYNKHRDKPIREQAENIIHLFTLTNLGAPAAFKYFDTTIDRKRYTSTKEVLDATLIHQSITGLYETRIDLSQLGGDGGGSSPAPGGSGGLGIEDEYRLHETSTEPDVSLGSTWLSDFPQAWAETGGMGLAVRQAPLIIPLKATSTPVSIQQYPMSHEARLGIKPHIQRLLDQGILVPCQSPWNTPLLPVKKPGTNDYRPVQDLREVNKRVEDIHPTVPNPYNLLSGLPPSHQWYTVLDLKDAFFCLRLHPTSQPLFAFEWRDPGMGISGQLTWTRLPQGFKNSPTLFNEALHRDLADFRIQHPDLILLQYVDDILLAATSELDCQQGTRALLQTLGDLGYRASAKKAQICQKQVKYLGYLLREGQRWLTEARKETVMGQPVPKTPRQLREFLGKAGFCRLFIPGFAEMAAPLYPLTKPGTLFSWGPDQQKAYQEIKQALLTAPALGLPDLTKPFELFVDEKQGYAKGVLTQKLGPWRRPVAYLSKKLDPVAAGWPPCLRMVAAIAVLTKDAGKLTMGQPLVILAPHAVEALVKQPPDRWLSNARMTHYQAMLLDTDRVQFGPVVALNPATLLPLPEEGAPHDCLEILAETHGTRPDLTDQPIPDADHTWYTDGSSFLQEGQRKAGAAVTTETEVIWAGALPAGTSAQRAELIALTQALKMAEGKRLNVYTDSRYAFATAHIHGEIYRRRGWLTSEGREIKNKSEILALLKALFLPKRLSIIHCLGHQKGDSAEARGNRLADQAAREAAIKTPPDTSTLLIAGKRTADGSEFEKRTADGSEFESPKKKAKVE

SEQ ID NO: 2157 - protein, 2095 aa, synthetic construct
MPAAKRVKLDGGDKKYSIGLDIGTNSVGWAVITDEYKVPSKKFKVLGNTDRHSIKKNLIGALLFDSGETAEATRLKRTARRRYTRRKNRICYLQEIFSNEMAKVDDSFFHRLEESFLVEEDKKHERHPIFGNIVDEVAYHEKYPTIYHLRKKLVDSTDKADLRLIYLALAHMIKFRGHFLIEGDLNPDNSDVDKLFIQLVQTYNQLFEENPINASGVDAKAILSARLSKSRRLENLIAQLPGEKKNGLFGNLIALSLGLTPNFKSNFDLAEDAKLQLSKDTYDDDLDNLLAQIGDQYADLFLAAKNLSDAILLSDILRVNTEITKAPLSASMIKRYDEHHQDLTLLKALVRQQLPEKYKEIFFDQSKNGYAGYIDGGASQEEFYKFIKPILEKMDGTEELLVKLNREDLLRKQRTFDNGSIPHQIHLGELHAILRRQEDFYPFLKDNREKIEKILTFRIPYYVGPLARGNSRFAWMTRKSEETITPWNFEEVVDKGASAQSFIERMTNFDKNLPNEKVLPKHSLLYEYFTVYNELTKVKYVTEGMRKPAFLSGEQKKAIVDLLFKTNRKVTVKQLKEDYFKKIECFDSVEISGVEDRFNASLGTYHDLLKIIKDKDFLDNEENEDILEDIVLTLTLFEDREMIEERLKTYAHLFDDKVMKQLKRRRYTGWGRLSRKLINGIRDKQSGKTILDFLKSDGFANRNFMQLIHDDSLTFKEDIQKAQVSGQGDSLHEHIANLAGSPAIKKGILQTVKVVDELVKVMGRHKPENIVIEMARENQTTQKGQKNSRERMKRIEEGIKELGSQILKEHPVENTQLQNEKLYLYYLQNGRDMYVDQELDINRLSDYDVDHIVPQSFLKDDSIDNKVLTRSDKARGKSDNVPSEEVVKKMKNYWRQLLNAKLITQRKFDNLTKAERGGLSELDKAGFIKRQLVETRQITKHVAQILDSRMNTKYDENDKLIREVKVITLKSKLVSDFRKDFQFYKVREINNYHHAHDAYLNAVVGTALIKKYPKLESEFVYGDYKVYDVRKMIAKSEQEIGKATAKYFFYSNIMNFFKTEITLANGEIRKRPLIETNGETGEIVWDKGRDFATVRKVLSMPQVNIVKKTEVQTGGFSKESILPKRNSDKLIARKKDWDPKKYGGFDSPTVAYSVLVVAKVEKGKSKKLKSVKELLGITIMERSSFEKNPIDFLEAKGYKEVKKDLIIKLPKYSLFELENGRKRMLASAGELQKGNELALPSKYVNFLYLASHYEKLKGSPEDNEQKQLFVEQHKHYLDEIIEQISEFSKRVILADANLDKVLSAYNKHRDKPIREQAENIIHLFTLTNLGAPAAFKYFDTTIDRKRYTSTKEVLDATLIHQSITGLYETRIDLSQLGGDGGGGGGSGGGGSGGLGIEDEYRLHETSTEPDVSLGSTWLSDFPQAWAETGGMGLAVRQAPLIIPLKATSTPVSIQQYPMSHEARLGIKPHIQRLLDQGILVPCQSPWNTPLLPVKKPGTNDYRPVQDLREVNKRVEDIHPTVPNPYNLLSGLPPSHQWYTVLDLKDAFFCLRLHPTSQPLFAFEWRDPGMGISGQLTWTRLPQGFKNSPTLFNEALHRDLADFRIQHPDLILLQYVDDILLAATSELDCQQGTRALLQTLGDLGYRASAKKAQICQKQVKYLGYLLREGQRWLTEARKETVMGQPVPKTPRQLREFLGKAGFCRLFIPGFAEMAAPLYPLTKPGTLFSWGPDQQKAYQEIKQALLTAPALGLPDLTKPFELFVDEKQGYAKGVLTQKLGPWRRPVAYLSKKLDPVAAGWPPCLRMVAAIAVLTKDAGKLTMGQPLVILAPHAVEALVKQPPDRWLSNARMTHYQAMLLDTDRVQFGPVVALNPATLLPLPEEGAPHDCLEILAETHGTRPDLTDQPIPDADHTWYTDGSSFLQEGQRKAGAAVTTETEVIWAGALPAGTSAQRAELIALTQALKMAEGKRLNVYTDSRYAFATAHIHGEIYRRRGWLTSEGREIKNKSEILALLKALFLPKRLSIIHCLGHQKGDSAEARGNRLADQAAREAAIKTPPDTSTLLIAGKRTADGSEFEKRTADGSEFESPKKKAKVE

SEQ ID NO: 2158 - protein, 2091 aa, synthetic construct
MPAAKRVKLDGGDKKYSIGLDIGTNSVGWAVITDEYKVPSKKFKVLGNTDRHSIKKNLIGALLFDSGETAEATRLKRTARRRYTRRKNRICYLQEIFSNEMAKVDDSFFHRLEESFLVEEDKKHERHPIFGNIVDEVAYHEKYPTIYHLRKKLVDSTDKADLRLIYLALAHMIKFRGHFLIEGDLNPDNSDVDKLFIQLVQTYNQLFEENPINASGVDAKAILSARLSKSRRLENLIAQLPGEKKNGLFGNLIALSLGLTPNFKSNFDLAEDAKLQLSKDTYDDDLDNLLAQIGDQYADLFLAAKNLSDAILLSDILRVNTEITKAPLSASMIKRYDEHHQDLTLLKALVRQQLPEKYKEIFFDQSKNGYAGYIDGGASQEEFYKFIKPILEKMDGTEELLVKLNREDLLRKQRTFDNGSIPHQIHLGELHAILRRQEDFYPFLKDNREKIEKILTFRIPYYVGPLARGNSRFAWMTRKSEETITPWNFEEVVDKGASAQSFIERMTNFDKNLPNEKVLPKHSLLYEYFTVYNELTKVKYVTEGMRKPAFLSGEQKKAIVDLLFKTNRKVTVKQLKEDYFKKIECFDSVEISGVEDRFNASLGTYHDLLKIIKDKDFLDNEENEDILEDIVLTLTLFEDREMIEERLKTYAHLFDDKVMKQLKRRRYTGWGRLSRKLINGIRDKQSGKTILDFLKSDGFANRNFMQLIHDDSLTFKEDIQKAQVSGQGDSLHEHIANLAGSPAIKKGILQTVKVVDELVKVMGRHKPENIVIEMARENQTTQKGQKNSRERMKRIEEGIKELGSQILKEHPVENTQLQNEKLYLYYLQNGRDMYVDQELDINRLSDYDVDHIVPQSFLKDDSIDNKVLTRSDKARGKSDNVPSEEVVKKMKNYWRQLLNAKLITQRKFDNLTKAERGGLSELDKAGFIKRQLVETRQITKHVAQILDSRMNTKYDENDKLIREVKVITLKSKLVSDFRKDFQFYKVREINNYHHAHDAYLNAVVGTALIKKYPKLESEFVYGDYKVYDVRKMIAKSEQEIGKATAKYFFYSNIMNFFKTEITLANGEIRKRPLIETNGETGEIVWDKGRDFATVRKVLSMPQVNIVKKTEVQTGGFSKESILPKRNSDKLIARKKDWDPKKYGGFDSPTVAYSVLVVAKVEKGKSKKLKSVKELLGITIMERSSFEKNPIDFLEAKGYKEVKKDLIIKLPKYSLFELENGRKRMLASAGELQKGNELALPSKYVNFLYLASHYEKLKGSPEDNEQKQLFVEQHKHYLDEIIEQISEFSKRVILADANLDKVLSAYNKHRDKPIREQAENIIHLFTLTNLGAPAAFKYFDTTIDRKRYTSTKEVLDATLIHQSITGLYETRIDLSQLGGDGGGGSGSSGGLGIEDEYRLHETSTEPDVSLGSTWLSDFPQAWAETGGMGLAVRQAPLIIPLKATSTPVSIQQYPMSHEARLGIKPHIQRLLDQGILVPCQSPWNTPLLPVKKPGTNDYRPVQDLREVNKRVEDIHPTVPNPYNLLSGLPPSHQWYTVLDLKDAFFCLRLHPTSQPLFAFEWRDPGMGISGQLTWTRLPQGFKNSPTLFNEALHRDLADFRIQHPDLILLQYVDDILLAATSELDCQQGTRALLQTLGDLGYRASAKKAQICQKQVKYLGYLLREGQRWLTEARKETVMGQPVPKTPRQLREFLGKAGFCRLFIPGFAEMAAPLYPLTKPGTLFSWGPDQQKAYQEIKQALLTAPALGLPDLTKPFELFVDEKQGYAKGVLTQKLGPWRRPVAYLSKKLDPVAAGWPPCLRMVAAIAVLTKDAGKLTMGQPLVILAPHAVEALVKQPPDRWLSNARMTHYQAMLLDTDRVQFGPVVALNPATLLPLPEEGAPHDCLEILAETHGTRPDLTDQPIPDADHTWYTDGSSFLQEGQRKAGAAVTTETEVIWAGALPAGTSAQRAELIALTQALKMAEGKRLNVYTDSRYAFATAHIHGEIYRRRGWLTSEGREIKNKSEILALLKALFLPKRLSIIHCLGHQKGDSAEARGNRLADQAAREAAIKTPPDTSTLLIAGKRTADGSEFEKRTADGSEFESPKKKAKVE

SEQ ID NO: 2159 - protein, 2096 aa, synthetic construct; identical to SEQ ID NO: 2055

SEQ ID NO: 2160 - protein, 2094 aa, synthetic construct
MPAAKRVKLDGGDKKYSIGLDIGTNSVGWAVITDEYKVPSKKFKVLGNTDRHSIKKNLIGALLFDSGETAEATRLKRTARRRYTRRKNRICYLQEIFSNEMAKVDDSFFHRLEESFLVEEDKKHERHPIFGNIVDEVAYHEKYPTIYHLRKKLVDSTDKADLRLIYLALAHMIKFRGHFLIEGDLNPDNSDVDKLFIQLVQTYNQLFEENPINASGVDAKAILSARLSKSRRLENLIAQLPGEKKNGLFGNLIALSLGLTPNFKSNFDLAEDAKLQLSKDTYDDDLDNLLAQIGDQYADLFLAAKNLSDAILLSDILRVNTEITKAPLSASMIKRYDEHHQDLTLLKALVRQQLPEKYKEIFFDQSKNGYAGYIDGGASQEEFYKFIKPILEKMDGTEELLVKLNREDLLRKQRTFDNGSIPHQIHLGELHAILRRQEDFYPFLKDNREKIEKILTFRIPYYVGPLARGNSRFAWMTRKSEETITPWNFEEVVDKGASAQSFIERMTNFDKNLPNEKVLPKHSLLYEYFTVYNELTKVKYVTEGMRKPAFLSGEQKKAIVDLLFKTNRKVTVKQLKEDYFKKIECFDSVEISGVEDRFNASLGTYHDLLKIIKDKDFLDNEENEDILEDIVLTLTLFEDREMIEERLKTYAHLFDDKVMKQLKRRRYTGWGRLSRKLINGIRDKQSGKTILDFLKSDGFANRNFMQLIHDDSLTFKEDIQKAQVSGQGDSLHEHIANLAGSPAIKKGILQTVKVVDELVKVMGRHKPENIVIEMARENQTTQKGQKNSRERMKRIEEGIKELGSQILKEHPVENTQLQNEKLYLYYLQNGRDMYVDQELDINRLSDYDVDHIVPQSFLKDDSIDNKVLTRSDKARGKSDNVPSEEVVKKMKNYWRQLLNAKLITQRKFDNLTKAERGGLSELDKAGFIKRQLVETRQITKHVAQILDSRMNTKYDENDKLIREVKVITLKSKLVSDFRKDFQFYKVREINNYHHAHDAYLNAVVGTALIKKYPKLESEFVYGDYKVYDVRKMIAKSEQEIGKATAKYFFYSNIMNFFKTEITLANGEIRKRPLIETNGETGEIVWDKGRDFATVRKVLSMPQVNIVKKTEVQTGGFSKESILPKRNSDKLIARKKDWDPKKYGGFDSPTVAYSVLVVAKVEKGKSKKLKSVKELLGITIMERSSFEKNPIDFLEAKGYKEVKKDLIIKLPKYSLFELENGRKRMLASAGELQKGNELALPSKYVNFLYLASHYEKLKGSPEDNEQKQLFVEQHKHYLDEIIEQISEFSKRVILADANLDKVLSAYNKHRDKPIREQAENIIHLFTLTNLGAPAAFKYFDTTIDRKRYTSTKEVLDATLIHQSITGLYETRIDLSQLGGDGGGGGGGSGSSGGLGIEDEYRLHETSTEPDVSLGSTWLSDFPQAWAETGGMGLAVRQAPLIIPLKATSTPVSIQQYPMSHEARLGIKPHIQRLLDQGILVPCQSPWNTPLLPVKKPGTNDYRPVQDLREVNKRVEDIHPTVPNPYNLLSGLPPSHQWYTVLDLKDAFFCLRLHPTSQPLFAFEWRDPGMGISGQLTWTRLPQGFKNSPTLFNEALHRDLADFRIQHPDLILLQYVDDILLAATSELDCQQGTRALLQTLGDLGYRASAKKAQICQKQVKYLGYLLREGQRWLTEARKETVMGQPVPKTPRQLREFLGKAGFCRLFIPGFAEMAAPLYPLTKPGTLFSWGPDQQKAYQEIKQALLTAPALGLPDLTKPFELFVDEKQGYAKGVLTQKLGPWRRPVAYLSKKLDPVAAGWPPCLRMVAAIAVLTKDAGKLTMGQPLVILAPHAVEALVKQPPDRWLSNARMTHYQAMLLDTDRVQFGPVVALNPATLLPLPEEGAPHDCLEILAETHGTRPDLTDQPIPDADHTWYTDGSSFLQEGQRKAGAAVTTETEVIWAGALPAGTSAQRAELIALTQALKMAEGKRLNVYTDSRYAFATAHIHGEIYRRRGWLTSEGREIKNKSEILALLKALFLPKRLSIIHCLGHQKGDSAEARGNRLADQAAREAAIKTPPDTSTLLIAGKRTADGSEFEKRTADGSEFESPKKKAKVE

SEQ ID NO: 2161 - protein, 2096 aa, synthetic construct
MPAAKRVKLDGGDKKYSIGLDIGTNSVGWAVITDEYKVPSKKFKVLGNTDRHSIKKNLIGALLFDSGETAEATRLKRTARRRYTRRKNRICYLQEIFSNEMAKVDDSFFHRLEESFLVEEDKKHERHPIFGNIVDEVAYHEKYPTIYHLRKKLVDSTDKADLRLIYLALAHMIKFRGHFLIEGDLNPDNSDVDKLFIQLVQTYNQLFEENPINASGVDAKAILSARLSKSRRLENLIAQLPGEKKNGLFGNLIALSLGLTPNFKSNFDLAEDAKLQLSKDTYDDDLDNLLAQIGDQYADLFLAAKNLSDAILLSDILRVNTEITKAPLSASMIKRYDEHHQDLTLLKALVRQQLPEKYKEIFFDQSKNGYAGYIDGGASQEEFYKFIKPILEKMDGTEELLVKLNREDLLRKQRTFDNGSIPHQIHLGELHAILRRQEDFYPFLKDNREKIEKILTFRIPYYVGPLARGNSRFAWMTRKSEETITPWNFEEVVDKGASAQSFIERMTNFDKNLPNEKVLPKHSLLYEYFTVYNELTKVKYVTEGMRKPAFLSGEQKKAIVDLLFKTNRKVTVKQLKEDYFKKIECFDSVEISGVEDRFNASLGTYHDLLKIIKDKDFLDNEENEDILEDIVLTLTLFEDREMIEERLKTYAHLFDDKVMKQLKRRRYTGWGRLSRKLINGIRDKQSGKTILDFLKSDGFANRNFMQLIHDDSLTFKEDIQKAQVSGQGDSLHEHIANLAGSPAIKKGILQTVKVVDELVKVMGRHKPENIVIEMARENQTTQKGQKNSRERMKRIEEGIKELGSQILKEHPVENTQLQNEKLYLYYLQNGRDMYVDQELDINRLSDYDVDHIVPQSFLKDDSIDNKVLTRSDKARGKSDNVPSEEVVKKMKNYWRQLLNAKLITQRKFDNLTKAERGGLSELDKAGFIKRQLVETRQITKHVAQILDSRMNTKYDENDKLIREVKVITLKSKLVSDFRKDFQFYKVREINNYHHAHDAYLNAVVGTALIKKYPKLESEFVYGDYKVYDVRKMIAKSEQEIGKATAKYFFYSNIMNFFKTEITLANGEIRKRPLIETNGETGEIVWDKGRDFATVRKVLSMPQVNIVKKTEVQTGGFSKESILPKRNSDKLIARKKDWDPKKYGGFDSPTVAYSVLVVAKVEKGKSKKLKSVKELLGITIMERSSFEKNPIDFLEAKGYKEVKKDLIIKLPKYSLFELENGRKRMLASAGELQKGNELALPSKYVNFLYLASHYEKLKGSPEDNEQKQLFVEQHKHYLDEIIEQISEFSKRVILADANLDKVLSAYNKHRDKPIREQAENIIHLFTLTNLGAPAAFKYFDTTIDRKRYTSTKEVLDATLIHQSITGLYETRIDLSQLGGDGGEAAAKGGGGGSGGLGIEDEYRLHETSTEPDVSLGSTWLSDFPQAWAETGGMGLAVRQAPLIIPLKATSTPVSIQQYPMSHEARLGIKPHIQRLLDQGILVPCQSPWNTPLLPVKKPGTNDYRPVQDLREVNKRVEDIHPTVPNPYNLLSGLPPSHQWYTVLDLKDAFFCLRLHPTSQPLFAFEWRDPGMGISGQLTWTRLPQGFKNSPTLFNEALHRDLADFRIQHPDLILLQYVDDILLAATSELDCQQGTRALLQTLGDLGYRASAKKAQICQKQVKYLGYLLREGQRWLTEARKETVMGQPVPKTPRQLREFLGKAGFCRLFIPGFAEMAAPLYPLTKPGTLFSWGPDQQKAYQEIKQALLTAPALGLPDLTKPFELFVDEKQGYAKGVLTQKLGPWRRPVAYLSKKLDPVAAGWPPCLRMVAAIAVLTKDAGKLTMGQPLVILAPHAVEALVKQPPDRWLSNARMTHYQAMLLDTDRVQFGPVVALNPATLLPLPEEGAPHDCLEILAETHGTRPDLTDQPIPDADHTWYTDGSSFLQEGQRKAGAAVTTETEVIWAGALPAGTSAQRAELIALTQALKMAEGKRLNVYTDSRYAFATAHIHGEIYRRRGWLTSEGREIKNKSEILALLKALFLPKRLSIIHCLGHQKGDSAEARGNRLADQAAREAAIKTPPDTSTLLIAGKRTADGSEFEKRTADGSEFESPKKKAKVE

SEQ ID NO: 2162 - protein, 2091 aa, synthetic construct
MPAAKRVKLDGGDKKYSIGLDIGTNSVGWAVITDEYKVPSKKFKVLGNTDRHSIKKNLIGALLFDSGETAEATRLKRTARRRYTRRKNRICYLQEIFSNEMAKVDDSFFHRLEESFLVEEDKKHERHPIFGNIVDEVAYHEKYPTIYHLRKKLVDSTDKADLRLIYLALAHMIKFRGHFLIEGDLNPDNSDVDKLFIQLVQTYNQLFEENPINASGVDAKAILSARLSKSRRLENLIAQLPGEKKNGLFGNLIALSLGLTPNFKSNFDLAEDAKLQLSKDTYDDDLDNLLAQIGDQYADLFLAAKNLSDAILLSDILRVNTEITKAPLSASMIKRYDEHHQDLTLLKALVRQQLPEKYKEIFFDQSKNGYAGYIDGGASQEEFYKFIKPILEKMDGTEELLVKLNREDLLRKQRTFDNGSIPHQIHLGELHAILRRQEDFYPFLKDNREKIEKILTFRIPYYVGPLARGNSRFAWMTRKSEETITPWNFEEVVDKGASAQSFIERMTNFDKNLPNEKVLPKHSLLYEYFTVYNELTKVKYVTEGMRKPAFLSGEQKKAIVDLLFKTNRKVTVKQLKEDYFKKIECFDSVEISGVEDRFNASLGTYHDLLKIIKDKDFLDNEENEDILEDIVLTLTLFEDREMIEERLKTYAHLFDDKVMKQLKRRRYTGWGRLSRKLINGIRDKQSGKTILDFLKSDGFANRNFMQLIHDDSLTFKEDIQKAQVSGQGDSLHEHIANLAGSPAIKKGILQTVKVVDELVKVMGRHKPENIVIEMARENQTTQKGQKNSRERMKRIEEGIKELGSQILKEHPVENTQLQNEKLYLYYLQNGRDMYVDQELDINRLSDYDVDHIVPQSFLKDDSIDNKVLTRSDKARGKSDNVPSEEVVKKMKNYWRQLLNAKLITQRKFDNLTKAERGGLSELDKAGFIKRQLVETRQITKHVAQILDSRMNTKYDENDKLIREVKVITLKSKLVSDFRKDFQFYKVREINNYHHAHDAYLNAVVGTALIKKYPKLESEFVYGDYKVYDVRKMIAKSEQEIGKATAKYFFYSNIMNFFKTEITLANGEIRKRPLIETNGETGEIVWDKGRDFATVRKVLSMPQVNIVKKTEVQTGGFSKESILPKRNSDKLIARKKDWDPKKYGGFDSPTVAYSVLVVAKVEKGKSKKLKSVKELLGITIMERSSFEKNPIDFLEAKGYKEVKKDLIIKLPKYSLFELENGRKRMLASAGELQKGNELALPSKYVNFLYLASHYEKLKGSPEDNEQKQLFVEQHKHYLDEIIEQISEFSKRVILADANLDKVLSAYNKHRDKPIREQAENIIHLFTLTNLGAPAAFKYFDTTIDRKRYTSTKEVLDATLIHQSITGLYETRIDLSQLGGDGGPAPGGSGGLGIEDEYRLHETSTEPDVSLGSTWLSDFPQAWAETGGMGLAVRQAPLIIPLKATSTPVSIQQYPMSHEARLGIKPHIQRLLDQGILVPCQSPWNTPLLPVKKPGTNDYRPVQDLREVNKRVEDIHPTVPNPYNLLSGLPPSHQWYTVLDLKDAFFCLRLHPTSQPLFAFEWRDPGMGISGQLTWTRLPQGFKNSPTLFNEALHRDLADFRIQHPDLILLQYVDDILLAATSELDCQQGTRALLQTLGDLGYRASAKKAQICQKQVKYLGYLLREGQRWLTEARKETVMGQPVPKTPRQLREFLGKAGFCRLFIPGFAEMAAPLYPLTKPGTLFSWGPDQQKAYQEIKQALLTAPALGLPDLTKPFELFVDEKQGYAKGVLTQKLGPWRRPVAYLSKKLDPVAAGWPPCLRMVAAIAVLTKDAGKLTMGQPLVILAPHAVEALVKQPPDRWLSNARMTHYQAMLLDTDRVQFGPVVALNPATLLPLPEEGAPHDCLEILAETHGTRPDLTDQPIPDADHTWYTDGSSFLQEGQRKAGAAVTTETEVIWAGALPAGTSAQRAELIALTQALKMAEGKRLNVYTDSRYAFATAHIHGEIYRRRGWLTSEGREIKNKSEILALLKALFLPKRLSIIHCLGHQKGDSAEARGNRLADQAAREAAIKTPPDTSTLLIAGKRTADGSEFEKRTADGSEFESPKKKAKVE

SEQ ID NO: 2163 - protein, 2096 aa, synthetic construct
MPAAKRVKLDGGDKKYSIGLDIGTNSVGWAVITDEYKVPSKKFKVLGNTDRHSIKKNLIGALLFDSGETAEATRLKRTARRRYTRRKNRICYLQEIFSNEMAKVDDSFFHRLEESFLVEEDKKHERHPIFGNIVDEVAYHEKYPTIYHLRKKLVDSTDKADLRLIYLALAHMIKFRGHFLIEGDLNPDNSDVDKLFIQLVQTYNQLFEENPINASGVDAKAILSARLSKSRRLENLIAQLPGEKKNGLFGNLIALSLGLTPNFKSNFDLAEDAKLQLSKDTYDDDLDNLLAQIGDQYADLFLAAKNLSDAILLSDILRVNTEITKAPLSASMIKRYDEHHQDLTLLKALVRQQLPEKYKEIFFDQSKNGYAGYIDGGASQEEFYKFIKPILEKMDGTEELLVKLNREDLLRKQRTFDNGSIPHQIHLGELHAILRRQEDFYPFLKDNREKIEKILTFRIPYYVGPLARGNSRFAWMTRKSEETITPWNFEEVVDKGASAQSFIERMTNFDKNLPNEKVLPKHSLLYEYFTVYNELTKVKYVTEGMRKPAFLSGEQKKAIVDLLFKTNRKVTVKQLKEDYFKKIECFDSVEISGVEDRFNASLGTYHDLLKIIKDKDFLDNEENEDILEDIVLTLTLFEDREMIEERLKTYAHLFDDKVMKQLKRRRYTGWGRLSRKLINGIRDKQSGKTILDFLKSDGFANRNFMQLIHDDSLTFKEDIQKAQVSGQGDSLHEHIANLAGSPAIKKGILQTVKVVDELVKVMGRHKPENIVIEMARENQTTQKGQKNSRERMKRIEEGIKELGSQILKEHPVENTQLQNEKLYLYYLQNGRDMYVDQELDINRLSDYDVDHIVPQSFLKDDSIDNKVLTRSDKARGKSDNVPSEEVVKKMKNYWRQLLNAKLITQRKFDNLTKAERGGLSELDKAGFIKRQLVETRQITKHVAQILDSRMNTKYDENDKLIREVKVITLKSKLVSDFRKDFQFYKVREINNYHHAHDAYLNAVVGTALIKKYPKLESEFVYGDYKVYDVRKMIAKSEQEIGKATAKYFFYSNIMNFFKTEITLANGEIRKRPLIETNGETGEIVWDKGRDFATVRKVLSMPQVNIVKKTEVQTGGFSKESILPKRNSDKLIARKKDWDPKKYGGFDSPTVAYSVLVVAKVEKGKSKKLKSVKELLGITIMERSSFEKNPIDFLEAKGYKEVKKDLIIKLPKYSLFELENGRKRMLASAGELQKGNELALPSKYVNFLYLASHYEKLKGSPEDNEQKQLFVEQHKHYLDEIIEQISEFSKRVILADANLDKVLSAYNKHRDKPIREQAENIIHLFTLTNLGAPAAFKYFDTTIDRKRYTSTKEVLDATLIHQSITGLYETRIDLSQLGGDGGEAAAKPAPGSSGGLGIEDEYRLHETSTEPDVSLGSTWLSDFPQAWAETGGMGLAVRQAPLIIPLKATSTPVSIQQYPMSHEARLGIKPHIQRLLDQGILVPCQSPWNTPLLPVKKPGTNDYRPVQDLREVNKRVEDIHPTVPNPYNLLSGLPPSHQWYTVLDLKDAFFCLRLHPTSQPLFAFEWRDPGMGISGQLTWTRLPQGFKNSPTLFNEALHRDLADFRIQHPDLILLQYVDDILLAATSELDCQQGTRALLQTLGDLGYRASAKKAQICQKQVKYLGYLLREGQRWLTEARKETVMGQPVPKTPRQLREFLGKAGFCRLFIPGFAEMAAPLYPLTKPGTLFSWGPDQQKAYQEIKQALLTAPALGLPDLTKPFELFVDEKQGYAKGVLTQKLGPWRRPVAYLSKKLDPVAAGWPPCLRMVAAIAVLTKDAGKLTMGQPLVILAPHAVEALVKQPPDRWLSNARMTHYQAMLLDTDRVQFGPVVALNPATLLPLPEEGAPHDCLEILAETHGTRPDLTDQPIPDADHTWYTDGSSFLQEGQRKAGAAVTTETEVIWAGALPAGTSAQRAELIALTQALKMAEGKRLNVYTDSRYAFATAHIHGEIYRRRGWLTSEGREIKNKSEILALLKALFLPKRLSIIHCLGHQKGDSAEARGNRLADQAAREAAIKTPPDTSTLLIAGKRTADGSEFEKRTADGSEFESPKKKAKVE

SEQ ID NO: 2164 - protein, 2100 aa, synthetic construct
MPAAKRVKLDGGDKKYSIGLDIGTNSVGWAVITDEYKVPSKKFKVLGNTDRHSIKKNLIGALLFDSGETAEATRLKRTARRRYTRRKNRICYLQEIFSNEMAKVDDSFFHRLEESFLVEEDKKHERHPIFGNIVDEVAYHEKYPTIYHLRKKLVDSTDKADLRLIYLALAHMIKFRGHFLIEGDLNPDNSDVDKLFIQLVQTYNQLFEENPINASGVDAKAILSARLSKSRRLENLIAQLPGEKKNGLFGNLIALSLGLTPNFKSNFDLAEDAKLQLSKDTYDDDLDNLLAQIGDQYADLFLAAKNLSDAILLSDILRVNTEITKAPLSASMIKRYDEHHQDLTLLKALVRQQLPEKYKEIFFDQSKNGYAGYIDGGASQEEFYKFIKPILEKMDGTEELLVKLNREDLLRKQRTFDNGSIPHQIHLGELHAILRRQEDFYPFLKDNREKIEKILTFRIPYYVGPLARGNSRFAWMTRKSEETITPWNFEEVVDKGASAQSFIERMTNFDKNLPNEKVLPKHSLLYEYFTVYNELTKVKYVTEGMRKPAFLSGEQKKAIVDLLFKTNRKVTVKQLKEDYFKKIECFDSVEISGVEDRFNASLGTYHDLLKIIKDKDFLDNEENEDILEDIVLTLTLFEDREMIEERLKTYAHLFDDKVMKQLKRRRYTGWGRLSRKLINGIRDKQSGKTILDFLKSDGFANRNFMQLIHDDSLTFKEDIQKAQVSGQGDSLHEHIANLAGSPAIKKGILQTVKVVDELVKVMGRHKPENIVIEMARENQTTQKGQKNSRERMKRIEEGIKELGSQILKEHPVENTQLQNEKLYLYYLQNGRDMYVDQELDINRLSDYDVDHIVPQSFLKDDSIDNKVLTRSDKARGKSDNVPSEEVVKKMKNYWRQLLNAKLITQRKFDNLTKAERGGLSELDKAGFIKRQLVETRQITKHVAQILDSRMNTKYDENDKLIREVKVITLKSKLVSDFRKDFQFYKVREINNYHHAHDAYLNAVVGTALIKKYPKLESEFVYGDYKVYDVRKMIAKSEQEIGKATAKYFFYSNIMNFFKTEITLANGEIRKRPLIETNGETGEIVWDKGRDFATVRKVLSMPQVNIVKKTEVQTGGFSKESILPKRNSDKLIARKKDWDPKKYGGFDSPTVAYSVLVVAKVEKGKSKKLKSVKELLGITIMERSSFEKNPIDFLEAKGYKEVKKDLIIKLPKYSLFELENGRKRMLASAGELQKGNELALPSKYVNFLYLASHYEKLKGSPEDNEQKQLFVEQHKHYLDEIIEQISEFSKRVILADANLDKVLSAYNKHRDKPIREQAENIIHLFTLTNLGAPAAFKYFDTTIDRKRYTSTKEVLDATLIHQSITGLYETRIDLSQLGGDGGGSSGSSGSSGSSGSSGGLGIEDEYRLHETSTEPDVSLGSTWLSDFPQAWAETGGMGLAVRQAPLIIPLKATSTPVSIQQYPMSHEARLGIKPHIQRLLDQGILVPCQSPWNTPLLPVKKPGTNDYRPVQDLREVNKRVEDIHPTVPNPYNLLSGLPPSHQWYTVLDLKDAFFCLRLHPTSQPLFAFEWRDPGMGISGQLTWTRLPQGFKNSPTLFNEALHRDLADFRIQHPDLILLQYVDDILLAATSELDCQQGTRALLQTLGDLGYRASAKKAQICQKQVKYLGYLLREGQRWLTEARKETVMGQPVPKTPRQLREFLGKAGFCRLFIPGFAEMAAPLYPLTKPGTLFSWGPDQQKAYQEIKQALLTAPALGLPDLTKPFELFVDEKQGYAKGVLTQKLGPWRRPVAYLSKKLDPVAAGWPPCLRMVAAIAVLTKDAGKLTMGQPLVILAPHAVEALVKQPPDRWLSNARMTHYQAMLLDTDRVQFGPVVALNPATLLPLPEEGAPHDCLEILAETHGTRPDLTDQPIPDADHTWYTDGSSFLQEGQRKAGAAVTTETEVIWAGALPAGTSAQRAELIALTQALKMAEGKRLNVYTDSRYAFATAHIHGEIYRRRGWLTSEGREIKNKSEILALLKALFLPKRLSIIHCLGHQKGDSAEARGNRLADQAAREAAIKTPPDTSTLLIAGKRTADGSEFEKRTADGSEFESPKKKAKVE

SEQ ID NO: 2165 - protein, 2094 aa, synthetic construct
MPAAKRVKLDGGDKKYSIGLDIGTNSVGWAVITDEYKVPSKKFKVLGNTDRHSIKKNLIGALLFDSGETAEATRLKRTARRRYTRRKNRICYLQEIFSNEMAKVDDSFFHRLEESFLVEEDKKHERHPIFGNIVDEVAYHEKYPTIYHLRKKLVDSTDKADLRLIYLALAHMIKFRGHFLIEGDLNPDNSDVDKLFIQLVQTYNQLFEENPINASGVDAKAILSARLSKSRRLENLIAQLPGEKKNGLFGNLIALSLGLTPNFKSNFDLAEDAKLQLSKDTYDDDLDNLLAQIGDQYADLFLAAKNLSDAILLSDILRVNTEITKAPLSASMIKRYDEHHQDLTLLKALVRQQLPEKYKEIFFDQSKNGYAGYIDGGASQEEFYKFIKPILEKMDGTEELLVKLNREDLLRKQRTFDNGSIPHQIHLGELHAILRRQEDFYPFLKDNREKIEKILTFRIPYYVGPLARGNSRFAWMTRKSEETITPWNFEEVVDKGASAQSFIERMTNFDKNLPNEKVLPKHSLLYEYFTVYNELTKVKYVTEGMRKPAFLSGEQKKAIVDLLFKTNRKVTVKQLKEDYFKKIECFDSVEISGVEDRFNASLGTYHDLLKIIKDKDFLDNEENEDILEDIVLTLTLFEDREMIEERLKTYAHLFDDKVMKQLKRRRYTGWGRLSRKLINGIRDKQSGKTILDFLKSDGFANRNFMQLIHDDSLTFKEDIQKAQVSGQGDSLHEHIANLAGSPAIKKGILQTVKVVDELVKVMGRHKPENIVIEMARENQTTQKGQKNSRERMKRIEEGIKELGSQILKEHPVENTQLQNEKLYLYYLQNGRDMYVDQELDINRLSDYDVDHIVPQSFLKDDSIDNKVLTRSDKARGKSDNVPSEEVVKKMKNYWRQLLNAKLITQRKFDNLTKAERGGLSELDKAGFIKRQLVETRQITKHVAQILDSRMNTKYDENDKLIREVKVITLKSKLVSDFRKDFQFYKVREINNYHHAHDAYLNAVVGTALIKKYPKLESEFVYGDYKVYDVRKMIAKSEQEIGKATAKYFFYSNIMNFFKTEITLANGEIRKRPLIETNGETGEIVWDKGRDFATVRKVLSMPQVNIVKKTEVQTGGFSKESILPKRNSDKLIARKKDWDPKKYGGFDSPTVAYSVLVVAKVEKGKSKKLKSVKELLGITIMERSSFEKNPIDFLEAKGYKEVKKDLIIKLPKYSLFELENGRKRMLASAGELQKGNELALPSKYVNFLYLASHYEKLKGSPEDNEQKQLFVEQHKHYLDEIIEQISEFSKRVILADANLDKVLSAYNKHRDKPIREQAENIIHLFTLTNLGAPAAFKYFDTTIDRKRYTSTKEVLDATLIHQSITGLYETRIDLSQLGGDGGGSSGGSGGGGGLGIEDEYRLHETSTEPDVSLGSTWLSDFPQAWAETGGMGLAVRQAPLIIPLKATSTPVSIQQYPMSHEARLGIKPHIQRLLDQGILVPCQSPWNTPLLPVKKPGTNDYRPVQDLREVNKRVEDIHPTVPNPYNLLSGLPPSHQWYTVLDLKDAFFCLRLHPTSQPLFAFEWRDPGMGISGQLTWTRLPQGFKNSPTLFNEALHRDLADFRIQHPDLILLQYVDDILLAATSELDCQQGTRALLQTLGDLGYRASAKKAQICQKQVKYLGYLLREGQRWLTEARKETVMGQPVPKTPRQLREFLGKAGFCRLFIPGFAEMAAPLYPLTKPGTLFSWGPDQQKAYQEIKQALLTAPALGLPDLTKPFELFVDEKQGYAKGVLTQKLGPWRRPVAYLSKKLDPVAAGWPPCLRMVAAIAVLTKDAGKLTMGQPLVILAPHAVEALVKQPPDRWLSNARMTHYQAMLLDTDRVQFGPVVALNPATLLPLPEEGAPHDCLEILAETHGTRPDLTDQPIPDADHTWYTDGSSFLQEGQRKAGAAVTTETEVIWAGALPAGTSAQRAELIALTQALKMAEGKRLNVYTDSRYAFATAHIHGEIYRRRGWLTSEGREIKNKSEILALLKALFLPKRLSIIHCLGHQKGDSAEARGNRLADQAAREAAIKTPPDTSTLLIAGKRTADGSEFEKRTADGSEFESPKKKAKVE

SEQ ID NO: 2166 - protein, 2094 aa, synthetic construct; identical to SEQ ID NO: 2051

SEQ ID NO: 2167 - protein, 2092 aa, synthetic construct
MPAAKRVKLDGGDKKYSIGLDIGTNSVGWAVITDEYKVPSKKFKVLGNTDRHSIKKNLIGALLFDSGETAEATRLKRTARRRYTRRKNRICYLQEIFSNEMAKVDDSFFHRLEESFLVEEDKKHERHPIFGNIVDEVAYHEKYPTIYHLRKKLVDSTDKADLRLIYLALAHMIKFRGHFLIEGDLNPDNSDVDKLFIQLVQTYNQLFEENPINASGVDAKAILSARLSKSRRLENLIAQLPGEKKNGLFGNLIALSLGLTPNFKSNFDLAEDAKLQLSKDTYDDDLDNLLAQIGDQYADLFLAAKNLSDAILLSDILRVNTEITKAPLSASMIKRYDEHHQDLTLLKALVRQQLPEKYKEIFFDQSKNGYAGYIDGGASQEEFYKFIKPILEKMDGTEELLVKLNREDLLRKQRTFDNGSIPHQIHLGELHAILRRQEDFYPFLKDNREKIEKILTFRIPYYVGPLARGNSRFAWMTRKSEETITPWNFEEVVDKGASAQSFIERMTNFDKNLPNEKVLPKHSLLYEYFTVYNELTKVKYVTEGMRKPAFLSGEQKKAIVDLLFKTNRKVTVKQLKEDYFKKIECFDSVEISGVEDRFNASLGTYHDLLKIIKDKDFLDNEENEDILEDIVLTLTLFEDREMIEERLKTYAHLFDDKVMKQLKRRRYTGWGRLSRKLINGIRDKQSGKTILDFLKSDGFANRNFMQLIHDDSLTFKEDIQKAQVSGQGDSLHEHIANLAGSPAIKKGILQTVKVVDELVKVMGRHKPENIVIEMARENQTTQKGQKNSRERMKRIEEGIKELGSQILKEHPVENTQLQNEKLYLYYLQNGRDMYVDQELDINRLSDYDVDHIVPQSFLKDDSIDNKVLTRSDKARGKSDNVPSEEVVKKMKNYWRQLLNAKLITQRKFDNLTKAERGGLSELDKAGFIKRQLVETRQITKHVAQILDSRMNTKYDENDKLIREVKVITLKSKLVSDFRKDFQFYKVREINNYHHAHDAYLNAVVGTALIKKYPKLESEFVYGDYKVYDVRKMIAKSEQEIGKATAKYFFYSNIMNFFKTEITLANGEIRKRPLIETNGETGEIVWDKGRDFATVRKVLSMPQVNIVKKTEVQTGGFSKESILPKRNSDKLIARKKDWDPKKYGGFDSPTVAYSVLVVAKVEKGKSKKLKSVKELLGITIMERSSFEKNPIDFLEAKGYKEVKKDLIIKLPKYSLFELENGRKRMLASAGELQKGNELALPSKYVNFLYLASHYEKLKGSPEDNEQKQLFVEQHKHYLDEIIEQISEFSKRVILADANLDKVLSAYNKHRDKPIREQAENIIHLFTLTNLGAPAAFKYFDTTIDRKRYTSTKEVLDATLIHQSITGLYETRIDLSQLGGDGGPAPAPAPGGLGIEDEYRLHETSTEPDVSLGSTWLSDFPQAWAETGGMGLAVRQAPLIIPLKATSTPVSIQQYPMSHEARLGIKPHIQRLLDQGILVPCQSPWNTPLLPVKKPGTNDYRPVQDLREVNKRVEDIHPTVPNPYNLLSGLPPSHQWYTVLDLKDAFFCLRLHPTSQPLFAFEWRDPGMGISGQLTWTRLPQGFKNSPTLFNEALHRDLADFRIQHPDLILLQYVDDILLAATSELDCQQGTRALLQTLGDLGYRASAKKAQICQKQVKYLGYLLREGQRWLTEARKETVMGQPVPKTPRQLREFLGKAGFCRLFIPGFAEMAAPLYPLTKPGTLFSWGPDQQKAYQEIKQALLTAPALGLPDLTKPFELFVDEKQGYAKGVLTQKLGPWRRPVAYLSKKLDPVAAGWPPCLRMVAAIAVLTKDAGKLTMGQPLVILAPHAVEALVKQPPDRWLSNARMTHYQAMLLDTDRVQFGPVVALNPATLLPLPEEGAPHDCLEILAETHGTRPDLTDQPIPDADHTWYTDGSSFLQEGQRKAGAAVTTETEVIWAGALPAGTSAQRAELIALTQALKMAEGKRLNVYTDSRYAFATAHIHGEIYRRRGWLTSEGREIKNKSEILALLKALFLPKRLSIIHCLGHQKGDSAEARGNRLADQAAREAAIKTPPDTSTLLIAGKRTADGSEFEKRTADGSEFESPKKKAKVE

SEQ ID NO: 2168 - protein, 2096 aa, synthetic construct
MPAAKRVKLDGGDKKYSIGLDIGTNSVGWAVITDEYKVPSKKFKVLGNTDRHSIKKNLIGALLFDSGETAEATRLKRTARRRYTRRKNRICYLQEIFSNEMAKVDDSFFHRLEESFLVEEDKKHERHPIFGNIVDEVAYHEKYPTIYHLRKKLVDSTDKADLRLIYLALAHMIKFRGHFLIEGDLNPDNSDVDKLFIQLVQTYNQLFEENPINASGVDAKAILSARLSKSRRLENLIAQLPGEKKNGLFGNLIALSLGLTPNFKSNFDLAEDAKLQLSKDTYDDDLDNLLAQIGDQYADLFLAAKNLSDAILLSDILRVNTEITKAPLSASMIKRYDEHHQDLTLLKALVRQQLPEKYKEIFFDQSKNGYAGYIDGGASQEEFYKFIKPILEKMDGTEELLVKLNREDLLRKQRTFDNGSIPHQIHLGELHAILRRQEDFYPFLKDNREKIEKILTFRIPYYVGPLARGNSRFAWMTRKSEETITPWNFEEVVDKGASAQSFIERMTNFDKNLPNEKVLPKHSLLYEYFTVYNELTKVKYVTEGMRKPAFLSGEQKKAIVDLLFKTNRKVTVKQLKEDYFKKIECFDSVEISGVEDRFNASLGTYHDLLKIIKDKDFLDNEENEDILEDIVLTLTLFEDREMIEERLKTYAHLFDDKVMKQLKRRRYTGWGRLSRKLINGIRDKQSGKTILDFLKSDGFANRNFMQLIHDDSLTFKEDIQKAQVSGQGDSLHEHIANLAGSPAIKKGILQTVKVVDELVKVMGRHKPENIVIEMARENQTTQKGQKNSRERMKRIEEGIKELGSQILKEHPVENTQLQNEKLYLYYLQNGRDMYVDQELDINRLSDYDVDHIVPQSFLKDDSIDNKVLTRSDKARGKSDNVPSEEVVKKMKNYWRQLLNAKLITQRKFDNLTKAERGGLSELDKAGFIKRQLVETRQITKHVAQILDSRMNTKYDENDKLIREVKVITLKSKLVSDFRKDFQFYKVREINNYHHAHDAYLNAVVGTALIKKYPKLESEFVYGDYKVYDVRKMIAKSEQEIGKATAKYFFYSNIMNFFKTEITLANGEIRKRPLIETNGETGEIVWDKGRDFATVRKVLSMPQVNIVKKTEVQTGGFSKESILPKRNSDKLIARKKDWDPKKYGGFDSPTVAYSVLVVAKVEKGKSKKLKSVKELLGITIMERSSFEKNPIDFLEAKGYKEVKKDLIIKLPKYSLFELENGRKRMLASAGELQKGNELALPSKYVNFLYLASHYEKLKGSPEDNEQKQLFVEQHKHYLDEIIEQISEFSKRVILADANLDKVLSAYNKHRDKPIREQAENIIHLFTLTNLGAPAAFKYFDTTIDRKRYTSTKEVLDATLIHQSITGLYETRIDLSQLGGDGGGGSEAAAKGSSGGLGIEDEYRLHETSTEPDVSLGSTWLSDFPQAWAETGGMGLAVRQAPLIIPLKATSTPVSIQQYPMSHEARLGIKPHIQRLLDQGILVPCQSPWNTPLLPVKKPGTNDYRPVQDLREVNKRVEDIHPTVPNPYNLLSGLPPSHQWYTVLDLKDAFFCLRLHPTSQPLFAFEWRDPGMGISGQLTWTRLPQGFKNSPTLFNEALHRDLADFRIQHPDLILLQYVDDILLAATSELDCQQGTRALLQTLGDLGYRASAKKAQICQKQVKYLGYLLREGQRWLTEARKETVMGQPVPKTPRQLREFLGKAGFCRLFIPGFAEMAAPLYPLTKPGTLFSWGPDQQKAYQEIKQALLTAPALGLPDLTKPFELFVDEKQGYAKGVLTQKLGPWRRPVAYLSKKLDPVAAGWPPCLRMVAAIAVLTKDAGKLTMGQPLVILAPHAVEALVKQPPDRWLSNARMTHYQAMLLDTDRVQFGPVVALNPATLLPLPEEGAPHDCLEILAETHGTRPDLTDQPIPDADHTWYTDGSSFLQEGQRKAGAAVTTETEVIWAGALPAGTSAQRAELIALTQALKMAEGKRLNVYTDSRYAFATAHIHGEIYRRRGWLTSEGREIKNKSEILALLKALFLPKRLSIIHCLGHQKGDSAEARGNRLADQAAREAAIKTPPDTSTLLIAGKRTADGSEFEKRTADGSEFESPKKKAKVE

SEQ ID NO: 2169 - protein, 2090 aa, synthetic construct
MPAAKRVKLDGGDKKYSIGLDIGTNSVGWAVITDEYKVPSKKFKVLGNTDRHSIKKNLIGALLFDSGETAEATRLKRTARRRYTRRKNRICYLQEIFSNEMAKVDDSFFHRLEESFLVEEDKKHERHPIFGNIVDEVAYHEKYPTIYHLRKKLVDSTDKADLRLIYLALAHMIKFRGHFLIEGDLNPDNSDVDKLFIQLVQTYNQLFEENPINASGVDAKAILSARLSKSRRLENLIAQLPGEKKNGLFGNLIALSLGLTPNFKSNFDLAEDAKLQLSKDTYDDDLDNLLAQIGDQYADLFLAAKNLSDAILLSDILRVNTEITKAPLSASMIKRYDEHHQDLTLLKALVRQQLPEKYKEIFFDQSKNGYAGYIDGGASQEEFYKFIKPILEKMDGTEELLVKLNREDLLRKQRTFDNGSIPHQIHLGELHAILRRQEDFYPFLKDNREKIEKILTFRIPYYVGPLARGNSRFAWMTRKSEETITPWNFEEVVDKGASAQSFIERMTNFDKNLPNEKVLPKHSLLYEYFTVYNELTKVKYVTEGMRKPAFLSGEQKKAIVDLLFKTNRKVTVKQLKEDYFKKIECFDSVEISGVEDRFNASLGTYHDLLKIIKDKDFLDNEENEDILEDIVLTLTLFEDREMIEERLKTYAHLFDDKVMKQLKRRRYTGWGRLSRKLINGIRDKQSGKTILDFLKSDGFANRNFMQLIHDDSLTFKEDIQKAQVSGQGDSLHEHIANLAGSPAIKKGILQTVKVVDELVKVMGRHKPENIVIEMARENQTTQKGQKNSRERMKRIEEGIKELGSQILKEHPVENTQLQNEKLYLYYLQNGRDMYVDQELDINRLSDYDVDHIVPQSFLKDDSIDNKVLTRSDKARGKSDNVPSEEVVKKMKNYWRQLLNAKLITQRKFDNLTKAERGGLSELDKAGFIKRQLVETRQITKHVAQILDSRMNTKYDENDKLIREVKVITLKSKLVSDFRKDFQFYKVREINNYHHAHDAYLNAVVGTALIKKYPKLESEFVYGDYKVYDVRKMIAKSEQEIGKATAKYFFYSNIMNFFKTEITLANGEIRKRPLIETNGETGEIVWDKGRDFATVRKVLSMPQVNIVKKTEVQTGGFSKESILPKRNSDKLIARKKDWDPKKYGGFDSPTVAYSVLVVAKVEKGKSKKLKSVKELLGITIMERSSFEKNPIDFLEAKGYKEVKKDLIIKLPKYSLFELENGRKRMLASAGELQKGNELALPSKYVNFLYLASHYEKLKGSPEDNEQKQLFVEQHKHYLDEIIEQISEFSKRVILADANLDKVLSAYNKHRDKPIREQAENIIHLFTLTNLGAPAAFKYFDTTIDRKRYTSTKEVLDATLIHQSITGLYETRIDLSQLGGDGGGGGGGGGLGIEDEYRLHETSTEPDVSLGSTWLSDFPQAWAETGGMGLAVRQAPLIIPLKATSTPVSIQQYPMSHEARLGIKPHIQRLLDQGILVPCQSPWNTPLLPVKKPGTNDYRPVQDLREVNKRVEDIHPTVPNPYNLLSGLPPSHQWYTVLDLKDAFFCLRLHPTSQPLFAFEWRDPGMGISGQLTWTRLPQGFKNSPTLFNEALHRDLADFRIQHPDLILLQYVDDILLAATSELDCQQGTRALLQTLGDLGYRASAKKAQICQKQVKYLGYLLREGQRWLTEARKETVMGQPVPKTPRQLREFLGKAGFCRLFIPGFAEMAAPLYPLTKPGTLFSWGPDQQKAYQEIKQALLTAPALGLPDLTKPFELFVDEKQGYAKGVLTQKLGPWRRPVAYLSKKLDPVAAGWPPCLRMVAAIAVLTKDAGKLTMGQPLVILAPHAVEALVKQPPDRWLSNARMTHYQAMLLDTDRVQFGPVVALNPATLLPLPEEGAPHDCLEILAETHGTRPDLTDQPIPDADHTWYTDGSSFLQEGQRKAGAAVTTETEVIWAGALPAGTSAQRAELIALTQALKMAEGKRLNVYTDSRYAFATAHIHGEIYRRRGWLTSEGREIKNKSEILALLKALFLPKRLSIIHCLGHQKGDSAEARGNRLADQAAREAAIKTPPDTSTLLIAGKRTADGSEFEKRTADGSEFESPKKKAKVE

SEQ ID NO: 2170 - protein, 2091 aa, synthetic construct
MPAAKRVKLDGGDKKYSIGLDIGTNSVGWAVITDEYKVPSKKFKVLGNTDRHSIKKNLIGALLFDSGETAEATRLKRTARRRYTRRKNRICYLQEIFSNEMAKVDDSFFHRLEESFLVEEDKKHERHPIFGNIVDEVAYHEKYPTIYHLRKKLVDSTDKADLRLIYLALAHMIKFRGHFLIEGDLNPDNSDVDKLFIQLVQTYNQLFEENPINASGVDAKAILSARLSKSRRLENLIAQLPGEKKNGLFGNLIALSLGLTPNFKSNFDLAEDAKLQLSKDTYDDDLDNLLAQIGDQYADLFLAAKNLSDAILLSDILRVNTEITKAPLSASMIKRYDEHHQDLTLLKALVRQQLPEKYKEIFFDQSKNGYAGYIDGGASQEEFYKFIKPILEKMDGTEELLVKLNREDLLRKQRTFDNGSIPHQIHLGELHAILRRQEDFYPFLKDNREKIEKILTFRIPYYVGPLARGNSRFAWMTRKSEETITPWNFEEVVDKGASAQSFIERMTNFDKNLPNEKVLPKHSLLYEYFTVYNELTKVKYVTEGMRKPAFLSGEQKKAIVDLLFKTNRKVTVKQLKEDYFKKIECFDSVEISGVEDRFNASLGTYHDLLKIIKDKDFLDNEENEDILEDIVLTLTLFEDREMIEERLKTYAHLFDDKVMKQLKRRRYTGWGRLSRKLINGIRDKQSGKTILDFLKSDGFANRNFMQLIHDDSLTFKEDIQKAQVSGQGDSLHEHIANLAGSPAIKKGILQTVKVVDELVKVMGRHKPENIVIEMARENQTTQKGQKNSRERMKRIEEGIKELGSQILKEHPVENTQLQNEKLYLYYLQNGRDMYVDQELDINRLSDYDVDHIVPQSFLKDDSIDNKVLTRSDKARGKSDNVPSEEVVKKMKNYWRQLLNAKLITQRKFDNLTKAERGGLSELDKAGFIKRQLVETRQITKHVAQILDSRMNTKYDENDKLIREVKVITLKSKLVSDFRKDFQFYKVREINNYHHAHDAYLNAVVGTALIKKYPKLESEFVYGDYKVYDVRKMIAKSEQEIGKATAKYFFYSNIMNFFKTEITLANGEIRKRPLIETNGETGEIVWDKGRDFATVRKVLSMPQVNIVKKTEVQTGGFSKESILPKRNSDKLIARKKDWDPKKYGGFDSPTVAYSVLVVAKVEKGKSKKLKSVKELLGITIMERSSFEKNPIDFLEAKGYKEVKKDLIIKLPKYSLFELENGRKRMLASAGELQKGNELALPSKYVNFLYLASHYEKLKGSPEDNEQKQLFVEQHKHYLDEIIEQISEFSKRVILADANLDKVLSAYNKHRDKPIREQAENIIHLFTLTNLGAPAAFKYFDTTIDRKRYTSTKEVLDATLIHQSITGLYETRIDLSQLGGDGGGSSGGGGGLGIEDEYRLHETSTEPDVSLGSTWLSDFPQAWAETGGMGLAVRQAPLIIPLKATSTPVSIQQYPMSHEARLGIKPHIQRLLDQGILVPCQSPWNTPLLPVKKPGTNDYRPVQDLREVNKRVEDIHPTVPNPYNLLSGLPPSHQWYTVLDLKDAFFCLRLHPTSQPLFAFEWRDPGMGISGQLTWTRLPQGFKNSPTLFNEALHRDLADFRIQHPDLILLQYVDDILLAATSELDCQQGTRALLQTLGDLGYRASAKKAQICQKQVKYLGYLLREGQRWLTEARKETVMGQPVPKTPRQLREFLGKAGFCRLFIPGFAEMAAPLYPLTKPGTLFSWGPDQQKAYQEIKQALLTAPALGLPDLTKPFELFVDEKQGYAKGVLTQKLGPWRRPVAYLSKKLDPVAAGWPPCLRMVAAIAVLTKDAGKLTMGQPLVILAPHAVEALVKQPPDRWLSNARMTHYQAMLLDTDRVQFGPVVALNPATLLPLPEEGAPHDCLEILAETHGTRPDLTDQPIPDADHTWYTDGSSFLQEGQRKAGAAVTTETEVIWAGALPAGTSAQRAELIALTQALKMAEGKRLNVYTDSRYAFATAHIHGEIYRRRGWLTSEGREIKNKSEILALLKALFLPKRLSIIHCLGHQKGDSAEARGNRLADQAAREAAIKTPPDTSTLLIAGKRTADGSEFEKRTADGSEFESPKKKAKVE

SEQ ID NO: 2171 - protein, 2091 aa, synthetic construct
MPAAKRVKLDGGDKKYSIGLDIGTNSVGWAVITDEYKVPSKKFKVLGNTDRHSIKKNLIGALLFDSGETAEATRLKRTARRRYTRRKNRICYLQEIFSNEMAKVDDSFFHRLEESFLVEEDKKHERHPIFGNIVDEVAYHEKYPTIYHLRKKLVDSTDKADLRLIYLALAHMIKFRGHFLIEGDLNPDNSDVDKLFIQLVQTYNQLFEENPINASGVDAKAILSARLSKSRRLENLIAQLPGEKKNGLFGNLIALSLGLTPNFKSNFDLAEDAKLQLSKDTYDDDLDNLLAQIGDQYADLFLAAKNLSDAILLSDILRVNTEITKAPLSASMIKRYDEHHQDLTLLKALVRQQLPEKYKEIFFDQSKNGYAGYIDGGASQEEFYKFIKPILEKMDGTEELLVKLNREDLLRKQRTFDNGSIPHQIHLGELHAILRRQEDFYPFLKDNREKIEKILTFRIPYYVGPLARGNSRFAWMTRKSEETITPWNFEEVVDKGASAQSFIERMTNFDKNLPNEKVLPKHSLLYEYFTVYNELTKVKYVTEGMRKPAFLSGEQKKAIVDLLFKTNRKVTVKQLKEDYFKKIECFDSVEISGVEDRFNASLGTYHDLLKIIKDKDFLDNEENEDILEDIVLTLTLFEDREMIEERLKTYAHLFDDKVMKQLKRRRYTGWGRLSRKLINGIRDKQSGKTILDFLKSDGFANRNFMQLIHDDSLTFKEDIQKAQVSGQGDSLHEHIANLAGSPAIKKGILQTVKVVDELVKVMGRHKPENIVIEMARENQTTQKGQKNSRERMKRIEEGIKELGSQILKEHPVENTQLQNEKLYLYYLQNGRDMYVDQELDINRLSDYDVDHIVPQSFLKDDSIDNKVLTRSDKARGKSDNVPSEEVVKKMKNYWRQLLNAKLITQRKFDNLTKAERGGLSELDKAGFIKRQLVETRQITKHVAQILDSRMNTKYDENDKLIREVKVITLKSKLVSDFRKDFQFYKVREINNYHHAHDAYLNAVVGTALIKKYPKLESEFVYGDYKVYDVRKMIAKSEQEIGKATAKYFFYSNIMNFFKTEITLANGEIRKRPLIETNGETGEIVWDKGRDFATVRKVLSMPQVNIVKKTEVQTGGFSKESILPKRNSDKLIARKKDWDPKKYGGFDSPTVAYSVLVVAKVEKGKSKKLKSVKELLGITIMERSSFEKNPIDFLEAKGYKEVKKDLIIKLPKYSLFELENGRKRMLASAGELQKGNELALPSKYVNFLYLASHYEKLKGSPEDNEQKQLFVEQHKHYLDEIIEQISEFSKRVILADANLDKVLSAYNKHRDKPIREQAENIIHLFTLTNLGAPAAFKYFDTTIDRKRYTSTKEVLDATLIHQSITGLYETRIDLSQLGGDGGGSSGGSGGLGIEDEYRLHETSTEPDVSLGSTWLSDFPQAWAETGGMGLAVRQAPLIIPLKATSTPVSIQQYPMSHEARLGIKPHIQRLLDQGILVPCQSPWNTPLLPVKKPGTNDYRPVQDLREVNKRVEDIHPTVPNPYNLLSGLPPSHQWYTVLDLKDAFFCLRLHPTSQPLFAFEWRDPGMGISGQLTWTRLPQGFKNSPTLFNEALHRDLADFRIQHPDLILLQYVDDILLAATSELDCQQGTRALLQTLGDLGYRASAKKAQICQKQVKYLGYLLREGQRWLTEARKETVMGQPVPKTPRQLREFLGKAGFCRLFIPGFAEMAAPLYPLTKPGTLFSWGPDQQKAYQEIKQALLTAPALGLPDLTKPFELFVDEKQGYAKGVLTQKLGPWRRPVAYLSKKLDPVAAGWPPCLRMVAAIAVLTKDAGKLTMGQPLVILAPHAVEALVKQPPDRWLSNARMTHYQAMLLDTDRVQFGPVVALNPATLLPLPEEGAPHDCLEILAETHGTRPDLTDQPIPDADHTWYTDGSSFLQEGQRKAGAAVTTETEVIWAGALPAGTSAQRAELIALTQALKMAEGKRLNVYTDSRYAFATAHIHGEIYRRRGWLTSEGREIKNKSEILALLKALFLPKRLSIIHCLGHQKGDSAEARGNRLADQAAREAAIKTPPDTSTLLIAGKRTADGSEFEKRTADGSEFESPKKKAKVE

SEQ ID NO: 2172 - protein, 2094 aa, synthetic construct
MPAAKRVKLDGGDKKYSIGLDIGTNSVGWAVITDEYKVPSKKFKVLGNTDRHSIKKNLIGALLFDSGETAEATRLKRTARRRYTRRKNRICYLQEIFSNEMAKVDDSFFHRLEESFLVEEDKKHERHPIFGNIVDEVAYHEKYPTIYHLRKKLVDSTDKADLRLIYLALAHMIKFRGHFLIEGDLNPDNSDVDKLFIQLVQTYNQLFEENPINASGVDAKAILSARLSKSRRLENLIAQLPGEKKNGLFGNLIALSLGLTPNFKSNFDLAEDAKLQLSKDTYDDDLDNLLAQIGDQYADLFLAAKNLSDAILLSDILRVNTEITKAPLSASMIKRYDEHHQDLTLLKALVRQQLPEKYKEIFFDQSKNGYAGYIDGGASQEEFYKFIKPILEKMDGTEELLVKLNREDLLRKQRTFDNGSIPHQIHLGELHAILRRQEDFYPFLKDNREKIEKILTFRIPYYVGPLARGNSRFAWMTRKSEETITPWNFEEVVDKGASAQSFIERMTNFDKNLPNEKVLPKHSLLYEYFTVYNELTKVKYVTEGMRKPAFLSGEQKKAIVDLLFKTNRKVTVKQLKEDYFKKIECFDSVEISGVEDRFNASLGTYHDLLKIIKDKDFLDNEENEDILEDIVLTLTLFEDREMIEERLKTYAHLFDDKVMKQLKRRRYTGWGRLSRKLINGIRDKQSGKTILDFLKSDGFANRNFMQLIHDDSLTFKEDIQKAQVSGQGDSLHEHIANLAGSPAIKKGILQTVKVVDELVKVMGRHKPENIVIEMARENQTTQKGQKNSRERMKRIEEGIKELGSQILKEHPVENTQLQNEKLYLYYLQNGRDMYVDQELDINRLSDYDVDHIVPQSFLKDDSIDNKVLTRSDKARGKSDNVPSEEVVKKMKNYWRQLLNAKLITQRKFDNLTKAERGGLSELDKAGFIKRQLVETRQITKHVAQILDSRMNTKYDENDKLIREVKVITLKSKLVSDFRKDFQFYKVREINNYHHAHDAYLNAVVGTALIKKYPKLESEFVYGDYKVYDVRKMIAKSEQEIGKATAKYFFYSNIMNFFKTEITLANGEIRKRPLIETNGETGEIVWDKGRDFATVRKVLSMPQVNIVKKTEVQTGGFSKESILPKRNSDKLIARKKDWDPKKYGGFDSPTVAYSVLVVAKVEKGKSKKLKSVKELLGITIMERSSFEKNPIDFLEAKGYKEVKKDLIIKLPKYSLFELENGRKRMLASAGELQKGNELALPSKYVNFLYLASHYEKLKGSPEDNEQKQLFVEQHKHYLDEIIEQISEFSKRVILADANLDKVLSAYNKHRDKPIREQAENIIHLFTLTNLGAPAAFKYFDTTIDRKRYTSTKEVLDATLIHQSITGLYETRIDLSQLGGDGGGGSGGGGSSGGLGIEDEYRLHETSTEPDVSLGSTWLSDFPQAWAETGGMGLAVRQAPLIIPLKATSTPVSIQQYPMSHEARLGIKPHIQRLLDQGILVPCQSPWNTPLLPVKKPGTNDYRPVQDLREVNKRVEDIHPTVPNPYNLLSGLPPSHQWYTVLDLKDAFFCLRLHPTSQPLFAFEWRDPGMGISGQLTWTRLPQGFKNSPTLFNEALHRDLADFRIQHPDLILLQYVDDILLAATSELDCQQGTRALLQTLGDLGYRASAKKAQICQKQVKYLGYLLREGQRWLTEARKETVMGQPVPKTPRQLREFLGKAGFCRLFIPGFAEMAAPLYPLTKPGTLFSWGPDQQKAYQEIKQALLTAPALGLPDLTKPFELFVDEKQGYAKGVLTQKLGPWRRPVAYLSKKLDPVAAGWPPCLRMVAAIAVLTKDAGKLTMGQPLVILAPHAVEALVKQPPDRWLSNARMTHYQAMLLDTDRVQFGPVVALNPATLLPLPEEGAPHDCLEILAETHGTRPDLTDQPIPDADHTWYTDGSSFLQEGQRKAGAAVTTETEVIWAGALPAGTSAQRAELIALTQALKMAEGKRLNVYTDSRYAFATAHIHGEIYRRRGWLTSEGREIKNKSEILALLKALFLPKRLSIIHCLGHQKGDSAEARGNRLADQAAREAAIKTPPDTSTLLIAGKRTADGSEFEKRTADGSEFESPKKKAKVE

SEQ ID NO: 2173 - protein, 2096 aa, synthetic construct
MPAAKRVKLDGGDKKYSIGLDIGTNSVGWAVITDEYKVPSKKFKVLGNTDRHSIKKNLIGALLFDSGETAEATRLKRTARRRYTRRKNRICYLQEIFSNEMAKVDDSFFHRLEESFLVEEDKKHERHPIFGNIVDEVAYHEKYPTIYHLRKKLVDSTDKADLRLIYLALAHMIKFRGHFLIEGDLNPDNSDVDKLFIQLVQTYNQLFEENPINASGVDAKAILSARLSKSRRLENLIAQLPGEKKNGLFGNLIALSLGLTPNFKSNFDLAEDAKLQLSKDTYDDDLDNLLAQIGDQYADLFLAAKNLSDAILLSDILRVNTEITKAPLSASMIKRYDEHHQDLTLLKALVRQQLPEKYKEIFFDQSKNGYAGYIDGGASQEEFYKFIKPILEKMDGTEELLVKLNREDLLRKQRTFDNGSIPHQIHLGELHAILRRQEDFYPFLKDNREKIEKILTFRIPYYVGPLARGNSRFAWMTRKSEETITPWNFEEVVDKGASAQSFIERMTNFDKNLPNEKVLPKHSLLYEYFTVYNELTKVKYVTEGMRKPAFLSGEQKKAIVDLLFKTNRKVTVKQLKEDYFKKIECFDSVEISGVEDRFNASLGTYHDLLKIIKDKDFLDNEENEDILEDIVLTLTLFEDREMIEERLKTYAHLFDDKVMKQLKRRRYTGWGRLSRKLINGIRDKQSGKTILDFLKSDGFANRNFMQLIHDDSLTFKEDIQKAQVSGQGDSLHEHIANLAGSPAIKKGILQTVKVVDELVKVMGRHKPENIVIEMARENQTTQKGQKNSRERMKRIEEGIKELGSQILKEHPVENTQLQNEKLYLYYLQNGRDMYVDQELDINRLSDYDVDHIVPQSFLKDDSIDNKVLTRSDKARGKSDNVPSEEVVKKMKNYWRQLLNAKLITQRKFDNLTKAERGGLSELDKAGFIKRQLVETRQITKHVAQILDSRMNTKYDENDKLIREVKVITLKSKLVSDFRKDFQFYKVREINNYHHAHDAYLNAVVGTALIKKYPKLESEFVYGDYKVYDVRKMIAKSEQEIGKATAKYFFYSNIMNFFKTEITLANGEIRKRPLIETNGETGEIVWDKGRDFATVRKVLSMPQVNIVKKTEVQTGGFSKESILPKRNSDKLIARKKDWDPKKYGGFDSPTVAYSVLVVAKVEKGKSKKLKSVKELLGITIMERSSFEKNPIDFLEAKGYKEVKKDLIIKLPKYSLFELENGRKRMLASAGELQKGNELALPSKYVNFLYLASHYEKLKGSPEDNEQKQLFVEQHKHYLDEIIEQISEFSKRVILADANLDKVLSAYNKHRDKPIREQAENIIHLFTLTNLGAPAAFKYFDTTIDRKRYTSTKEVLDATLIHQSITGLYETRIDLSQLGGDGGEAAAKGGGGSSGGLGIEDEYRLHETSTEPDVSLGSTWLSDFPQAWAETGGMGLAVRQAPLIIPLKATSTPVSIQQYPMSHEARLGIKPHIQRLLDQGILVPCQSPWNTPLLPVKKPGTNDYRPVQDLREVNKRVEDIHPTVPNPYNLLSGLPPSHQWYTVLDLKDAFFCLRLHPTSQPLFAFEWRDPGMGISGQLTWTRLPQGFKNSPTLFNEALHRDLADFRIQHPDLILLQYVDDILLAATSELDCQQGTRALLQTLGDLGYRASAKKAQICQKQVKYLGYLLREGQRWLTEARKETVMGQPVPKTPRQLREFLGKAGFCRLFIPGFAEMAAPLYPLTKPGTLFSWGPDQQKAYQEIKQALLTAPALGLPDLTKPFELFVDEKQGYAKGVLTQKLGPWRRPVAYLSKKLDPVAAGWPPCLRMVAAIAVLTKDAGKLTMGQPLVILAPHAVEALVKQPPDRWLSNARMTHYQAMLLDTDRVQFGPVVALNPATLLPLPEEGAPHDCLEILAETHGTRPDLTDQPIPDADHTWYTDGSSFLQEGQRKAGAAVTTETEVIWAGALPAGTSAQRAELIALTQALKMAEGKRLNVYTDSRYAFATAHIHGEIYRRRGWLTSEGREIKNKSEILALLKALFLPKRLSIIHCLGHQKGDSAEARGNRLADQAAREAAIKTPPDTSTLLIAGKRTADGSEFEKRTADGSEFESPKKKAKVE

SEQ ID NO: 2174 - protein, 2096 aa, synthetic construct
MPAAKRVKLDGGDKKYSIGLDIGTNSVGWAVITDEYKVPSKKFKVLGNTDRHSIKKNLIGALLFDSGETAEATRLKRTARRRYTRRKNRICYLQEIFSNEMAKVDDSFFHRLEESFLVEEDKKHERHPIFGNIVDEVAYHEKYPTIYHLRKKLVDSTDKADLRLIYLALAHMIKFRGHFLIEGDLNPDNSDVDKLFIQLVQTYNQLFEENPINASGVDAKAILSARLSKSRRLENLIAQLPGEKKNGLFGNLIALSLGLTPNFKSNFDLAEDAKLQLSKDTYDDDLDNLLAQIGDQYADLFLAAKNLSDAILLSDILRVNTEITKAPLSASMIKRYDEHHQDLTLLKALVRQQLPEKYKEIFFDQSKNGYAGYIDGGASQEEFYKFIKPILEKMDGTEELLVKLNREDLLRKQRTFDNGSIPHQIHLGELHAILRRQEDFYPFLKDNREKIEKILTFRIPYYVGPLARGNSRFAWMTRKSEETITPWNFEEVVDKGASAQSFIERMTNFDKNLPNEKVLPKHSLLYEYFTVYNELTKVKYVTEGMRKPAFLSGEQKKAIVDLLFKTNRKVTVKQLKEDYFKKIECFDSVEISGVEDRFNASLGTYHDLLKIIKDKDFLDNEENEDILEDIVLTLTLFEDREMIEERLKTYAHLFDDKVMKQLKRRRYTGWGRLSRKLINGIRDKQSGKTILDFLKSDGFANRNFMQLIHDDSLTFKEDIQKAQVSGQGDSLHEHIANLAGSPAIKKGILQTVKVVDELVKVMGRHKPENIVIEMARENQTTQKGQKNSRERMKRIEEGIKELGSQILKEHPVENTQLQNEKLYLYYLQNGRDMYVDQELDINRLSDYDVDHIVPQSFLKDDSIDNKVLTRSDKARGKSDNVPSEEVVKKMKNYWRQLLNAKLITQRKFDNLTKAERGGLSELDKAGFIKRQLVETRQITKHVAQILDSRMNTKYDENDKLIREVKVITLKSKLVSDFRKDFQFYKVREINNYHHAHDAYLNAVVGTALIKKYPKLESEFVYGDYKVYDVRKMIAKSEQEIGKATAKYFFYSNIMNFFKTEITLANGEIRKRPLIETNGETGEIVWDKGRDFATVRKVLSMPQVNIVKKTEVQTGGFSKESILPKRNSDKLIARKKDWDPKKYGGFDSPTVAYSVLVVAKVEKGKSKKLKSVKELLGITIMERSSFEKNPIDFLEAKGYKEVKKDLIIKLPKYSLFELENGRKRMLASAGELQKGNELALPSKYVNFLYLASHYEKLKGSPEDNEQKQLFVEQHKHYLDEIIEQISEFSKRVILADANLDKVLSAYNKHRDKPIREQAENIIHLFTLTNLGAPAAFKYFDTTIDRKRYTSTKEVLDATLIHQSITGLYETRIDLSQLGGDGGGGGEAAAKGSSGGLGIEDEYRLHETSTEPDVSLGSTWLSDFPQAWAETGGMGLAVRQAPLIIPLKATSTPVSIQQYPMSHEARLGIKPHIQRLLDQGILVPCQSPWNTPLLPVKKPGTNDYRPVQDLREVNKRVEDIHPTVPNPYNLLSGLPPSHQWYTVLDLKDAFFCLRLHPTSQPLFAFEWRDPGMGISGQLTWTRLPQGFKNSPTLFNEALHRDLADFRIQHPDLILLQYVDDILLAATSELDCQQGTRALLQTLGDLGYRASAKKAQICQKQVKYLGYLLREGQRWLTEARKETVMGQPVPKTPRQLREFLGKAGFCRLFIPGFAEMAAPLYPLTKPGTLFSWGPDQQKAYQEIKQALLTAPALGLPDLTKPFELFVDEKQGYAKGVLTQKLGPWRRPVAYLSKKLDPVAAGWPPCLRMVAAIAVLTKDAGKLTMGQPLVILAPHAVEALVKQPPDRWLSNARMTHYQAMLLDTDRVQFGPVVALNPATLLPLPEEGAPHDCLEILAETHGTRPDLTDQPIPDADHTWYTDGSSFLQEGQRKAGAAVTTETEVIWAGALPAGTSAQRAELIALTQALKMAEGKRLNVYTDSRYAFATAHIHGEIYRRRGWLTSEGREIKNKSEILALLKALFLPKRLSIIHCLGHQKGDSAEARGNRLADQAAREAAIKTPPDTSTLLIAGKRTADGSEFEKRTADGSEFESPKKKAKVE

SEQ ID NO: 2175 - protein, 2096 aa, synthetic construct
MPAAKRVKLDGGDKKYSIGLDIGTNSVGWAVITDEYKVPSKKFKVLGNTDRHSIKKNLIGALLFDSGETAEATRLKRTARRRYTRRKNRICYLQEIFSNEMAKVDDSFFHRLEESFLVEEDKKHERHPIFGNIVDEVAYHEKYPTIYHLRKKLVDSTDKADLRLIYLALAHMIKFRGHFLIEGDLNPDNSDVDKLFIQLVQTYNQLFEENPINASGVDAKAILSARLSKSRRLENLIAQLPGEKKNGLFGNLIALSLGLTPNFKSNFDLAEDAKLQLSKDTYDDDLDNLLAQIGDQYADLFLAAKNLSDAILLSDILRVNTEITKAPLSASMIKRYDEHHQDLTLLKALVRQQLPEKYKEIFFDQSKNGYAGYIDGGASQEEFYKFIKPILEKMDGTEELLVKLNREDLLRKQRTFDNGSIPHQIHLGELHAILRRQEDFYPFLKDNREKIEKILTFRIPYYVGPLARGNSRFAWMTRKSEETITPWNFEEVVDKGASAQSFIERMTNFDKNLPNEKVLPKHSLLYEYFTVYNELTKVKYVTEGMRKPAFLSGEQKKAIVDLLFKTNRKVTVKQLKEDYFKKIECFDSVEISGVEDRFNASLGTYHDLLKIIKDKDFLDNEENEDILEDIVLTLTLFEDREMIEERLKTYAHLFDDKVMKQLKRRRYTGWGRLSRKLINGIRDKQSGKTILDFLKSDGFANRNFMQLIHDDSLTFKEDIQKAQVSGQGDSLHEHIANLAGSPAIKKGILQTVKVVDELVKVMGRHKPENIVIEMARENQTTQKGQKNSRERMKRIEEGIKELGSQILKEHPVENTQLQNEKLYLYYLQNGRDMYVDQELDINRLSDYDVDHIVPQSFLKDDSIDNKVLTRSDKARGKSDNVPSEEVVKKMKNYWRQLLNAKLITQRKFDNLTKAERGGLSELDKAGFIKRQLVETRQITKHVAQILDSRMNTKYDENDKLIREVKVITLKSKLVSDFRKDFQFYKVREINNYHHAHDAYLNAVVGTALIKKYPKLESEFVYGDYKVYDVRKMIAKSEQEIGKATAKYFFYSNIMNFFKTEITLANGEIRKRPLIETNGETGEIVWDKGRDFATVRKVLSMPQVNIVKKTEVQTGGFSKESILPKRNSDKLIARKKDWDPKKYGGFDSPTVAYSVLVVAKVEKGKSKKLKSVKELLGITIMERSSFEKNPIDFLEAKGYKEVKKDLIIKLPKYSLFELENGRKRMLASAGELQKGNELALPSKYVNFLYLASHYEKLKGSPEDNEQKQLFVEQHKHYLDEIIEQISEFSKRVILADANLDKVLSAYNKHRDKPIREQAENIIHLFTLTNLGAPAAFKYFDTTIDRKRYTSTKEVLDATLIHQSITGLYETRIDLSQLGGDGGGGSGGGEAAAKGGLGIEDEYRLHETSTEPDVSLGSTWLSDFPQAWAETGGMGLAVRQAPLIIPLKATSTPVSIQQYPMSHEARLGIKPHIQRLLDQGILVPCQSPWNTPLLPVKKPGTNDYRPVQDLREVNKRVEDIHPTVPNPYNLLSGLPPSHQWYTVLDLKDAFFCLRLHPTSQPLFAFEWRDPGMGISGQLTWTRLPQGFKNSPTLFNEALHRDLADFRIQHPDLILLQYVDDILLAATSELDCQQGTRALLQTLGDLGYRASAKKAQICQKQVKYLGYLLREGQRWLTEARKETVMGQPVPKTPRQLREFLGKAGFCRLFIPGFAEMAAPLYPLTKPGTLFSWGPDQQKAYQEIKQALLTAPALGLPDLTKPFELFVDEKQGYAKGVLTQKLGPWRRPVAYLSKKLDPVAAGWPPCLRMVAAIAVLTKDAGKLTMGQPLVILAPHAVEALVKQPPDRWLSNARMTHYQAMLLDTDRVQFGPVVALNPATLLPLPEEGAPHDCLEILAETHGTRPDLTDQPIPDADHTWYTDGSSFLQEGQRKAGAAVTTETEVIWAGALPAGTSAQRAELIALTQALKMAEGKRLNVYTDSRYAFATAHIHGEIYRRRGWLTSEGREIKNKSEILALLKALFLPKRLSIIHCLGHQKGDSAEARGNRLADQAAREAAIKTPPDTSTLLIAGKRTADGSEFEKRTADGSEFESPKKKAKVE

SEQ ID NO: 2176 - protein, 2091 aa, synthetic construct
MPAAKRVKLDGGDKKYSIGLDIGTNSVGWAVITDEYKVPSKKFKVLGNTDRHSIKKNLIGALLFDSGETAEATRLKRTARRRYTRRKNRICYLQEIFSNEMAKVDDSFFHRLEESFLVEEDKKHERHPIFGNIVDEVAYHEKYPTIYHLRKKLVDSTDKADLRLIYLALAHMIKFRGHFLIEGDLNPDNSDVDKLFIQLVQTYNQLFEENPINASGVDAKAILSARLSKSRRLENLIAQLPGEKKNGLFGNLIALSLGLTPNFKSNFDLAEDAKLQLSKDTYDDDLDNLLAQIGDQYADLFLAAKNLSDAILLSDILRVNTEITKAPLSASMIKRYDEHHQDLTLLKALVRQQLPEKYKEIFFDQSKNGYAGYIDGGASQEEFYKFIKPILEKMDGTEELLVKLNREDLLRKQRTFDNGSIPHQIHLGELHAILRRQEDFYPFLKDNREKIEKILTFRIPYYVGPLARGNSRFAWMTRKSEETITPWNFEEVVDKGASAQSFIERMTNFDKNLPNEKVLPKHSLLYEYFTVYNELTKVKYVTEGMRKPAFLSGEQKKAIVDLLFKTNRKVTVKQLKEDYFKKIECFDSVEISGVEDRFNASLGTYHDLLKIIKDKDFLDNEENEDILEDIVLTLTLFEDREMIEERLKTYAHLFDDKVMKQLKRRRYTGWGRLSRKLINGIRDKQSGKTILDFLKSDGFANRNFMQLIHDDSLTFKEDIQKAQVSGQGDSLHEHIANLAGSPAIKKGILQTVKVVDELVKVMGRHKPENIVIEMARENQTTQKGQKNSRERMKRIEEGIKELGSQILKEHPVENTQLQNEKLYLYYLQNGRDMYVDQELDINRLSDYDVDHIVPQSFLKDDSIDNKVLTRSDKARGKSDNVPSEEVVKKMKNYWRQLLNAKLITQRKFDNLTKAERGGLSELDKAGFIKRQLVETRQITKHVAQILDSRMNTKYDENDKLIREVKVITLKSKLVSDFRKDFQFYKVREINNYHHAHDAYLNAVVGTALIKKYPKLESEFVYGDYKVYDVRKMIAKSEQEIGKATAKYFFYSNIMNFFKTEITLANGEIRKRPLIETNGETGEIVWDKGRDFATVRKVLSMPQVNIVKKTEVQTGGFSKESILPKRNSDKLIARKKDWDPKKYGGFDSPTVAYSVLVVAKVEKGKSKKLKSVKELLGITIMERSSFEKNPIDFLEAKGYKEVKKDLIIKLPKYSLFELENGRKRMLASAGELQKGNELALPSKYVNFLYLASHYEKLKGSPEDNEQKQLFVEQHKHYLDEIIEQISEFSKRVILADANLDKVLSAYNKHRDKPIREQAENIIHLFTLTNLGAPAAFKYFDTTIDRKRYTSTKEVLDATLIHQSITGLYETRIDLSQLGGDGGGSSGSSGGLGIEDEYRLHETSTEPDVSLGSTWLSDFPQAWAETGGMGLAVRQAPLIIPLKATSTPVSIQQYPMSHEARLGIKPHIQRLLDQGILVPCQSPWNTPLLPVKKPGTNDYRPVQDLREVNKRVEDIHPTVPNPYNLLSGLPPSHQWYTVLDLKDAFFCLRLHPTSQPLFAFEWRDPGMGISGQLTWTRLPQGFKNSPTLFNEALHRDLADFRIQHPDLILLQYVDDILLAATSELDCQQGTRALLQTLGDLGYRASAKKAQICQKQVKYLGYLLREGQRWLTEARKETVMGQPVPKTPRQLREFLGKAGFCRLFIPGFAEMAAPLYPLTKPGTLFSWGPDQQKAYQEIKQALLTAPALGLPDLTKPFELFVDEKQGYAKGVLTQKLGPWRRPVAYLSKKLDPVAAGWPPCLRMVAAIAVLTKDAGKLTMGQPLVILAPHAVEALVKQPPDRWLSNARMTHYQAMLLDTDRVQFGPVVALNPATLLPLPEEGAPHDCLEILAETHGTRPDLTDQPIPDADHTWYTDGSSFLQEGQRKAGAAVTTETEVIWAGALPAGTSAQRAELIALTQALKMAEGKRLNVYTDSRYAFATAHIHGEIYRRRGWLTSEGREIKNKSEILALLKALFLPKRLSIIHCLGHQKGDSAEARGNRLADQAAREAAIKTPPDTSTLLIAGKRTADGSEFEKRTADGSEFESPKKKAKVE

SEQ ID NO: 2177 - protein, 2096 aa, synthetic construct
MPAAKRVKLDGGDKKYSIGLDIGTNSVGWAVITDEYKVPSKKFKVLGNTDRHSIKKNLIGALLFDSGETAEATRLKRTARRRYTRRKNRICYLQEIFSNEMAKVDDSFFHRLEESFLVEEDKKHERHPIFGNIVDEVAYHEKYPTIYHLRKKLVDSTDKADLRLIYLALAHMIKFRGHFLIEGDLNPDNSDVDKLFIQLVQTYNQLFEENPINASGVDAKAILSARLSKSRRLENLIAQLPGEKKNGLFGNLIALSLGLTPNFKSNFDLAEDAKLQLSKDTYDDDLDNLLAQIGDQYADLFLAAKNLSDAILLSDILRVNTEITKAPLSASMIKRYDEHHQDLTLLKALVRQQLPEKYKEIFFDQSKNGYAGYIDGGASQEEFYKFIKPILEKMDGTEELLVKLNREDLLRKQRTFDNGSIPHQIHLGELHAILRRQEDFYPFLKDNREKIEKILTFRIPYYVGPLARGNSRFAWMTRKSEETITPWNFEEVVDKGASAQSFIERMTNFDKNLPNEKVLPKHSLLYEYFTVYNELTKVKYVTEGMRKPAFLSGEQKKAIVDLLFKTNRKVTVKQLKEDYFKKIECFDSVEISGVEDRFNASLGTYHDLLKIIKDKDFLDNEENEDILEDIVLTLTLFEDREMIEERLKTYAHLFDDKVMKQLKRRRYTGWGRLSRKLINGIRDKQSGKTILDFLKSDGFANRNFMQLIHDDSLTFKEDIQKAQVSGQGDSLHEHIANLAGSPAIKKGILQTVKVVDELVKVMGRHKPENIVIEMARENQTTQKGQKNSRERMKRIEEGIKELGSQILKEHPVENTQLQNEKLYLYYLQNGRDMYVDQELDINRLSDYDVDHIVPQSFLKDDSIDNKVLTRSDKARGKSDNVPSEEVVKKMKNYWRQLLNAKLITQRKFDNLTKAERGGLSELDKAGFIKRQLVETRQITKHVAQILDSRMNTKYDENDKLIREVKVITLKSKLVSDFRKDFQFYKVREINNYHHAHDAYLNAVVGTALIKKYPKLESEFVYGDYKVYDVRKMIAKSEQEIGKATAKYFFYSNIMNFFKTEITLANGEIRKRPLIETNGETGEIVWDKGRDFATVRKVLSMPQVNIVKKTEVQTGGFSKESILPKRNSDKLIARKKDWDPKKYGGFDSPTVAYSVLVVAKVEKGKSKKLKSVKELLGITIMERSSFEKNPIDFLEAKGYKEVKKDLIIKLPKYSLFELENGRKRMLASAGELQKGNELALPSKYVNFLYLASHYEKLKGSPEDNEQKQLFVEQHKHYLDEIIEQISEFSKRVILADANLDKVLSAYNKHRDKPIREQAENIIHLFTLTNLGAPAAFKYFDTTIDRKRYTSTKEVLDATLIHQSITGLYETRIDLSQLGGDGGGSSEAAAKGGSGGLGIEDEYRLHETSTEPDVSLGSTWLSDFPQAWAETGGMGLAVRQAPLIIPLKATSTPVSIQQYPMSHEARLGIKPHIQRLLDQGILVPCQSPWNTPLLPVKKPGTNDYRPVQDLREVNKRVEDIHPTVPNPYNLLSGLPPSHQWYTVLDLKDAFFCLRLHPTSQPLFAFEWRDPGMGISGQLTWTRLPQGFKNSPTLFNEALHRDLADFRIQHPDLILLQYVDDILLAATSELDCQQGTRALLQTLGDLGYRASAKKAQICQKQVKYLGYLLREGQRWLTEARKETVMGQPVPKTPRQLREFLGKAGFCRLFIPGFAEMAAPLYPLTKPGTLFSWGPDQQKAYQEIKQALLTAPALGLPDLTKPFELFVDEKQGYAKGVLTQKLGPWRRPVAYLSKKLDPVAAGWPPCLRMVAAIAVLTKDAGKLTMGQPLVILAPHAVEALVKQPPDRWLSNARMTHYQAMLLDTDRVQFGPVVALNPATLLPLPEEGAPHDCLEILAETHGTRPDLTDQPIPDADHTWYTDGSSFLQEGQRKAGAAVTTETEVIWAGALPAGTSAQRAELIALTQALKMAEGKRLNVYTDSRYAFATAHIHGEIYRRRGWLTSEGREIKNKSEILALLKALFLPKRLSIIHCLGHQKGDSAEARGNRLADQAAREAAIKTPPDTSTLLIAGKRTADGSEFEKRTADGSEFESPKKKAKVE

SEQ ID NO: 2178 - protein, 2096 aa, synthetic construct
MPAAKRVKLDGGDKKYSIGLDIGTNSVGWAVITDEYKVPSKKFKVLGNTDRHSIKKNLIGALLFDSGETAEATRLKRTARRRYTRRKNRICYLQEIFSNEMAKVDDSFFHRLEESFLVEEDKKHERHPIFGNIVDEVAYHEKYPTIYHLRKKLVDSTDKADLRLIYLALAHMIKFRGHFLIEGDLNPDNSDVDKLFIQLVQTYNQLFEENPINASGVDAKAILSARLSKSRRLENLIAQLPGEKKNGLFGNLIALSLGLTPNFKSNFDLAEDAKLQLSKDTYDDDLDNLLAQIGDQYADLFLAAKNLSDAILLSDILRVNTEITKAPLSASMIKRYDEHHQDLTLLKALVRQQLPEKYKEIFFDQSKNGYAGYIDGGASQEEFYKFIKPILEKMDGTEELLVKLNREDLLRKQRTFDNGSIPHQIHLGELHAILRRQEDFYPFLKDNREKIEKILTFRIPYYVGPLARGNSRFAWMTRKSEETITPWNFEEVVDKGASAQSFIERMTNFDKNLPNEKVLPKHSLLYEYFTVYNELTKVKYVTEGMRKPAFLSGEQKKAIVDLLFKTNRKVTVKQLKEDYFKKIECFDSVEISGVEDRFNASLGTYHDLLKIIKDKDFLDNEENEDILEDIVLTLTLFEDREMIEERLKTYAHLFDDKVMKQLKRRRYTGWGRLSRKLINGIRDKQSGKTILDFLKSDGFANRNFMQLIHDDSLTFKEDIQKAQVSGQGDSLHEHIANLAGSPAIKKGILQTVKVVDELVKVMGRHKPENIVIEMARENQTTQKGQKNSRERMKRIEEGIKELGSQILKEHPVENTQLQNEKLYLYYLQNGRDMYVDQELDINRLSDYDVDHIVPQSFLKDDSIDNKVLTRSDKARGKSDNVPSEEVVKKMKNYWRQLLNAKLITQRKFDNLTKAERGGLSELDKAGFIKRQLVETRQITKHVAQILDSRMNTKYDENDKLIREVKVITLKSKLVSDFRKDFQFYKVREINNYHHAHDAYLNAVVGTALIKKYPKLESEFVYGDYKVYDVRKMIAKSEQEIGKATAKYFFYSNIMNFFKTEITLANGEIRKRPLIETNGETGEIVWDKGRDFATVRKVLSMPQVNIVKKTEVQTGGFSKESILPKRNSDKLIARKKDWDPKKYGGFDSPTVAYSVLVVAKVEKGKSKKLKSVKELLGITIMERSSFEKNPIDFLEAKGYKEVKKDLIIKLPKYSLFELENGRKRMLASAGELQKGNELALPSKYVNFLYLASHYEKLKGSPEDNEQKQLFVEQHKHYLDEIIEQISEFSKRVILADANLDKVLSAYNKHRDKPIREQAENIIHLFTLTNLGAPAAFKYFDTTIDRKRYTSTKEVLDATLIHQSITGLYETRIDLSQLGGDGGPAPGGGEAAAKGGLGIEDEYRLHETSTEPDVSLGSTWLSDFPQAWAETGGMGLAVRQAPLIIPLKATSTPVSIQQYPMSHEARLGIKPHIQRLLDQGILVPCQSPWNTPLLPVKKPGTNDYRPVQDLREVNKRVEDIHPTVPNPYNLLSGLPPSHQWYTVLDLKDAFFCLRLHPTSQPLFAFEWRDPGMGISGQLTWTRLPQGFKNSPTLFNEALHRDLADFRIQHPDLILLQYVDDILLAATSELDCQQGTRALLQTLGDLGYRASAKKAQICQKQVKYLGYLLREGQRWLTEARKETVMGQPVPKTPRQLREFLGKAGFCRLFIPGFAEMAAPLYPLTKPGTLFSWGPDQQKAYQEIKQALLTAPALGLPDLTKPFELFVDEKQGYAKGVLTQKLGPWRRPVAYLSKKLDPVAAGWPPCLRMVAAIAVLTKDAGKLTMGQPLVILAPHAVEALVKQPPDRWLSNARMTHYQAMLLDTDRVQFGPVVALNPATLLPLPEEGAPHDCLEILAETHGTRPDLTDQPIPDADHTWYTDGSSFLQEGQRKAGAAVTTETEVIWAGALPAGTSAQRAELIALTQALKMAEGKRLNVYTDSRYAFATAHIHGEIYRRRGWLTSEGREIKNKSEILALLKALFLPKRLSIIHCLGHQKGDSAEARGNRLADQAAREAAIKTPPDTSTLLIAGKRTADGSEFEKRTADGSEFESPKKKAKVE

SEQ ID NO: 2179 - protein, 2091 aa, synthetic construct
MPAAKRVKLDGGDKKYSIGLDIGTNSVGWAVITDEYKVPSKKFKVLGNTDRHSIKKNLIGALLFDSGETAEATRLKRTARRRYTRRKNRICYLQEIFSNEMAKVDDSFFHRLEESFLVEEDKKHERHPIFGNIVDEVAYHEKYPTIYHLRKKLVDSTDKADLRLIYLALAHMIKFRGHFLIEGDLNPDNSDVDKLFIQLVQTYNQLFEENPINASGVDAKAILSARLSKSRRLENLIAQLPGEKKNGLFGNLIALSLGLTPNFKSNFDLAEDAKLQLSKDTYDDDLDNLLAQIGDQYADLFLAAKNLSDAILLSDILRVNTEITKAPLSASMIKRYDEHHQDLTLLKALVRQQLPEKYKEIFFDQSKNGYAGYIDGGASQEEFYKFIKPILEKMDGTEELLVKLNREDLLRKQRTFDNGSIPHQIHLGELHAILRRQEDFYPFLKDNREKIEKILTFRIPYYVGPLARGNSRFAWMTRKSEETITPWNFEEVVDKGASAQSFIERMTNFDKNLPNEKVLPKHSLLYEYFTVYNELTKVKYVTEGMRKPAFLSGEQKKAIVDLLFKTNRKVTVKQLKEDYFKKIECFDSVEISGVEDRFNASLGTYHDLLKIIKDKDFLDNEENEDILEDIVLTLTLFEDREMIEERLKTYAHLFDDKVMKQLKRRRYTGWGRLSRKLINGIRDKQSGKTILDFLKSDGFANRNFMQLIHDDSLTFKEDIQKAQVSGQGDSLHEHIANLAGSPAIKKGILQTVKVVDELVKVMGRHKPENIVIEMARENQTTQKGQKNSRERMKRIEEGIKELGSQILKEHPVENTQLQNEKLYLYYLQNGRDMYVDQELDINRLSDYDVDHIVPQSFLKDDSIDNKVLTRSDKARGKSDNVPSEEVVKKMKNYWRQLLNAKLITQRKFDNLTKAERGGLSELDKAGFIKRQLVETRQITKHVAQILDSRMNTKYDENDKLIREVKVITLKSKLVSDFRKDFQFYKVREINNYHHAHDAYLNAVVGTALIKKYPKLESEFVYGDYKVYDVRKMIAKSEQEIGKATAKYFFYSNIMNFFKTEITLANGEIRKRPLIETNGETGEIVWDKGRDFATVRKVLSMPQVNIVKKTEVQTGGFSKESILPKRNSDKLIARKKDWDPKKYGGFDSPTVAYSVLVVAKVEKGKSKKLKSVKELLGITIMERSSFEKNPIDFLEAKGYKEVKKDLIIKLPKYSLFELENGRKRMLASAGELQKGNELALPSKYVNFLYLASHYEKLKGSPEDNEQKQLFVEQHKHYLDEIIEQISEFSKRVILADANLDKVLSAYNKHRDKPIREQAENIIHLFTLTNLGAPAAFKYFDTTIDRKRYTSTKEVLDATLIHQSITGLYETRIDLSQLGGDGGGGGGSSGGLGIEDEYRLHETSTEPDVSLGSTWLSDFPQAWAETGGMGLAVRQAPLIIPLKATSTPVSIQQYPMSHEARLGIKPHIQRLLDQGILVPCQSPWNTPLLPVKKPGTNDYRPVQDLREVNKRVEDIHPTVPNPYNLLSGLPPSHQWYTVLDLKDAFFCLRLHPTSQPLFAFEWRDPGMGISGQLTWTRLPQGFKNSPTLFNEALHRDLADFRIQHPDLILLQYVDDILLAATSELDCQQGTRALLQTLGDLGYRASAKKAQICQKQVKYLGYLLREGQRWLTEARKETVMGQPVPKTPRQLREFLGKAGFCRLFIPGFAEMAAPLYPLTKPGTLFSWGPDQQKAYQEIKQALLTAPALGLPDLTKPFELFVDEKQGYAKGVLTQKLGPWRRPVAYLSKKLDPVAAGWPPCLRMVAAIAVLTKDAGKLTMGQPLVILAPHAVEALVKQPPDRWLSNARMTHYQAMLLDTDRVQFGPVVALNPATLLPLPEEGAPHDCLEILAETHGTRPDLTDQPIPDADHTWYTDGSSFLQEGQRKAGAAVTTETEVIWAGALPAGTSAQRAELIALTQALKMAEGKRLNVYTDSRYAFATAHIHGEIYRRRGWLTSEGREIKNKSEILALLKALFLPKRLSIIHCLGHQKGDSAEARGNRLADQAAREAAIKTPPDTSTLLIAGKRTADGSEFEKRTADGSEFESPKKKAKVE

SEQ ID NO: 2180 - protein, 2094 aa, synthetic construct
MPAAKRVKLDGGDKKYSIGLDIGTNSVGWAVITDEYKVPSKKFKVLGNTDRHSIKKNLIGALLFDSGETAEATRLKRTARRRYTRRKNRICYLQEIFSNEMAKVDDSFFHRLEESFLVEEDKKHERHPIFGNIVDEVAYHEKYPTIYHLRKKLVDSTDKADLRLIYLALAHMIKFRGHFLIEGDLNPDNSDVDKLFIQLVQTYNQLFEENPINASGVDAKAILSARLSKSRRLENLIAQLPGEKKNGLFGNLIALSLGLTPNFKSNFDLAEDAKLQLSKDTYDDDLDNLLAQIGDQYADLFLAAKNLSDAILLSDILRVNTEITKAPLSASMIKRYDEHHQDLTLLKALVRQQLPEKYKEIFFDQSKNGYAGYIDGGASQEEFYKFIKPILEKMDGTEELLVKLNREDLLRKQRTFDNGSIPHQIHLGELHAILRRQEDFYPFLKDNREKIEKILTFRIPYYVGPLARGNSRFAWMTRKSEETITPWNFEEVVDKGASAQSFIERMTNFDKNLPNEKVLPKHSLLYEYFTVYNELTKVKYVTEGMRKPAFLSGEQKKAIVDLLFKTNRKVTVKQLKEDYFKKIECFDSVEISGVEDRFNASLGTYHDLLKIIKDKDFLDNEENEDILEDIVLTLTLFEDREMIEERLKTYAHLFDDKVMKQLKRRRYTGWGRLSRKLINGIRDKQSGKTILDFLKSDGFANRNFMQLIHDDSLTFKEDIQKAQVSGQGDSLHEHIANLAGSPAIKKGILQTVKVVDELVKVMGRHKPENIVIEMARENQTTQKGQKNSRERMKRIEEGIKELGSQILKEHPVENTQLQNEKLYLYYLQNGRDMYVDQELDINRLSDYDVDHIVPQSFLKDDSIDNKVLTRSDKARGKSDNVPSEEVVKKMKNYWRQLLNAKLITQRKFDNLTKAERGGLSELDKAGFIKRQLVETRQITKHVAQILDSRMNTKYDENDKLIREVKVITLKSKLVSDFRKDFQFYKVREINNYHHAHDAYLNAVVGTALIKKYPKLESEFVYGDYKVYDVRKMIAKSEQEIGKATAKYFFYSNIMNFFKTEITLANGEIRKRPLIETNGETGEIVWDKGRDFATVRKVLSMPQVNIVKKTEVQTGGFSKESILPKRNSDKLIARKKDWDPKKYGGFDSPTVAYSVLVVAKVEKGKSKKLKSVKELLGITIMERSSFEKNPIDFLEAKGYKEVKKDLIIKLPKYSLFELENGRKRMLASAGELQKGNELALPSKYVNFLYLASHYEKLKGSPEDNEQKQLFVEQHKHYLDEIIEQISEFSKRVILADANLDKVLSAYNKHRDKPIREQAENIIHLFTLTNLGAPAAFKYFDTTIDRKRYTSTKEVLDATLIHQSITGLYETRIDLSQLGGDGGGGGPAPGSSGGLGIEDEYRLHETSTEPDVSLGSTWLSDFPQAWAETGGMGLAVRQAPLIIPLKATSTPVSIQQYPMSHEARLGIKPHIQRLLDQGILVPCQSPWNTPLLPVKKPGTNDYRPVQDLREVNKRVEDIHPTVPNPYNLLSGLPPSHQWYTVLDLKDAFFCLRLHPTSQPLFAFEWRDPGMGISGQLTWTRLPQGFKNSPTLFNEALHRDLADFRIQHPDLILLQYVDDILLAATSELDCQQGTRALLQTLGDLGYRASAKKAQICQKQVKYLGYLLREGQRWLTEARKETVMGQPVPKTPRQLREFLGKAGFCRLFIPGFAEMAAPLYPLTKPGTLFSWGPDQQKAYQEIKQALLTAPALGLPDLTKPFELFVDEKQGYAKGVLTQKLGPWRRPVAYLSKKLDPVAAGWPPCLRMVAAIAVLTKDAGKLTMGQPLVILAPHAVEALVKQPPDRWLSNARMTHYQAMLLDTDRVQFGPVVALNPATLLPLPEEGAPHDCLEILAETHGTRPDLTDQPIPDADHTWYTDGSSFLQEGQRKAGAAVTTETEVIWAGALPAGTSAQRAELIALTQALKMAEGKRLNVYTDSRYAFATAHIHGEIYRRRGWLTSEGREIKNKSEILALLKALFLPKRLSIIHCLGHQKGDSAEARGNRLADQAAREAAIKTPPDTSTLLIAGKRTADGSEFEKRTADGSEFESPKKKAKVE

SEQ ID NO: 2181 - protein, 2118 aa, synthetic construct
MPAAKRVKLDGGDKKYSIGLDIGTNSVGWAVITDEYKVPSKKFKVLGNTDRHSIKKNLIGALLFDSGETAEATRLKRTARRRYTRRKNRICYLQEIFSNEMAKVDDSFFHRLEESFLVEEDKKHERHPIFGNIVDEVAYHEKYPTIYHLRKKLVDSTDKADLRLIYLALAHMIKFRGHFLIEGDLNPDNSDVDKLFIQLVQTYNQLFEENPINASGVDAKAILSARLSKSRRLENLIAQLPGEKKNGLFGNLIALSLGLTPNFKSNFDLAEDAKLQLSKDTYDDDLDNLLAQIGDQYADLFLAAKNLSDAILLSDILRVNTEITKAPLSASMIKRYDEHHQDLTLLKALVRQQLPEKYKEIFFDQSKNGYAGYIDGGASQEEFYKFIKPILEKMDGTEELLVKLNREDLLRKQRTFDNGSIPHQIHLGELHAILRRQEDFYPFLKDNREKIEKILTFRIPYYVGPLARGNSRFAWMTRKSEETITPWNFEEVVDKGASAQSFIERMTNFDKNLPNEKVLPKHSLLYEYFTVYNELTKVKYVTEGMRKPAFLSGEQKKAIVDLLFKTNRKVTVKQLKEDYFKKIECFDSVEISGVEDRFNASLGTYHDLLKIIKDKDFLDNEENEDILEDIVLTLTLFEDREMIEERLKTYAHLFDDKVMKQLKRRRYTGWGRLSRKLINGIRDKQSGKTILDFLKSDGFANRNFMQLIHDDSLTFKEDIQKAQVSGQGDSLHEHIANLAGSPAIKKGILQTVKVVDELVKVMGRHKPENIVIEMARENQTTQKGQKNSRERMKRIEEGIKELGSQILKEHPVENTQLQNEKLYLYYLQNGRDMYVDQELDINRLSDYDVDHIVPQSFLKDDSIDNKVLTRSDKARGKSDNVPSEEVVKKMKNYWRQLLNAKLITQRKFDNLTKAERGGLSELDKAGFIKRQLVETRQITKHVAQILDSRMNTKYDENDKLIREVKVITLKSKLVSDFRKDFQFYKVREINNYHHAHDAYLNAVVGTALIKKYPKLESEFVYGDYKVYDVRKMIAKSEQEIGKATAKYFFYSNIMNFFKTEITLANGEIRKRPLIETNGETGEIVWDKGRDFATVRKVLSMPQVNIVKKTEVQTGGFSKESILPKRNSDKLIARKKDWDPKKYGGFDSPTVAYSVLVVAKVEKGKSKKLKSVKELLGITIMERSSFEKNPIDFLEAKGYKEVKKDLIIKLPKYSLFELENGRKRMLASAGELQKGNELALPSKYVNFLYLASHYEKLKGSPEDNEQKQLFVEQHKHYLDEIIEQISEFSKRVILADANLDKVLSAYNKHRDKPIREQAENIIHLFTLTNLGAPAAFKYFDTTIDRKRYTSTKEVLDATLIHQSITGLYETRIDLSQLGGDGGSGGSSGGSSGSETPGTSESATPESSGGSSGGSSGGLGIEDEYRLHETSTEPDVSLGSTWLSDFPQAWAETGGMGLAVRQAPLIIPLKATSTPVSIQQYPMSHEARLGIKPHIQRLLDQGILVPCQSPWNTPLLPVKKPGTNDYRPVQDLREVNKRVEDIHPTVPNPYNLLSGLPPSHQWYTVLDLKDAFFCLRLHPTSQPLFAFEWRDPGMGISGQLTWTRLPQGFKNSPTLFNEALHRDLADFRIQHPDLILLQYVDDILLAATSELDCQQGTRALLQTLGDLGYRASAKKAQICQKQVKYLGYLLREGQRWLTEARKETVMGQPVPKTPRQLREFLGKAGFCRLFIPGFAEMAAPLYPLTKPGTLFSWGPDQQKAYQEIKQALLTAPALGLPDLTKPFELFVDEKQGYAKGVLTQKLGPWRRPVAYLSKKLDPVAAGWPPCLRMVAAIAVLTKDAGKLTMGQPLVILAPHAVEALVKQPPDRWLSNARMTHYQAMLLDTDRVQFGPVVALNPATLLPLPEEGAPHDCLEILAETHGTRPDLTDQPIPDADHTWYTDGSSFLQEGQRKAGAAVTTETEVIWAGALPAGTSAQRAELIALTQALKMAEGKRLNVYTDSRYAFATAHIHGEIYRRRGWLTSEGREIKNKSEILALLKALFLPKRLSIIHCLGHQKGDSAEARGNRLADQAAREAAIKTPPDTSTLLIAGKRTADGSEFEKRTADGSEFESPKKKAKVE

SEQ ID NO: 2182 - protein, 2096 aa, synthetic construct
MPAAKRVKLDGGDKKYSIGLDIGTNSVGWAVITDEYKVPSKKFKVLGNTDRHSIKKNLIGALLFDSGETAEATRLKRTARRRYTRRKNRICYLQEIFSNEMAKVDDSFFHRLEESFLVEEDKKHERHPIFGNIVDEVAYHEKYPTIYHLRKKLVDSTDKADLRLIYLALAHMIKFRGHFLIEGDLNPDNSDVDKLFIQLVQTYNQLFEENPINASGVDAKAILSARLSKSRRLENLIAQLPGEKKNGLFGNLIALSLGLTPNFKSNFDLAEDAKLQLSKDTYDDDLDNLLAQIGDQYADLFLAAKNLSDAILLSDILRVNTEITKAPLSASMIKRYDEHHQDLTLLKALVRQQLPEKYKEIFFDQSKNGYAGYIDGGASQEEFYKFIKPILEKMDGTEELLVKLNREDLLRKQRTFDNGSIPHQIHLGELHAILRRQEDFYPFLKDNREKIEKILTFRIPYYVGPLARGNSRFAWMTRKSEETITPWNFEEVVDKGASAQSFIERMTNFDKNLPNEKVLPKHSLLYEYFTVYNELTKVKYVTEGMRKPAFLSGEQKKAIVDLLFKTNRKVTVKQLKEDYFKKIECFDSVEISGVEDRFNASLGTYHDLLKIIKDKDFLDNEENEDILEDIVLTLTLFEDREMIEERLKTYAHLFDDKVMKQLKRRRYTGWGRLSRKLINGIRDKQSGKTILDFLKSDGFANRNFMQLIHDDSLTFKEDIQKAQVSGQGDSLHEHIANLAGSPAIKKGILQTVKVVDELVKVMGRHKPENIVIEMARENQTTQKGQKNSRERMKRIEEGIKELGSQILKEHPVENTQLQNEKLYLYYLQNGRDMYVDQELDINRLSDYDVDHIVPQSFLKDDSIDNKVLTRSDKARGKSDNVPSEEVVKKMKNYWRQLLNAKLITQRKFDNLTKAERGGLSELDKAGFIKRQLVETRQITKHVAQILDSRMNTKYDENDKLIREVKVITLKSKLVSDFRKDFQFYKVREINNYHHAHDAYLNAVVGTALIKKYPKLESEFVYGDYKVYDVRKMIAKSEQEIGKATAKYFFYSNIMNFFKTEITLANGEIRKRPLIETNGETGEIVWDKGRDFATVRKVLSMPQVNIVKKTEVQTGGFSKESILPKRNSDKLIARKKDWDPKKYGGFDSPTVAYSVLVVAKVEKGKSKKLKSVKELLGITIMERSSFEKNPIDFLEAKGYKEVKKDLIIKLPKYSLFELENGRKRMLASAGELQKGNELALPSKYVNFLYLASHYEKLKGSPEDNEQKQLFVEQHKHYLDEIIEQISEFSKRVILADANLDKVLSAYNKHRDKPIREQAENIIHLFTLTNLGAPAAFKYFDTTIDRKRYTSTKEVLDATLIHQSITGLYETRIDLSQLGGDGGGSSGGGEAAAKGGTLGIEDEYRLHETSTEPDVSLGSTWLSDFPQAWAETGGMGLAVRQAPLIIPLKATSTPVSIQQYPMSHEARLGIKPHIQRLLDQGILVPCQSPWNTPLLPVKKPGTNDYRPVQDLREVNKRVEDIHPTVPNPYNLLSGLPPSHQWYTVLDLKDAFFCLRLHPTSQPLFAFEWRDPGMGISGQLTWTRLPQGFKNSPTLFDEALHRDLADFRIQHPDLILLQYVDDILLAATSELDCQQGTRALLQTLGDLGYRASAKKAQICQKQVKYLGYLLREGQRWLTEARKETVMGQPVPKTPRQLREFLGTAGFCRLWIPGFAEMAAPLYPLTKTGTLFSWGPDQQKAYQEIKQALLTAPALGLPDLTKPFELFVDEKQGYAKGVLTQKLGPWRRPVAYLSKKLDPVAAGWPPCLRMVAAIAVLTKDAGKLTMGQPLVILAPHAVEALVKQPPDRWLSNARMTHYQAMLLDTDRVQFGPVVALNPATLLPLPEEGAPHDCLEILAETHGTRPDLTDQPIPDADHTWYTDGSSFLQEGQRKAGAAVTTETEVIWAGALPAGTSAQRAELIALTQALKMAEGKRLNVYTDSRYAFATAHIHGEIYRRRGLLTSEGREIKNKSEILALLKALFLPKRLSIIHCLGHQKGDSAEARGNRLADQAAREAAIKTPPDTSTLLAGKRTADGSEFEKRTADGSEFESPKKKAKVE

SEQ ID NO: 2183 - protein, 2091 aa, synthetic construct
MPAAKRVKLDGGDKKYSIGLDIGTNSVGWAVITDEYKVPSKKFKVLGNTDRHSIKKNLIGALLFDSGETAEATRLKRTARRRYTRRKNRICYLQEIFSNEMAKVDDSFFHRLEESFLVEEDKKHERHPIFGNIVDEVAYHEKYPTIYHLRKKLVDSTDKADLRLIYLALAHMIKFRGHFLIEGDLNPDNSDVDKLFIQLVQTYNQLFEENPINASGVDAKAILSARLSKSRRLENLIAQLPGEKKNGLFGNLIALSLGLTPNFKSNFDLAEDAKLQLSKDTYDDDLDNLLAQIGDQYADLFLAAKNLSDAILLSDILRVNTEITKAPLSASMIKRYDEHHQDLTLLKALVRQQLPEKYKEIFFDQSKNGYAGYIDGGASQEEFYKFIKPILEKMDGTEELLVKLNREDLLRKQRTFDNGSIPHQIHLGELHAILRRQEDFYPFLKDNREKIEKILTFRIPYYVGPLARGNSRFAWMTRKSEETITPWNFEEVVDKGASAQSFIERMTNFDKNLPNEKVLPKHSLLYEYFTVYNELTKVKYVTEGMRKPAFLSGEQKKAIVDLLFKTNRKVTVKQLKEDYFKKIECFDSVEISGVEDRFNASLGTYHDLLKIIKDKDFLDNEENEDILEDIVLTLTLFEDREMIEERLKTYAHLFDDKVMKQLKRRRYTGWGRLSRKLINGIRDKQSGKTILDFLKSDGFANRNFMQLIHDDSLTFKEDIQKAQVSGQGDSLHEHIANLAGSPAIKKGILQTVKVVDELVKVMGRHKPENIVIEMARENQTTQKGQKNSRERMKRIEEGIKELGSQILKEHPVENTQLQNEKLYLYYLQNGRDMYVDQELDINRLSDYDVDHIVPQSFLKDDSIDNKVLTRSDKARGKSDNVPSEEVVKKMKNYWRQLLNAKLITQRKFDNLTKAERGGLSELDKAGFIKRQLVETRQITKHVAQILDSRMNTKYDENDKLIREVKVITLKSKLVSDFRKDFQFYKVREINNYHHAHDAYLNAVVGTALIKKYPKLESEFVYGDYKVYDVRKMIAKSEQEIGKATAKYFFYSNIMNFFKTEITLANGEIRKRPLIETNGETGEIVWDKGRDFATVRKVLSMPQVNIVKKTEVQTGGFSKESILPKRNSDKLIARKKDWDPKKYGGFDSPTVAYSVLVVAKVEKGKSKKLKSVKELLGITIMERSSFEKNPIDFLEAKGYKEVKKDLIIKLPKYSLFELENGRKRMLASAGELQKGNELALPSKYVNFLYLASHYEKLKGSPEDNEQKQLFVEQHKHYLDEIIEQISEFSKRVILADANLDKVLSAYNKHRDKPIREQAENIIHLFTLTNLGAPAAFKYFDTTIDRKRYTSTKEVLDATLIHQSITGLYETRIDLSQLGGDGGGSSPAPGGTLGIEDEYRLHETSTEPDVSLGSTWLSDFPQAWAETGGMGLAVRQAPLIIPLKATSTPVSIQQYPMSHEARLGIKPHIQRLLDQGILVPCQSPWNTPLLPVKKPGTNDYRPVQDLREVNKRVEDIHPTVPNPYNLLSGLPPSHQWYTVLDLKDAFFCLRLHPTSQPLFAFEWRDPGMGISGQLTWTRLPQGFKNSPTLFDEALHRDLADFRIQHPDLILLQYVDDILLAATSELDCQQGTRALLQTLGDLGYRASAKKAQICQKQVKYLGYLLREGQRWLTEARKETVMGQPVPKTPRQLREFLGTAGFCRLWIPGFAEMAAPLYPLTKTGTLFSWGPDQQKAYQEIKQALLTAPALGLPDLTKPFELFVDEKQGYAKGVLTQKLGPWRRPVAYLSKKLDPVAAGWPPCLRMVAAIAVLTKDAGKLTMGQPLVILAPHAVEALVKQPPDRWLSNARMTHYQAMLLDTDRVQFGPVVALNPATLLPLPEEGAPHDCLEILAETHGTRPDLTDQPIPDADHTWYTDGSSFLQEGQRKAGAAVTTETEVIWAGALPAGTSAQRAELIALTQALKMAEGKRLNVYTDSRYAFATAHIHGEIYRRRGLLTSEGREIKNKSEILALLKALFLPKRLSIIHCLGHQKGDSAEARGNRLADQAAREAAIKTPPDTSTLLAGKRTADGSEFEKRTADGSEFESPKKKAKVE

SEQ ID NO: 2184 - protein, 2096 aa, synthetic construct
MPAAKRVKLDGGDKKYSIGLDIGTNSVGWAVITDEYKVPSKKFKVLGNTDRHSIKKNLIGALLFDSGETAEATRLKRTARRRYTRRKNRICYLQEIFSNEMAKVDDSFFHRLEESFLVEEDKKHERHPIFGNIVDEVAYHEKYPTIYHLRKKLVDSTDKADLRLIYLALAHMIKFRGHFLIEGDLNPDNSDVDKLFIQLVQTYNQLFEENPINASGVDAKAILSARLSKSRRLENLIAQLPGEKKNGLFGNLIALSLGLTPNFKSNFDLAEDAKLQLSKDTYDDDLDNLLAQIGDQYADLFLAAKNLSDAILLSDILRVNTEITKAPLSASMIKRYDEHHQDLTLLKALVRQQLPEKYKEIFFDQSKNGYAGYIDGGASQEEFYKFIKPILEKMDGTEELLVKLNREDLLRKQRTFDNGSIPHQIHLGELHAILRRQEDFYPFLKDNREKIEKILTFRIPYYVGPLARGNSRFAWMTRKSEETITPWNFEEVVDKGASAQSFIERMTNFDKNLPNEKVLPKHSLLYEYFTVYNELTKVKYVTEGMRKPAFLSGEQKKAIVDLLFKTNRKVTVKQLKEDYFKKIECFDSVEISGVEDRFNASLGTYHDLLKIIKDKDFLDNEENEDILEDIVLTLTLFEDREMIEERLKTYAHLFDDKVMKQLKRRRYTGWGRLSRKLINGIRDKQSGKTILDFLKSDGFANRNFMQLIHDDSLTFKEDIQKAQVSGQGDSLHEHIANLAGSPAIKKGILQTVKVVDELVKVMGRHKPENIVIEMARENQTTQKGQKNSRERMKRIEEGIKELGSQILKEHPVENTQLQNEKLYLYYLQNGRDMYVDQELDINRLSDYDVDHIVPQSFLKDDSIDNKVLTRSDKARGKSDNVPSEEVVKKMKNYWRQLLNAKLITQRKFDNLTKAERGGLSELDKAGFIKRQLVETRQITKHVAQILDSRMNTKYDENDKLIREVKVITLKSKLVSDFRKDFQFYKVREINNYHHAHDAYLNAVVGTALIKKYPKLESEFVYGDYKVYDVRKMIAKSEQEIGKATAKYFFYSNIMNFFKTEITLANGEIRKRPLIETNGETGEIVWDKGRDFATVRKVLSMPQVNIVKKTEVQTGGFSKESILPKRNSDKLIARKKDWDPKKYGGFDSPTVAYSVLVVAKVEKGKSKKLKSVKELLGITIMERSSFEKNPIDFLEAKGYKEVKKDLIIKLPKYSLFELENGRKRMLASAGELQKGNELALPSKYVNFLYLASHYEKLKGSPEDNEQKQLFVEQHKHYLDEIIEQISEFSKRVILADANLDKVLSAYNKHRDKPIREQAENIIHLFTLTNLGAPAAFKYFDTTIDRKRYTSTKEVLDATLIHQSITGLYETRIDLSQLGGDGGGGGEAAAKGGSGGTLGIEDEYRLHETSTEPDVSLGSTWLSDFPQAWAETGGMGLAVRQAPLIIPLKATSTPVSIQQYPMSHEARLGIKPHIQRLLDQGILVPCQSPWNTPLLPVKKPGTNDYRPVQDLREVNKRVEDIHPTVPNPYNLLSGLPPSHQWYTVLDLKDAFFCLRLHPTSQPLFAFEWRDPGMGISGQLTWTRLPQGFKNSPTLFDEALHRDLADFRIQHPDLILLQYVDDILLAATSELDCQQGTRALLQTLGDLGYRASAKKAQICQKQVKYLGYLLREGQRWLTEARKETVMGQPVPKTPRQLREFLGTAGFCRLWIPGFAEMAAPLYPLTKTGTLFSWGPDQQKAYQEIKQALLTAPALGLPDLTKPFELFVDEKQGYAKGVLTQKLGPWRRPVAYLSKKLDPVAAGWPPCLRMVAAIAVLTKDAGKLTMGQPLVILAPHAVEALVKQPPDRWLSNARMTHYQAMLLDTDRVQFGPVVALNPATLLPLPEEGAPHDCLEILAETHGTRPDLTDQPIPDADHTWYTDGSSFLQEGQRKAGAAVTTETEVIWAGALPAGTSAQRAELIALTQALKMAEGKRLNVYTDSRYAFATAHIHGEIYRRRGLLTSEGREIKNKSEILALLKALFLPKRLSIIHCLGHQKGDSAEARGNRLADQAAREAAIKTPPDTSTLLAGKRTADGSEFEKRTADGSEFESPKKKAKVE

SEQ ID NO: 2185 - protein, 2096 aa, synthetic construct
MPAAKRVKLDGGDKKYSIGLDIGTNSVGWAVITDEYKVPSKKFKVLGNTDRHSIKKNLIGALLFDSGETAEATRLKRTARRRYTRRKNRICYLQEIFSNEMAKVDDSFFHRLEESFLVEEDKKHERHPIFGNIVDEVAYHEKYPTIYHLRKKLVDSTDKADLRLIYLALAHMIKFRGHFLIEGDLNPDNSDVDKLFIQLVQTYNQLFEENPINASGVDAKAILSARLSKSRRLENLIAQLPGEKKNGLFGNLIALSLGLTPNFKSNFDLAEDAKLQLSKDTYDDDLDNLLAQIGDQYADLFLAAKNLSDAILLSDILRVNTEITKAPLSASMIKRYDEHHQDLTLLKALVRQQLPEKYKEIFFDQSKNGYAGYIDGGASQEEFYKFIKPILEKMDGTEELLVKLNREDLLRKQRTFDNGSIPHQIHLGELHAILRRQEDFYPFLKDNREKIEKILTFRIPYYVGPLARGNSRFAWMTRKSEETITPWNFEEVVDKGASAQSFIERMTNFDKNLPNEKVLPKHSLLYEYFTVYNELTKVKYVTEGMRKPAFLSGEQKKAIVDLLFKTNRKVTVKQLKEDYFKKIECFDSVEISGVEDRFNASLGTYHDLLKIIKDKDFLDNEENEDILEDIVLTLTLFEDREMIEERLKTYAHLFDDKVMKQLKRRRYTGWGRLSRKLINGIRDKQSGKTILDFLKSDGFANRNFMQLIHDDSLTFKEDIQKAQVSGQGDSLHEHIANLAGSPAIKKGILQTVKVVDELVKVMGRHKPENIVIEMARENQTTQKGQKNSRERMKRIEEGIKELGSQILKEHPVENTQLQNEKLYLYYLQNGRDMYVDQELDINRLSDYDVDHIVPQSFLKDDSIDNKVLTRSDKARGKSDNVPSEEVVKKMKNYWRQLLNAKLITQRKFDNLTKAERGGLSELDKAGFIKRQLVETRQITKHVAQILDSRMNTKYDENDKLIREVKVITLKSKLVSDFRKDFQFYKVREINNYHHAHDAYLNAVVGTALIKKYPKLESEFVYGDYKVYDVRKMIAKSEQEIGKATAKYFFYSNIMNFFKTEITLANGEIRKRPLIETNGETGEIVWDKGRDFATVRKVLSMPQVNIVKKTEVQTGGFSKESILPKRNSDKLIARKKDWDPKKYGGFDSPTVAYSVLVVAKVEKGKSKKLKSVKELLGITIMERSSFEKNPIDFLEAKGYKEVKKDLIIKLPKYSLFELENGRKRMLASAGELQKGNELALPSKYVNFLYLASHYEKLKGSPEDNEQKQLFVEQHKHYLDEIIEQISEFSKRVILADANLDKVLSAYNKHRDKPIREQAENIIHLFTLTNLGAPAAFKYFDTTIDRKRYTSTKEVLDATLIHQSITGLYETRIDLSQLGGDGGEAAAKPAPGSSGGTLGIEDEYRLHETSTEPDVSLGSTWLSDFPQAWAETGGMGLAVRQAPLIIPLKATSTPVSIQQYPMSHEARLGIKPHIQRLLDQGILVPCQSPWNTPLLPVKKPGTNDYRPVQDLREVNKRVEDIHPTVPNPYNLLSGLPPSHQWYTVLDLKDAFFCLRLHPTSQPLFAFEWRDPGMGISGQLTWTRLPQGFKNSPTLFDEALHRDLADFRIQHPDLILLQYVDDILLAATSELDCQQGTRALLQTLGDLGYRASAKKAQICQKQVKYLGYLLREGQRWLTEARKETVMGQPVPKTPRQLREFLGTAGFCRLWIPGFAEMAAPLYPLTKTGTLFSWGPDQQKAYQEIKQALLTAPALGLPDLTKPFELFVDEKQGYAKGVLTQKLGPWRRPVAYLSKKLDPVAAGWPPCLRMVAAIAVLTKDAGKLTMGQPLVILAPHAVEALVKQPPDRWLSNARMTHYQAMLLDTDRVQFGPVVALNPATLLPLPEEGAPHDCLEILAETHGTRPDLTDQPIPDADHTWYTDGSSFLQEGQRKAGAAVTTETEVIWAGALPAGTSAQRAELIALTQALKMAEGKRLNVYTDSRYAFATAHIHGEIYRRRGLLTSEGREIKNKSEILALLKALFLPKRLSIIHCLGHQKGDSAEARGNRLADQAAREAAIKTPPDTSTLLAGKRTADGSEFEKRTADGSEFESPKKKAKVE

SEQ ID NO: 2186 - protein, 2096 aa, synthetic construct; identical to SEQ ID NO: 2069

SEQ ID NO: 2187 - protein, 2096 aa, synthetic construct
MPAAKRVKLDGGDKKYSIGLDIGTNSVGWAVITDEYKVPSKKFKVLGNTDRHSIKKNLIGALLFDSGETAEATRLKRTARRRYTRRKNRICYLQEIFSNEMAKVDDSFFHRLEESFLVEEDKKHERHPIFGNIVDEVAYHEKYPTIYHLRKKLVDSTDKADLRLIYLALAHMIKFRGHFLIEGDLNPDNSDVDKLFIQLVQTYNQLFEENPINASGVDAKAILSARLSKSRRLENLIAQLPGEKKNGLFGNLIALSLGLTPNFKSNFDLAEDAKLQLSKDTYDDDLDNLLAQIGDQYADLFLAAKNLSDAILLSDILRVNTEITKAPLSASMIKRYDEHHQDLTLLKALVRQQLPEKYKEIFFDQSKNGYAGYIDGGASQEEFYKFIKPILEKMDGTEELLVKLNREDLLRKQRTFDNGSIPHQIHLGELHAILRRQEDFYPFLKDNREKIEKILTFRIPYYVGPLARGNSRFAWMTRKSEETITPWNFEEVVDKGASAQSFIERMTNFDKNLPNEKVLPKHSLLYEYFTVYNELTKVKYVTEGMRKPAFLSGEQKKAIVDLLFKTNRKVTVKQLKEDYFKKIECFDSVEISGVEDRFNASLGTYHDLLKIIKDKDFLDNEENEDILEDIVLTLTLFEDREMIEERLKTYAHLFDDKVMKQLKRRRYTGWGRLSRKLINGIRDKQSGKTILDFLKSDGFANRNFMQLIHDDSLTFKEDIQKAQVSGQGDSLHEHIANLAGSPAIKKGILQTVKVVDELVKVMGRHKPENIVIEMARENQTTQKGQKNSRERMKRIEEGIKELGSQILKEHPVENTQLQNEKLYLYYLQNGRDMYVDQELDINRLSDYDVDHIVPQSFLKDDSIDNKVLTRSDKARGKSDNVPSEEVVKKMKNYWRQLLNAKLITQRKFDNLTKAERGGLSELDKAGFIKRQLVETRQITKHVAQILDSRMNTKYDENDKLIREVKVITLKSKLVSDFRKDFQFYKVREINNYHHAHDAYLNAVVGTALIKKYPKLESEFVYGDYKVYDVRKMIAKSEQEIGKATAKYFFYSNIMNFFKTEITLANGEIRKRPLIETNGETGEIVWDKGRDFATVRKVLSMPQVNIVKKTEVQTGGFSKESILPKRNSDKLIARKKDWDPKKYGGFDSPTVAYSVLVVAKVEKGKSKKLKSVKELLGITIMERSSFEKNPIDFLEAKGYKEVKKDLIIKLPKYSLFELENGRKRMLASAGELQKGNELALPSKYVNFLYLASHYEKLKGSPEDNEQKQLFVEQHKHYLDEIIEQISEFSKRVILADANLDKVLSAYNKHRDKPIREQAENIIHLFTLTNLGAPAAFKYFDTTIDRKRYTSTKEVLDATLIHQSITGLYETRIDLSQLGGDGGPAPAPAPAPAPGGTLGIEDEYRLHETSTEPDVSLGSTWLSDFPQAWAETGGMGLAVRQAPLIIPLKATSTPVSIQQYPMSHEARLGIKPHIQRLLDQGILVPCQSPWNTPLLPVKKPGTNDYRPVQDLREVNKRVEDIHPTVPNPYNLLSGLPPSHQWYTVLDLKDAFFCLRLHPTSQPLFAFEWRDPGMGISGQLTWTRLPQGFKNSPTLFNEALHRDLADFRIQHPDLILLQYVDDILLAATSELDCQQGTRALLQTLGDLGYRASAKKAQICQKQVKYLGYLLREGQRWLTEARKETVMGQPVPKTPRQLREFLGTAGFCRLWIPGFAEMAAPLYPLTKPGTLFSWGPDQQKAYQEIKQALLTAPALGLPDLTKPFELFVDEKQGYAKGVLTQKLGPWRRPVAYLSKKLDPVAAGWPPCLRMVAAIAVLTKDAGKLTMGQPLVILAPHAVEALVKQPPDRWLSNARMTHYQAMLLDTDRVQFGPVVALNPATLLPLPEEGAPHDCLEILAETHGTRPDLTDQPIPDADHTWYTDGSSFLQEGQRKAGAAVTTETEVIWAGALPAGTSAQRAELIALTQALKMAEGKRLNVYTDSRYAFATAHIHGEIYRRRGWLTSEGREIKNKSEILALLKALFLPKRLSIIHCLGHQKGDSAEARGNRLADQAAREAAIKTPPDTSTLLAGKRTADGSEFEKRTADGSEFESPKKKAKVE

SEQ ID NO: 2188 - protein, 2110 aa, synthetic construct
MPAAKRVKLDGGDKKYSIGLDIGTNSVGWAVITDEYKVPSKKFKVLGNTDRHSIKKNLIGALLFDSGETAEATRLKRTARRRYTRRKNRICYLQEIFSNEMAKVDDSFFHRLEESFLVEEDKKHERHPIFGNIVDEVAYHEKYPTIYHLRKKLVDSTDKADLRLIYLALAHMIKFRGHFLIEGDLNPDNSDVDKLFIQLVQTYNQLFEENPINASGVDAKAILSARLSKSRRLENLIAQLPGEKKNGLFGNLIALSLGLTPNFKSNFDLAEDAKLQLSKDTYDDDLDNLLAQIGDQYADLFLAAKNLSDAILLSDILRVNTEITKAPLSASMIKRYDEHHQDLTLLKALVRQQLPEKYKEIFFDQSKNGYAGYIDGGASQEEFYKFIKPILEKMDGTEELLVKLNREDLLRKQRTFDNGSIPHQIHLGELHAILRRQEDFYPFLKDNREKIEKILTFRIPYYVGPLARGNSRFAWMTRKSEETITPWNFEEVVDKGASAQSFIERMTNFDKNLPNEKVLPKHSLLYEYFTVYNELTKVKYVTEGMRKPAFLSGEQKKAIVDLLFKTNRKVTVKQLKEDYFKKIECFDSVEISGVEDRFNASLGTYHDLLKIIKDKDFLDNEENEDILEDIVLTLTLFEDREMIEERLKTYAHLFDDKVMKQLKRRRYTGWGRLSRKLINGIRDKQSGKTILDFLKSDGFANRNFMQLIHDDSLTFKEDIQKAQVSGQGDSLHEHIANLAGSPAIKKGILQTVKVVDELVKVMGRHKPENIVIEMARENQTTQKGQKNSRERMKRIEEGIKELGSQILKEHPVENTQLQNEKLYLYYLQNGRDMYVDQELDINRLSDYDVDHIVPQSFLKDDSIDNKVLTRSDKARGKSDNVPSEEVVKKMKNYWRQLLNAKLITQRKFDNLTKAERGGLSELDKAGFIKRQLVETRQITKHVAQILDSRMNTKYDENDKLIREVKVITLKSKLVSDFRKDFQFYKVREINNYHHAHDAYLNAVVGTALIKKYPKLESEFVYGDYKVYDVRKMIAKSEQEIGKATAKYFFYSNIMNFFKTEITLANGEIRKRPLIETNGETGEIVWDKGRDFATVRKVLSMPQVNIVKKTEVQTGGFSKESILPKRNSDKLIARKKDWDPKKYGGFDSPTVAYSVLVVAKVEKGKSKKLKSVKELLGITIMERSSFEKNPIDFLEAKGYKEVKKDLIIKLPKYSLFELENGRKRMLASAGELQKGNELALPSKYVNFLYLASHYEKLKGSPEDNEQKQLFVEQHKHYLDEIIEQISEFSKRVILADANLDKVLSAYNKHRDKPIREQAENIIHLFTLTNLGAPAAFKYFDTTIDRKRYTSTKEVLDATLIHQSITGLYETRIDLSQLGGDGGEAAAKEAAAKEAAAKEAAAKEAAAKGGTLGIEDEYRLHETSTEPDVSLGSTWLSDFPQAWAETGGMGLAVRQAPLIIPLKATSTPVSIQQYPMSHEARLGIKPHIQRLLDQGILVPCQSPWNTPLLPVKKPGTNDYRPVQDLREVNKRVEDIHPTVPNPYNLLSGLPPSHQWYTVLDLKDAFFCLRLHPTSQPLFAFEWRDPGMGISGQLTWTRLPQGFKNSPTLFNEALHRDLADFRIQHPDLILLQYVDDILLAATSELDCQQGTRALLQTLGDLGYRASAKKAQICQKQVKYLGYLLREGQRWLTEARKETVMGQPVPKTPRQLREFLGTAGFCRLWIPGFAEMAAPLYPLTKPGTLFSWGPDQQKAYQEIKQALLTAPALGLPDLTKPFELFVDEKQGYAKGVLTQKLGPWRRPVAYLSKKLDPVAAGWPPCLRMVAAIAVLTKDAGKLTMGQPLVILAPHAVEALVKQPPDRWLSNARMTHYQAMLLDTDRVQFGPVVALNPATLLPLPEEGAPHDCLEILAETHGTRPDLTDQPIPDADHTWYTDGSSFLQEGQRKAGAAVTTETEVIWAGALPAGTSAQRAELIALTQALKMAEGKRLNVYTDSRYAFATAHIHGEIYRRRGWLTSEGREIKNKSEILALLKALFLPKRLSIIHCLGHQKGDSAEARGNRLADQAAREAAIKTPPDTSTLLAGKRTADGSEFEKRTADGSEFESPKKKAKVE

SEQ ID NO: 2189 - protein, 2115 aa, synthetic construct
MPAAKRVKLDGGDKKYSIGLDIGTNSVGWAVITDEYKVPSKKFKVLGNTDRHSIKKNLIGALLFDSGETAEATRLKRTARRRYTRRKNRICYLQEIFSNEMAKVDDSFFHRLEESFLVEEDKKHERHPIFGNIVDEVAYHEKYPTIYHLRKKLVDSTDKADLRLIYLALAHMIKFRGHFLIEGDLNPDNSDVDKLFIQLVQTYNQLFEENPINASGVDAKAILSARLSKSRRLENLIAQLPGEKKNGLFGNLIALSLGLTPNFKSNFDLAEDAKLQLSKDTYDDDLDNLLAQIGDQYADLFLAAKNLSDAILLSDILRVNTEITKAPLSASMIKRYDEHHQDLTLLKALVRQQLPEKYKEIFFDQSKNGYAGYIDGGASQEEFYKFIKPILEKMDGTEELLVKLNREDLLRKQRTFDNGSIPHQIHLGELHAILRRQEDFYPFLKDNREKIEKILTFRIPYYVGPLARGNSRFAWMTRKSEETITPWNFEEVVDKGASAQSFIERMTNFDKNLPNEKVLPKHSLLYEYFTVYNELTKVKYVTEGMRKPAFLSGEQKKAIVDLLFKTNRKVTVKQLKEDYFKKIECFDSVEISGVEDRFNASLGTYHDLLKIIKDKDFLDNEENEDILEDIVLTLTLFEDREMIEERLKTYAHLFDDKVMKQLKRRRYTGWGRLSRKLINGIRDKQSGKTILDFLKSDGFANRNFMQLIHDDSLTFKEDIQKAQVSGQGDSLHEHIANLAGSPAIKKGILQTVKVVDELVKVMGRHKPENIVIEMARENQTTQKGQKNSRERMKRIEEGIKELGSQILKEHPVENTQLQNEKLYLYYLQNGRDMYVDQELDINRLSDYDVDHIVPQSFLKDDSIDNKVLTRSDKARGKSDNVPSEEVVKKMKNYWRQLLNAKLITQRKFDNLTKAERGGLSELDKAGFIKRQLVETRQITKHVAQILDSRMNTKYDENDKLIREVKVITLKSKLVSDFRKDFQFYKVREINNYHHAHDAYLNAVVGTALIKKYPKLESEFVYGDYKVYDVRKMIAKSEQEIGKATAKYFFYSNIMNFFKTEITLANGEIRKRPLIETNGETGEIVWDKGRDFATVRKVLSMPQVNIVKKTEVQTGGFSKESILPKRNSDKLIARKKDWDPKKYGGFDSPTVAYSVLVVAKVEKGKSKKLKSVKELLGITIMERSSFEKNPIDFLEAKGYKEVKKDLIIKLPKYSLFELENGRKRMLASAGELQKGNELALPSKYVNFLYLASHYEKLKGSPEDNEQKQLFVEQHKHYLDEIIEQISEFSKRVILADANLDKVLSAYNKHRDKPIREQAENIIHLFTLTNLGAPAAFKYFDTTIDRKRYTSTKEVLDATLIHQSITGLYETRIDLSQLGGDGGEAAAKEAAAKEAAAKEAAAKEAAAKEAAAKGGTLGIEDEYRLHETSTEPDVSLGSTWLSDFPQAWAETGGMGLAVRQAPLIIPLKATSTPVSIQQYPMSHEARLGIKPHIQRLLDQGILVPCQSPWNTPLLPVKKPGTNDYRPVQDLREVNKRVEDIHPTVPNPYNLLSGLPPSHQWYTVLDLKDAFFCLRLHPTSQPLFAFEWRDPGMGISGQLTWTRLPQGFKNSPTLFNEALHRDLADFRIQHPDLILLQYVDDILLAATSELDCQQGTRALLQTLGDLGYRASAKKAQICQKQVKYLGYLLREGQRWLTEARKETVMGQPVPKTPRQLREFLGTAGFCRLWIPGFAEMAAPLYPLTKPGTLFSWGPDQQKAYQEIKQALLTAPALGLPDLTKPFELFVDEKQGYAKGVLTQKLGPWRRPVAYLSKKLDPVAAGWPPCLRMVAAIAVLTKDAGKLTMGQPLVILAPHAVEALVKQPPDRWLSNARMTHYQAMLLDTDRVQFGPVVALNPATLLPLPEEGAPHDCLEILAETHGTRPDLTDQPIPDADHTWYTDGSSFLQEGQRKAGAAVTTETEVIWAGALPAGTSAQRAELIALTQALKMAEGKRLNVYTDSRYAFATAHIHGEIYRRRGWLTSEGREIKNKSEILALLKALFLPKRLSIIHCLGHQKGDSAEARGNRLADQAAREAAIKTPPDTSTLLAGKRTADGSEFEKRTADGSEFESPKKKAKVE

SEQ ID NO: 2190 - protein, 2096 aa, synthetic construct
MPAAKRVKLDGGDKKYSIGLDIGTNSVGWAVITDEYKVPSKKFKVLGNTDRHSIKKNLIGALLFDSGETAEATRLKRTARRRYTRRKNRICYLQEIFSNEMAKVDDSFFHRLEESFLVEEDKKHERHPIFGNIVDEVAYHEKYPTIYHLRKKLVDSTDKADLRLIYLALAHMIKFRGHFLIEGDLNPDNSDVDKLFIQLVQTYNQLFEENPINASGVDAKAILSARLSKSRRLENLIAQLPGEKKNGLFGNLIALSLGLTPNFKSNFDLAEDAKLQLSKDTYDDDLDNLLAQIGDQYADLFLAAKNLSDAILLSDILRVNTEITKAPLSASMIKRYDEHHQDLTLLKALVRQQLPEKYKEIFFDQSKNGYAGYIDGGASQEEFYKFIKPILEKMDGTEELLVKLNREDLLRKQRTFDNGSIPHQIHLGELHAILRRQEDFYPFLKDNREKIEKILTFRIPYYVGPLARGNSRFAWMTRKSEETITPWNFEEVVDKGASAQSFIERMTNFDKNLPNEKVLPKHSLLYEYFTVYNELTKVKYVTEGMRKPAFLSGEQKKAIVDLLFKTNRKVTVKQLKEDYFKKIECFDSVEISGVEDRFNASLGTYHDLLKIIKDKDFLDNEENEDILEDIVLTLTLFEDREMIEERLKTYAHLFDDKVMKQLKRRRYTGWGRLSRKLINGIRDKQSGKTILDFLKSDGFANRNFMQLIHDDSLTFKEDIQKAQVSGQGDSLHEHIANLAGSPAIKKGILQTVKVVDELVKVMGRHKPENIVIEMARENQTTQKGQKNSRERMKRIEEGIKELGSQILKEHPVENTQLQNEKLYLYYLQNGRDMYVDQELDINRLSDYDVDHIVPQSFLKDDSIDNKVLTRSDKARGKSDNVPSEEVVKKMKNYWRQLLNAKLITQRKFDNLTKAERGGLSELDKAGFIKRQLVETRQITKHVAQILDSRMNTKYDENDKLIREVKVITLKSKLVSDFRKDFQFYKVREINNYHHAHDAYLNAVVGTALIKKYPKLESEFVYGDYKVYDVRKMIAKSEQEIGKATAKYFFYSNIMNFFKTEITLANGEIRKRPLIETNGETGEIVWDKGRDFATVRKVLSMPQVNIVKKTEVQTGGFSKESILPKRNSDKLIARKKDWDPKKYGGFDSPTVAYSVLVVAKVEKGKSKKLKSVKELLGITIMERSSFEKNPIDFLEAKGYKEVKKDLIIKLPKYSLFELENGRKRMLASAGELQKGNELALPSKYVNFLYLASHYEKLKGSPEDNEQKQLFVEQHKHYLDEIIEQISEFSKRVILADANLDKVLSAYNKHRDKPIREQAENIIHLFTLTNLGAPAAFKYFDTTIDRKRYTSTKEVLDATLIHQSITGLYETRIDLSQLGGDGGEAAAKGSSGGSGGTLGIEDEYRLHETSTEPDVSLGSTWLSDFPQAWAETGGMGLAVRQAPLIIPLKATSTPVSIQQYPMSHEARLGIKPHIQRLLDQGILVPCQSPWNTPLLPVKKPGTNDYRPVQDLREVNKRVEDIHPTVPNPYNLLSGLPPSHQWYTVLDLKDAFFCLRLHPTSQPLFAFEWRDPGMGISGQLTWTRLPQGFKNSPTLFNEALHRDLADFRIQHPDLILLQYVDDILLAATSELDCQQGTRALLQTLGDLGYRASAKKAQICQKQVKYLGYLLREGQRWLTEARKETVMGQPVPKTPRQLREFLGTAGFCRLWIPGFAEMAAPLYPLTKPGTLFSWGPDQQKAYQEIKQALLTAPALGLPDLTKPFELFVDEKQGYAKGVLTQKLGPWRRPVAYLSKKLDPVAAGWPPCLRMVAAIAVLTKDAGKLTMGQPLVILAPHAVEALVKQPPDRWLSNARMTHYQAMLLDTDRVQFGPVVALNPATLLPLPEEGAPHDCLEILAETHGTRPDLTDQPIPDADHTWYTDGSSFLQEGQRKAGAAVTTETEVIWAGALPAGTSAQRAELIALTQALKMAEGKRLNVYTDSRYAFATAHIHGEIYRRRGWLTSEGREIKNKSEILALLKALFLPKRLSIIHCLGHQKGDSAEARGNRLADQAAREAAIKTPPDTSTLLAGKRTADGSEFEKRTADGSEFESPKKKAKVE

SEQ ID NO: 2191 - protein, 2105 aa, synthetic construct; identical to SEQ ID NO: 2070

SEQ ID NO: 2192 - protein, 2096 aa, synthetic construct
MPAAKRVKLDGGDKKYSIGLDIGTNSVGWAVITDEYKVPSKKFKVLGNTDRHSIKKNLIGALLFDSGETAEATRLKRTARRRYTRRKNRICYLQEIFSNEMAKVDDSFFHRLEESFLVEEDKKHERHPIFGNIVDEVAYHEKYPTIYHLRKKLVDSTDKADLRLIYLALAHMIKFRGHFLIEGDLNPDNSDVDKLFIQLVQTYNQLFEENPINASGVDAKAILSARLSKSRRLENLIAQLPGEKKNGLFGNLIALSLGLTPNFKSNFDLAEDAKLQLSKDTYDDDLDNLLAQIGDQYADLFLAAKNLSDAILLSDILRVNTEITKAPLSASMIKRYDEHHQDLTLLKALVRQQLPEKYKEIFFDQSKNGYAGYIDGGASQEEFYKFIKPILEKMDGTEELLVKLNREDLLRKQRTFDNGSIPHQIHLGELHAILRRQEDFYPFLKDNREKIEKILTFRIPYYVGPLARGNSRFAWMTRKSEETITPWNFEEVVDKGASAQSFIERMTNFDKNLPNEKVLPKHSLLYEYFTVYNELTKVKYVTEGMRKPAFLSGEQKKAIVDLLFKTNRKVTVKQLKEDYFKKIECFDSVEISGVEDRFNASLGTYHDLLKIIKDKDFLDNEENEDILEDIVLTLTLFEDREMIEERLKTYAHLFDDKVMKQLKRRRYTGWGRLSRKLINGIRDKQSGKTILDFLKSDGFANRNFMQLIHDDSLTFKEDIQKAQVSGQGDSLHEHIANLAGSPAIKKGILQTVKVVDELVKVMGRHKPENIVIEMARENQTTQKGQKNSRERMKRIEEGIKELGSQILKEHPVENTQLQNEKLYLYYLQNGRDMYVDQELDINRLSDYDVDHIVPQSFLKDDSIDNKVLTRSDKARGKSDNVPSEEVVKKMKNYWRQLLNAKLITQRKFDNLTKAERGGLSELDKAGFIKRQLVETRQITKHVAQILDSRMNTKYDENDKLIREVKVITLKSKLVSDFRKDFQFYKVREINNYHHAHDAYLNAVVGTALIKKYPKLESEFVYGDYKVYDVRKMIAKSEQEIGKATAKYFFYSNIMNFFKTEITLANGEIRKRPLIETNGETGEIVWDKGRDFATVRKVLSMPQVNIVKKTEVQTGGFSKESILPKRNSDKLIARKKDWDPKKYGGFDSPTVAYSVLVVAKVEKGKSKKLKSVKELLGITIMERSSFEKNPIDFLEAKGYKEVKKDLIIKLPKYSLFELENGRKRMLASAGELQKGNELALPSKYVNFLYLASHYEKLKGSPEDNEQKQLFVEQHKHYLDEIIEQISEFSKRVILADANLDKVLSAYNKHRDKPIREQAENIIHLFTLTNLGAPAAFKYFDTTIDRKRYTSTKEVLDATLIHQSITGLYETRIDLSQLGGDGGGGSPAPEAAAKGGTLGIEDEYRLHETSTEPDVSLGSTWLSDFPQAWAETGGMGLAVRQAPLIIPLKATSTPVSIQQYPMSHEARLGIKPHIQRLLDQGILVPCQSPWNTPLLPVKKPGTNDYRPVQDLREVNKRVEDIHPTVPNPYNLLSGLPPSHQWYTVLDLKDAFFCLRLHPTSQPLFAFEWRDPGMGISGQLTWTRLPQGFKNSPTLFNEALHRDLADFRIQHPDLILLQYVDDILLAATSELDCQQGTRALLQTLGDLGYRASAKKAQICQKQVKYLGYLLREGQRWLTEARKETVMGQPVPKTPRQLREFLGTAGFCRLWIPGFAEMAAPLYPLTKPGTLFSWGPDQQKAYQEIKQALLTAPALGLPDLTKPFELFVDEKQGYAKGVLTQKLGPWRRPVAYLSKKLDPVAAGWPPCLRMVAAIAVLTKDAGKLTMGQPLVILAPHAVEALVKQPPDRWLSNARMTHYQAMLLDTDRVQFGPVVALNPATLLPLPEEGAPHDCLEILAETHGTRPDLTDQPIPDADHTWYTDGSSFLQEGQRKAGAAVTTETEVIWAGALPAGTSAQRAELIALTQALKMAEGKRLNVYTDSRYAFATAHIHGEIYRRRGWLTSEGREIKNKSEILALLKALFLPKRLSIIHCLGHQKGDSAEARGNRLADQAAREAAIKTPPDTSTLLAGKRTADGSEFEKRTADGSEFESPKKKAKVE

SEQ ID NO: 2193 - protein, 2115 aa, synthetic construct
MPAAKRVKLDGGDKKYSIGLDIGTNSVGWAVITDEYKVPSKKFKVLGNTDRHSIKKNLIGALLFDSGETAEATRLKRTARRRYTRRKNRICYLQEIFSNEMAKVDDSFFHRLEESFLVEEDKKHERHPIFGNIVDEVAYHEKYPTIYHLRKKLVDSTDKADLRLIYLALAHMIKFRGHFLIEGDLNPDNSDVDKLFIQLVQTYNQLFEENPINASGVDAKAILSARLSKSRRLENLIAQLPGEKKNGLFGNLIALSLGLTPNFKSNFDLAEDAKLQLSKDTYDDDLDNLLAQIGDQYADLFLAAKNLSDAILLSDILRVNTEITKAPLSASMIKRYDEHHQDLTLLKALVRQQLPEKYKEIFFDQSKNGYAGYIDGGASQEEFYKFIKPILEKMDGTEELLVKLNREDLLRKQRTFDNGSIPHQIHLGELHAILRRQEDFYPFLKDNREKIEKILTFRIPYYVGPLARGNSRFAWMTRKSEETITPWNFEEVVDKGASAQSFIERMTNFDKNLPNEKVLPKHSLLYEYFTVYNELTKVKYVTEGMRKPAFLSGEQKKAIVDLLFKTNRKVTVKQLKEDYFKKIECFDSVEISGVEDRFNASLGTYHDLLKIIKDKDFLDNEENEDILEDIVLTLTLFEDREMIEERLKTYAHLFDDKVMKQLKRRRYTGWGRLSRKLINGIRDKQSGKTILDFLKSDGFANRNFMQLIHDDSLTFKEDIQKAQVSGQGDSLHEHIANLAGSPAIKKGILQTVKVVDELVKVMGRHKPENIVIEMARENQTTQKGQKNSRERMKRIEEGIKELGSQILKEHPVENTQLQNEKLYLYYLQNGRDMYVDQELDINRLSDYDVDHIVPQSFLKDDSIDNKVLTRSDKARGKSDNVPSEEVVKKMKNYWRQLLNAKLITQRKFDNLTKAERGGLSELDKAGFIKRQLVETRQITKHVAQILDSRMNTKYDENDKLIREVKVITLKSKLVSDFRKDFQFYKVREINNYHHAHDAYLNAVVGTALIKKYPKLESEFVYGDYKVYDVRKMIAKSEQEIGKATAKYFFYSNIMNFFKTEITLANGEIRKRPLIETNGETGEIVWDKGRDFATVRKVLSMPQVNIVKKTEVQTGGFSKESILPKRNSDKLIARKKDWDPKKYGGFDSPTVAYSVLVVAKVEKGKSKKLKSVKELLGITIMERSSFEKNPIDFLEAKGYKEVKKDLIIKLPKYSLFELENGRKRMLASAGELQKGNELALPSKYVNFLYLASHYEKLKGSPEDNEQKQLFVEQHKHYLDEIIEQISEFSKRVILADANLDKVLSAYNKHRDKPIREQAENIIHLFTLTNLGAPAAFKYFDTTIDRKRYTSTKEVLDATLIHQSITGLYETRIDLSQLGGDGGGGGGSGGGGSGGGGSGGGGSGGGGSGGGGSGGTLGIEDEYRLHETSTEPDVSLGSTWLSDFPQAWAETGGMGLAVRQAPLIIPLKATSTPVSIQQYPMSHEARLGIKPHIQRLLDQGILVPCQSPWNTPLLPVKKPGTNDYRPVQDLREVNKRVEDIHPTVPNPYNLLSGLPPSHQWYTVLDLKDAFFCLRLHPTSQPLFAFEWRDPGMGISGQLTWTRLPQGFKNSPTLFNEALHRDLADFRIQHPDLILLQYVDDILLAATSELDCQQGTRALLQTLGDLGYRASAKKAQICQKQVKYLGYLLREGQRWLTEARKETVMGQPVPKTPRQLREFLGTAGFCRLWIPGFAEMAAPLYPLTKPGTLFSWGPDQQKAYQEIKQALLTAPALGLPDLTKPFELFVDEKQGYAKGVLTQKLGPWRRPVAYLSKKLDPVAAGWPPCLRMVAAIAVLTKDAGKLTMGQPLVILAPHAVEALVKQPPDRWLSNARMTHYQAMLLDTDRVQFGPVVALNPATLLPLPEEGAPHDCLEILAETHGTRPDLTDQPIPDADHTWYTDGSSFLQEGQRKAGAAVTTETEVIWAGALPAGTSAQRAELIALTQALKMAEGKRLNVYTDSRYAFATAHIHGEIYRRRGWLTSEGREIKNKSEILALLKALFLPKRLSIIHCLGHQKGDSAEARGNRLADQAAREAAIKTPPDTSTLLAGKRTADGSEFEKRTADGSEFESPKKKAKVE

SEQ ID NO: 2194 - protein, 2131 aa, synthetic construct
MPAAKRVKLDGGDKKYSIGLDIGTNSVGWAVITDEYKVPSKKFKVLGNTDRHSIKKNLIGALLFDSGETAEATRLKRTARRRYTRRKNRICYLQEIFSNEMAKVDDSFFHRLEESFLVEEDKKHERHPIFGNIVDEVAYHEKYPTIYHLRKKLVDSTDKADLRLIYLALAHMIKFRGHFLIEGDLNPDNSDVDKLFIQLVQTYNQLFEENPINASGVDAKAILSARLSKSRRLENLIAQLPGEKKNGLFGNLIALSLGLTPNFKSNFDLAEDAKLQLSKDTYDDDLDNLLAQIGDQYADLFLAAKNLSDAILLSDILRVNTEITKAPLSASMIKRYDEHHQDLTLLKALVRQQLPEKYKEIFFDQSKNGYAGYIDGGASQEEFYKFIKPILEKMDGTEELLVKLNREDLLRKQRTFDNGSIPHQIHLGELHAILRRQEDFYPFLKDNREKIEKILTFRIPYYVGPLARGNSRFAWMTRKSEETITPWNFEEVVDKGASAQSFIERMTNFDKNLPNEKVLPKHSLLYEYFTVYNELTKVKYVTEGMRKPAFLSGEQKKAIVDLLFKTNRKVTVKQLKEDYFKKIECFDSVEISGVEDRFNASLGTYHDLLKIIKDKDFLDNEENEDILEDIVLTLTLFEDREMIEERLKTYAHLFDDKVMKQLKRRRYTGWGRLSRKLINGIRDKQSGKTILDFLKSDGFANRNFMQLIHDDSLTFKEDIQKAQVSGQGDSLHEHIANLAGSPAIKKGILQTVKVVDELVKVMGRHKPENIVIEMARENQTTQKGQKNSRERMKRIEEGIKELGSQILKEHPVENTQLQNEKLYLYYLQNGRDMYVDQELDINRLSDYDVDHIVPQSFLKDDSIDNKVLTRSDKARGKSDNVPSEEVVKKMKNYWRQLLNAKLITQRKFDNLTKAERGGLSELDKAGFIKRQLVETRQITKHVAQILDSRMNTKYDENDKLIREVKVITLKSKLVSDFRKDFQFYKVREINNYHHAHDAYLNAVVGTALIKKYPKLESEFVYGDYKVYDVRKMIAKSEQEIGKATAKYFFYSNIMNFFKTEITLANGEIRKRPLIETNGETGEIVWDKGRDFATVRKVLSMPQVNIVKKTEVQTGGFSKESILPKRNSDKLIARKKDWDPKKYGGFDSPTVAYSVLVVAKVEKGKSKKLKSVKELLGITIMERSSFEKNPIDFLEAKGYKEVKKDLIIKLPKYSLFELENGRKRMLASAGELQKGNELALPSKYVNFLYLASHYEKLKGSPEDNEQKQLFVEQHKHYLDEIIEQISEFSKRVILADANLDKVLSAYNKHRDKPIREQAENIIHLFTLTNLGAPAAFKYFDTTIDRKRYTSTKEVLDATLIHQSITGLYETRIDLSQLGGDGGAEAAAKEAAAKEAAAKEAAAKALEAEAAAKEAAAKEAAAKEAAAKAGGTLGIEDEYRLHETSTEPDVSLGSTWLSDFPQAWAETGGMGLAVRQAPLIIPLKATSTPVSIQQYPMSHEARLGIKPHIQRLLDQGILVPCQSPWNTPLLPVKKPGTNDYRPVQDLREVNKRVEDIHPTVPNPYNLLSGLPPSHQWYTVLDLKDAFFCLRLHPTSQPLFAFEWRDPGMGISGQLTWTRLPQGFKNSPTLFNEALHRDLADFRIQHPDLILLQYVDDILLAATSELDCQQGTRALLQTLGDLGYRASAKKAQICQKQVKYLGYLLREGQRWLTEARKETVMGQPVPKTPRQLREFLGTAGFCRLWIPGFAEMAAPLYPLTKPGTLFSWGPDQQKAYQEIKQALLTAPALGLPDLTKPFELFVDEKQGYAKGVLTQKLGPWRRPVAYLSKKLDPVAAGWPPCLRMVAAIAVLTKDAGKLTMGQPLVILAPHAVEALVKQPPDRWLSNARMTHYQAMLLDTDRVQFGPVVALNPATLLPLPEEGAPHDCLEILAETHGTRPDLTDQPIPDADHTWYTDGSSFLQEGQRKAGAAVTTETEVIWAGALPAGTSAQRAELIALTQALKMAEGKRLNVYTDSRYAFATAHIHGEIYRRRGWLTSEGREIKNKSEILALLKALFLPKRLSIIHCLGHQKGDSAEARGNRLADQAAREAAIKTPPDTSTLLAGKRTADGSEFEKRTADGSEFESPKKKAKVE

SEQ ID NO: 2195 - protein, 2096 aa, synthetic construct; identical to SEQ ID NO: 2076

SEQ ID NO: 2196 - protein, 2096 aa, synthetic construct
MPAAKRVKLDGGDKKYSIGLDIGTNSVGWAVITDEYKVPSKKFKVLGNTDRHSIKKNLIGALLFDSGETAEATRLKRTARRRYTRRKNRICYLQEIFSNEMAKVDDSFFHRLEESFLVEEDKKHERHPIFGNIVDEVAYHEKYPTIYHLRKKLVDSTDKADLRLIYLALAHMIKFRGHFLIEGDLNPDNSDVDKLFIQLVQTYNQLFEENPINASGVDAKAILSARLSKSRRLENLIAQLPGEKKNGLFGNLIALSLGLTPNFKSNFDLAEDAKLQLSKDTYDDDLDNLLAQIGDQYADLFLAAKNLSDAILLSDILRVNTEITKAPLSASMIKRYDEHHQDLTLLKALVRQQLPEKYKEIFFDQSKNGYAGYIDGGASQEEFYKFIKPILEKMDGTEELLVKLNREDLLRKQRTFDNGSIPHQIHLGELHAILRRQEDFYPFLKDNREKIEKILTFRIPYYVGPLARGNSRFAWMTRKSEETITPWNFEEVVDKGASAQSFIERMTNFDKNLPNEKVLPKHSLLYEYFTVYNELTKVKYVTEGMRKPAFLSGEQKKAIVDLLFKTNRKVTVKQLKEDYFKKIECFDSVEISGVEDRFNASLGTYHDLLKIIKDKDFLDNEENEDILEDIVLTLTLFEDREMIEERLKTYAHLFDDKVMKQLKRRRYTGWGRLSRKLINGIRDKQSGKTILDFLKSDGFANRNFMQLIHDDSLTFKEDIQKAQVSGQGDSLHEHIANLAGSPAIKKGILQTVKVVDELVKVMGRHKPENIVIEMARENQTTQKGQKNSRERMKRIEEGIKELGSQILKEHPVENTQLQNEKLYLYYLQNGRDMYVDQELDINRLSDYDVDHIVPQSFLKDDSIDNKVLTRSDKARGKSDNVPSEEVVKKMKNYWRQLLNAKLITQRKFDNLTKAERGGLSELDKAGFIKRQLVETRQITKHVAQILDSRMNTKYDENDKLIREVKVITLKSKLVSDFRKDFQFYKVREINNYHHAHDAYLNAVVGTALIKKYPKLESEFVYGDYKVYDVRKMIAKSEQEIGKATAKYFFYSNIMNFFKTEITLANGEIRKRPLIETNGETGEIVWDKGRDFATVRKVLSMPQVNIVKKTEVQTGGFSKESILPKRNSDKLIARKKDWDPKKYGGFDSPTVAYSVLVVAKVEKGKSKKLKSVKELLGITIMERSSFEKNPIDFLEAKGYKEVKKDLIIKLPKYSLFELENGRKRMLASAGELQKGNELALPSKYVNFLYLASHYEKLKGSPEDNEQKQLFVEQHKHYLDEIIEQISEFSKRVILADANLDKVLSAYNKHRDKPIREQAENIIHLFTLTNLGAPAAFKYFDTTIDRKRYTSTKEVLDATLIHQSITGLYETRIDLSQLGGDGGGGGGSSEAAAKGGTLGIEDEYRLHETSTEPDVSLGSTWLSDFPQAWAETGGMGLAVRQAPLIIPLKATSTPVSIQQYPMSHEARLGIKPHIQRLLDQGILVPCQSPWNTPLLPVKKPGTNDYRPVQDLREVNKRVEDIHPTVPNPYNLLSGLPPSHQWYTVLDLKDAFFCLRLHPTSQPLFAFEWRDPGMGISGQLTWTRLPQGFKNSPTLFNEALHRDLADFRIQHPDLILLQYVDDILLAATSELDCQQGTRALLQTLGDLGYRASAKKAQICQKQVKYLGYLLREGQRWLTEARKETVMGQPVPKTPRQLREFLGTAGFCRLWIPGFAEMAAPLYPLTKPGTLFSWGPDQQKAYQEIKQALLTAPALGLPDLTKPFELFVDEKQGYAKGVLTQKLGPWRRPVAYLSKKLDPVAAGWPPCLRMVAAIAVLTKDAGKLTMGQPLVILAPHAVEALVKQPPDRWLSNARMTHYQAMLLDTDRVQFGPVVALNPATLLPLPEEGAPHDCLEILAETHGTRPDLTDQPIPDADHTWYTDGSSFLQEGQRKAGAAVTTETEVIWAGALPAGTSAQRAELIALTQALKMAEGKRLNVYTDSRYAFATAHIHGEIYRRRGWLTSEGREIKNKSEILALLKALFLPKRLSIIHCLGHQKGDSAEARGNRLADQAAREAAIKTPPDTSTLLAGKRTADGSEFEKRTADGSEFESPKKKAKVE

SEQ ID NO: 2197 - protein, 2096 aa, synthetic construct
MPAAKRVKLDGGDKKYSIGLDIGTNSVGWAVITDEYKVPSKKFKVLGNTDRHSIKKNLIGALLFDSGETAEATRLKRTARRRYTRRKNRICYLQEIFSNEMAKVDDSFFHRLEESFLVEEDKKHERHPIFGNIVDEVAYHEKYPTIYHLRKKLVDSTDKADLRLIYLALAHMIKFRGHFLIEGDLNPDNSDVDKLFIQLVQTYNQLFEENPINASGVDAKAILSARLSKSRRLENLIAQLPGEKKNGLFGNLIALSLGLTPNFKSNFDLAEDAKLQLSKDTYDDDLDNLLAQIGDQYADLFLAAKNLSDAILLSDILRVNTEITKAPLSASMIKRYDEHHQDLTLLKALVRQQLPEKYKEIFFDQSKNGYAGYIDGGASQEEFYKFIKPILEKMDGTEELLVKLNREDLLRKQRTFDNGSIPHQIHLGELHAILRRQEDFYPFLKDNREKIEKILTFRIPYYVGPLARGNSRFAWMTRKSEETITPWNFEEVVDKGASAQSFIERMTNFDKNLPNEKVLPKHSLLYEYFTVYNELTKVKYVTEGMRKPAFLSGEQKKAIVDLLFKTNRKVTVKQLKEDYFKKIECFDSVEISGVEDRFNASLGTYHDLLKIIKDKDFLDNEENEDILEDIVLTLTLFEDREMIEERLKTYAHLFDDKVMKQLKRRRYTGWGRLSRKLINGIRDKQSGKTILDFLKSDGFANRNFMQLIHDDSLTFKEDIQKAQVSGQGDSLHEHIANLAGSPAIKKGILQTVKVVDELVKVMGRHKPENIVIEMARENQTTQKGQKNSRERMKRIEEGIKELGSQILKEHPVENTQLQNEKLYLYYLQNGRDMYVDQELDINRLSDYDVDHIVPQSFLKDDSIDNKVLTRSDKARGKSDNVPSEEVVKKMKNYWRQLLNAKLITQRKFDNLTKAERGGLSELDKAGFIKRQLVETRQITKHVAQILDSRMNTKYDENDKLIREVKVITLKSKLVSDFRKDFQFYKVREINNYHHAHDAYLNAVVGTALIKKYPKLESEFVYGDYKVYDVRKMIAKSEQEIGKATAKYFFYSNIMNFFKTEITLANGEIRKRPLIETNGETGEIVWDKGRDFATVRKVLSMPQVNIVKKTEVQTGGFSKESILPKRNSDKLIARKKDWDPKKYGGFDSPTVAYSVLVVAKVEKGKSKKLKSVKELLGITIMERSSFEKNPIDFLEAKGYKEVKKDLIIKLPKYSLFELENGRKRMLASAGELQKGNELALPSKYVNFLYLASHYEKLKGSPEDNEQKQLFVEQHKHYLDEIIEQISEFSKRVILADANLDKVLSAYNKHRDKPIREQAENIIHLFTLTNLGAPAAFKYFDTTIDRKRYTSTKEVLDATLIHQSITGLYETRIDLSQLGGDGGPAPEAAAKGGGGGTLGIEDEYRLHETSTEPDVSLGSTWLSDFPQAWAETGGMGLAVRQAPLIIPLKATSTPVSIQQYPMSHEARLGIKPHIQRLLDQGILVPCQSPWNTPLLPVKKPGTNDYRPVQDLREVNKRVEDIHPTVPNPYNLLSGLPPSHQWYTVLDLKDAFFCLRLHPTSQPLFAFEWRDPGMGISGQLTWTRLPQGFKNSPTLFNEALHRDLADFRIQHPDLILLQYVDDILLAATSELDCQQGTRALLQTLGDLGYRASAKKAQICQKQVKYLGYLLREGQRWLTEARKETVMGQPVPKTPRQLREFLGTAGFCRLWIPGFAEMAAPLYPLTKPGTLFSWGPDQQKAYQEIKQALLTAPALGLPDLTKPFELFVDEKQGYAKGVLTQKLGPWRRPVAYLSKKLDPVAAGWPPCLRMVAAIAVLTKDAGKLTMGQPLVILAPHAVEALVKQPPDRWLSNARMTHYQAMLLDTDRVQFGPVVALNPATLLPLPEEGAPHDCLEILAETHGTRPDLTDQPIPDADHTWYTDGSSFLQEGQRKAGAAVTTETEVIWAGALPAGTSAQRAELIALTQALKMAEGKRLNVYTDSRYAFATAHIHGEIYRRRGWLTSEGREIKNKSEILALLKALFLPKRLSIIHCLGHQKGDSAEARGNRLADQAAREAAIKTPPDTSTLLAGKRTADGSEFEKRTADGSEFESPKKKAKVE

SEQ ID NO: 2198 - protein, 2090 aa, synthetic construct
MPAAKRVKLDGGDKKYSIGLDIGTNSVGWAVITDEYKVPSKKFKVLGNTDRHSIKKNLIGALLFDSGETAEATRLKRTARRRYTRRKNRICYLQEIFSNEMAKVDDSFFHRLEESFLVEEDKKHERHPIFGNIVDEVAYHEKYPTIYHLRKKLVDSTDKADLRLIYLALAHMIKFRGHFLIEGDLNPDNSDVDKLFIQLVQTYNQLFEENPINASGVDAKAILSARLSKSRRLENLIAQLPGEKKNGLFGNLIALSLGLTPNFKSNFDLAEDAKLQLSKDTYDDDLDNLLAQIGDQYADLFLAAKNLSDAILLSDILRVNTEITKAPLSASMIKRYDEHHQDLTLLKALVRQQLPEKYKEIFFDQSKNGYAGYIDGGASQEEFYKFIKPILEKMDGTEELLVKLNREDLLRKQRTFDNGSIPHQIHLGELHAILRRQEDFYPFLKDNREKIEKILTFRIPYYVGPLARGNSRFAWMTRKSEETITPWNFEEVVDKGASAQSFIERMTNFDKNLPNEKVLPKHSLLYEYFTVYNELTKVKYVTEGMRKPAFLSGEQKKAIVDLLFKTNRKVTVKQLKEDYFKKIECFDSVEISGVEDRFNASLGTYHDLLKIIKDKDFLDNEENEDILEDIVLTLTLFEDREMIEERLKTYAHLFDDKVMKQLKRRRYTGWGRLSRKLINGIRDKQSGKTILDFLKSDGFANRNFMQLIHDDSLTFKEDIQKAQVSGQGDSLHEHIANLAGSPAIKKGILQTVKVVDELVKVMGRHKPENIVIEMARENQTTQKGQKNSRERMKRIEEGIKELGSQILKEHPVENTQLQNEKLYLYYLQNGRDMYVDQELDINRLSDYDVDHIVPQSFLKDDSIDNKVLTRSDKARGKSDNVPSEEVVKKMKNYWRQLLNAKLITQRKFDNLTKAERGGLSELDKAGFIKRQLVETRQITKHVAQILDSRMNTKYDENDKLIREVKVITLKSKLVSDFRKDFQFYKVREINNYHHAHDAYLNAVVGTALIKKYPKLESEFVYGDYKVYDVRKMIAKSEQEIGKATAKYFFYSNIMNFFKTEITLANGEIRKRPLIETNGETGEIVWDKGRDFATVRKVLSMPQVNIVKKTEVQTGGFSKESILPKRNSDKLIARKKDWDPKKYGGFDSPTVAYSVLVVAKVEKGKSKKLKSVKELLGITIMERSSFEKNPIDFLEAKGYKEVKKDLIIKLPKYSLFELENGRKRMLASAGELQKGNELALPSKYVNFLYLASHYEKLKGSPEDNEQKQLFVEQHKHYLDEIIEQISEFSKRVILADANLDKVLSAYNKHRDKPIREQAENIIHLFTLTNLGAPAAFKYFDTTIDRKRYTSTKEVLDATLIHQSITGLYETRIDLSQLGGDGGEAAAKGGTLGIEDEYRLHETSTEPDVSLGSTWLSDFPQAWAETGGMGLAVRQAPLIIPLKATSTPVSIQQYPMSHEARLGIKPHIQRLLDQGILVPCQSPWNTPLLPVKKPGTNDYRPVQDLREVNKRVEDIHPTVPNPYNLLSGLPPSHQWYTVLDLKDAFFCLRLHPTSQPLFAFEWRDPGMGISGQLTWTRLPQGFKNSPTLFNEALHRDLADFRIQHPDLILLQYVDDILLAATSELDCQQGTRALLQTLGDLGYRASAKKAQICQKQVKYLGYLLREGQRWLTEARKETVMGQPVPKTPRQLREFLGTAGFCRLWIPGFAEMAAPLYPLTKPGTLFSWGPDQQKAYQEIKQALLTAPALGLPDLTKPFELFVDEKQGYAKGVLTQKLGPWRRPVAYLSKKLDPVAAGWPPCLRMVAAIAVLTKDAGKLTMGQPLVILAPHAVEALVKQPPDRWLSNARMTHYQAMLLDTDRVQFGPVVALNPATLLPLPEEGAPHDCLEILAETHGTRPDLTDQPIPDADHTWYTDGSSFLQEGQRKAGAAVTTETEVIWAGALPAGTSAQRAELIALTQALKMAEGKRLNVYTDSRYAFATAHIHGEIYRRRGWLTSEGREIKNKSEILALLKALFLPKRLSIIHCLGHQKGDSAEARGNRLADQAAREAAIKTPPDTSTLLAGKRTADGSEFEKRTADGSEFESPKKKAKVE

SEQ ID NO: 2199 - protein, 2096 aa, synthetic construct
MPAAKRVKLDGGDKKYSIGLDIGTNSVGWAVITDEYKVPSKKFKVLGNTDRHSIKKNLIGALLFDSGETAEATRLKRTARRRYTRRKNRICYLQEIFSNEMAKVDDSFFHRLEESFLVEEDKKHERHPIFGNIVDEVAYHEKYPTIYHLRKKLVDSTDKADLRLIYLALAHMIKFRGHFLIEGDLNPDNSDVDKLFIQLVQTYNQLFEENPINASGVDAKAILSARLSKSRRLENLIAQLPGEKKNGLFGNLIALSLGLTPNFKSNFDLAEDAKLQLSKDTYDDDLDNLLAQIGDQYADLFLAAKNLSDAILLSDILRVNTEITKAPLSASMIKRYDEHHQDLTLLKALVRQQLPEKYKEIFFDQSKNGYAGYIDGGASQEEFYKFIKPILEKMDGTEELLVKLNREDLLRKQRTFDNGSIPHQIHLGELHAILRRQEDFYPFLKDNREKIEKILTFRIPYYVGPLARGNSRFAWMTRKSEETITPWNFEEVVDKGASAQSFIERMTNFDKNLPNEKVLPKHSLLYEYFTVYNELTKVKYVTEGMRKPAFLSGEQKKAIVDLLFKTNRKVTVKQLKEDYFKKIECFDSVEISGVEDRFNASLGTYHDLLKIIKDKDFLDNEENEDILEDIVLTLTLFEDREMIEERLKTYAHLFDDKVMKQLKRRRYTGWGRLSRKLINGIRDKQSGKTILDFLKSDGFANRNFMQLIHDDSLTFKEDIQKAQVSGQGDSLHEHIANLAGSPAIKKGILQTVKVVDELVKVMGRHKPENIVIEMARENQTTQKGQKNSRERMKRIEEGIKELGSQILKEHPVENTQLQNEKLYLYYLQNGRDMYVDQELDINRLSDYDVDHIVPQSFLKDDSIDNKVLTRSDKARGKSDNVPSEEVVKKMKNYWRQLLNAKLITQRKFDNLTKAERGGLSELDKAGFIKRQLVETRQITKHVAQILDSRMNTKYDENDKLIREVKVITLKSKLVSDFRKDFQFYKVREINNYHHAHDAYLNAVVGTALIKKYPKLESEFVYGDYKVYDVRKMIAKSEQEIGKATAKYFFYSNIMNFFKTEITLANGEIRKRPLIETNGETGEIVWDKGRDFATVRKVLSMPQVNIVKKTEVQTGGFSKESILPKRNSDKLIARKKDWDPKKYGGFDSPTVAYSVLVVAKVEKGKSKKLKSVKELLGITIMERSSFEKNPIDFLEAKGYKEVKKDLIIKLPKYSLFELENGRKRMLASAGELQKGNELALPSKYVNFLYLASHYEKLKGSPEDNEQKQLFVEQHKHYLDEIIEQISEFSKRVILADANLDKVLSAYNKHRDKPIREQAENIIHLFTLTNLGAPAAFKYFDTTIDRKRYTSTKEVLDATLIHQSITGLYETRIDLSQLGGDGGGGSEAAAKGSSGGTLGIEDEYRLHETSTEPDVSLGSTWLSDFPQAWAETGGMGLAVRQAPLIIPLKATSTPVSIQQYPMSHEARLGIKPHIQRLLDQGILVPCQSPWNTPLLPVKKPGTNDYRPVQDLREVNKRVEDIHPTVPNPYNLLSGLPPSHQWYTVLDLKDAFFCLRLHPTSQPLFAFEWRDPGMGISGQLTWTRLPQGFKNSPTLFNEALHRDLADFRIQHPDLILLQYVDDILLAATSELDCQQGTRALLQTLGDLGYRASAKKAQICQKQVKYLGYLLREGQRWLTEARKETVMGQPVPKTPRQLREFLGTAGFCRLWIPGFAEMAAPLYPLTKPGTLFSWGPDQQKAYQEIKQALLTAPALGLPDLTKPFELFVDEKQGYAKGVLTQKLGPWRRPVAYLSKKLDPVAAGWPPCLRMVAAIAVLTKDAGKLTMGQPLVILAPHAVEALVKQPPDRWLSNARMTHYQAMLLDTDRVQFGPVVALNPATLLPLPEEGAPHDCLEILAETHGTRPDLTDQPIPDADHTWYTDGSSFLQEGQRKAGAAVTTETEVIWAGALPAGTSAQRAELIALTQALKMAEGKRLNVYTDSRYAFATAHIHGEIYRRRGWLTSEGREIKNKSEILALLKALFLPKRLSIIHCLGHQKGDSAEARGNRLADQAAREAAIKTPPDTSTLLAGKRTADGSEFEKRTADGSEFESPKKKAKVE

SEQ ID NO: 2200 - protein, 2096 aa, synthetic construct
MPAAKRVKLDGGDKKYSIGLDIGTNSVGWAVITDEYKVPSKKFKVLGNTDRHSIKKNLIGALLFDSGETAEATRLKRTARRRYTRRKNRICYLQEIFSNEMAKVDDSFFHRLEESFLVEEDKKHERHPIFGNIVDEVAYHEKYPTIYHLRKKLVDSTDKADLRLIYLALAHMIKFRGHFLIEGDLNPDNSDVDKLFIQLVQTYNQLFEENPINASGVDAKAILSARLSKSRRLENLIAQLPGEKKNGLFGNLIALSLGLTPNFKSNFDLAEDAKLQLSKDTYDDDLDNLLAQIGDQYADLFLAAKNLSDAILLSDILRVNTEITKAPLSASMIKRYDEHHQDLTLLKALVRQQLPEKYKEIFFDQSKNGYAGYIDGGASQEEFYKFIKPILEKMDGTEELLVKLNREDLLRKQRTFDNGSIPHQIHLGELHAILRRQEDFYPFLKDNREKIEKILTFRIPYYVGPLARGNSRFAWMTRKSEETITPWNFEEVVDKGASAQSFIERMTNFDKNLPNEKVLPKHSLLYEYFTVYNELTKVKYVTEGMRKPAFLSGEQKKAIVDLLFKTNRKVTVKQLKEDYFKKIECFDSVEISGVEDRFNASLGTYHDLLKIIKDKDFLDNEENEDILEDIVLTLTLFEDREMIEERLKTYAHLFDDKVMKQLKRRRYTGWGRLSRKLINGIRDKQSGKTILDFLKSDGFANRNFMQLIHDDSLTFKEDIQKAQVSGQGDSLHEHIANLAGSPAIKKGILQTVKVVDELVKVMGRHKPENIVIEMARENQTTQKGQKNSRERMKRIEEGIKELGSQILKEHPVENTQLQNEKLYLYYLQNGRDMYVDQELDINRLSDYDVDHIVPQSFLKDDSIDNKVLTRSDKARGKSDNVPSEEVVKKMKNYWRQLLNAKLITQRKFDNLTKAERGGLSELDKAGFIKRQLVETRQITKHVAQILDSRMNTKYDENDKLIREVKVITLKSKLVSDFRKDFQFYKVREINNYHHAHDAYLNAVVGTALIKKYPKLESEFVYGDYKVYDVRKMIAKSEQEIGKATAKYFFYSNIMNFFKTEITLANGEIRKRPLIETNGETGEIVWDKGRDFATVRKVLSMPQVNIVKKTEVQTGGFSKESILPKRNSDKLIARKKDWDPKKYGGFDSPTVAYSVLVVAKVEKGKSKKLKSVKELLGITIMERSSFEKNPIDFLEAKGYKEVKKDLIIKLPKYSLFELENGRKRMLASAGELQKGNELALPSKYVNFLYLASHYEKLKGSPEDNEQKQLFVEQHKHYLDEIIEQISEFSKRVILADANLDKVLSAYNKHRDKPIREQAENIIHLFTLTNLGAPAAFKYFDTTIDRKRYTSTKEVLDATLIHQSITGLYETRIDLSQLGGDGGEAAAKGGSGSSGGTLGIEDEYRLHETSTEPDVSLGSTWLSDFPQAWAETGGMGLAVRQAPLIIPLKATSTPVSIQQYPMSHEARLGIKPHIQRLLDQGILVPCQSPWNTPLLPVKKPGTNDYRPVQDLREVNKRVEDIHPTVPNPYNLLSGLPPSHQWYTVLDLKDAFFCLRLHPTSQPLFAFEWRDPGMGISGQLTWTRLPQGFKNSPTLFNEALHRDLADFRIQHPDLILLQYVDDILLAATSELDCQQGTRALLQTLGDLGYRASAKKAQICQKQVKYLGYLLREGQRWLTEARKETVMGQPVPKTPRQLREFLGTAGFCRLWIPGFAEMAAPLYPLTKPGTLFSWGPDQQKAYQEIKQALLTAPALGLPDLTKPFELFVDEKQGYAKGVLTQKLGPWRRPVAYLSKKLDPVAAGWPPCLRMVAAIAVLTKDAGKLTMGQPLVILAPHAVEALVKQPPDRWLSNARMTHYQAMLLDTDRVQFGPVVALNPATLLPLPEEGAPHDCLEILAETHGTRPDLTDQPIPDADHTWYTDGSSFLQEGQRKAGAAVTTETEVIWAGALPAGTSAQRAELIALTQALKMAEGKRLNVYTDSRYAFATAHIHGEIYRRRGWLTSEGREIKNKSEILALLKALFLPKRLSIIHCLGHQKGDSAEARGNRLADQAAREAAIKTPPDTSTLLAGKRTADGSEFEKRTADGSEFESPKKKAKVE

SEQ ID NO: 2201 - protein, 2096 aa, synthetic construct; identical to SEQ ID NO: 2071

SEQ ID NO: 2202 - protein, 2096 aa, synthetic construct; identical to SEQ ID NO: 2075

SEQ ID NO: 2203 - protein, 2091 aa, synthetic construct
MPAAKRVKLDGGDKKYSIGLDIGTNSVGWAVITDEYKVPSKKFKVLGNTDRHSIKKNLIGALLFDSGETAEATRLKRTARRRYTRRKNRICYLQEIFSNEMAKVDDSFFHRLEESFLVEEDKKHERHPIFGNIVDEVAYHEKYPTIYHLRKKLVDSTDKADLRLIYLALAHMIKFRGHFLIEGDLNPDNSDVDKLFIQLVQTYNQLFEENPINASGVDAKAILSARLSKSRRLENLIAQLPGEKKNGLFGNLIALSLGLTPNFKSNFDLAEDAKLQLSKDTYDDDLDNLLAQIGDQYADLFLAAKNLSDAILLSDILRVNTEITKAPLSASMIKRYDEHHQDLTLLKALVRQQLPEKYKEIFFDQSKNGYAGYIDGGASQEEFYKFIKPILEKMDGTEELLVKLNREDLLRKQRTFDNGSIPHQIHLGELHAILRRQEDFYPFLKDNREKIEKILTFRIPYYVGPLARGNSRFAWMTRKSEETITPWNFEEVVDKGASAQSFIERMTNFDKNLPNEKVLPKHSLLYEYFTVYNELTKVKYVTEGMRKPAFLSGEQKKAIVDLLFKTNRKVTVKQLKEDYFKKIECFDSVEISGVEDRFNASLGTYHDLLKIIKDKDFLDNEENEDILEDIVLTLTLFEDREMIEERLKTYAHLFDDKVMKQLKRRRYTGWGRLSRKLINGIRDKQSGKTILDFLKSDGFANRNFMQLIHDDSLTFKEDIQKAQVSGQGDSLHEHIANLAGSPAIKKGILQTVKVVDELVKVMGRHKPENIVIEMARENQTTQKGQKNSRERMKRIEEGIKELGSQILKEHPVENTQLQNEKLYLYYLQNGRDMYVDQELDINRLSDYDVDHIVPQSFLKDDSIDNKVLTRSDKARGKSDNVPSEEVVKKMKNYWRQLLNAKLITQRKFDNLTKAERGGLSELDKAGFIKRQLVETRQITKHVAQILDSRMNTKYDENDKLIREVKVITLKSKLVSDFRKDFQFYKVREINNYHHAHDAYLNAVVGTALIKKYPKLESEFVYGDYKVYDVRKMIAKSEQEIGKATAKYFFYSNIMNFFKTEITLANGEIRKRPLIETNGETGEIVWDKGRDFATVRKVLSMPQVNIVKKTEVQTGGFSKESILPKRNSDKLIARKKDWDPKKYGGFDSPTVAYSVLVVAKVEKGKSKKLKSVKELLGITIMERSSFEKNPIDFLEAKGYKEVKKDLIIKLPKYSLFELENGRKRMLASAGELQKGNELALPSKYVNFLYLASHYEKLKGSPEDNEQKQLFVEQHKHYLDEIIEQISEFSKRVILADANLDKVLSAYNKHRDKPIREQAENIIHLFTLTNLGAPAAFKYFDTTIDRKRYTSTKEVLDATLIHQSITGLYETRIDLSQLGGDGGGSSGGGGGTLGIEDEYRLHETSTEPDVSLGSTWLSDFPQAWAETGGMGLAVRQAPLIIPLKATSTPVSIQQYPMSHEARLGIKPHIQRLLDQGILVPCQSPWNTPLLPVKKPGTNDYRPVQDLREVNKRVEDIHPTVPNPYNLLSGLPPSHQWYTVLDLKDAFFCLRLHPTSQPLFAFEWRDPGMGISGQLTWTRLPQGFKNSPTLFNEALHRDLADFRIQHPDLILLQYVDDILLAATSELDCQQGTRALLQTLGDLGYRASAKKAQICQKQVKYLGYLLREGQRWLTEARKETVMGQPVPKTPRQLREFLGTAGFCRLWIPGFAEMAAPLYPLTKPGTLFSWGPDQQKAYQEIKQALLTAPALGLPDLTKPFELFVDEKQGYAKGVLTQKLGPWRRPVAYLSKKLDPVAAGWPPCLRMVAAIAVLTKDAGKLTMGQPLVILAPHAVEALVKQPPDRWLSNARMTHYQAMLLDTDRVQFGPVVALNPATLLPLPEEGAPHDCLEILAETHGTRPDLTDQPIPDADHTWYTDGSSFLQEGQRKAGAAVTTETEVIWAGALPAGTSAQRAELIALTQALKMAEGKRLNVYTDSRYAFATAHIHGEIYRRRGWLTSEGREIKNKSEILALLKALFLPKRLSIIHCLGHQKGDSAEARGNRLADQAAREAAIKTPPDTSTLLAGKRTADGSEFEKRTADGSEFESPKKKAKVE

SEQ ID NO: 2204 - protein, 2098 aa, synthetic construct
MPAAKRVKLDGGDKKYSIGLDIGTNSVGWAVITDEYKVPSKKFKVLGNTDRHSIKKNLIGALLFDSGETAEATRLKRTARRRYTRRKNRICYLQEIFSNEMAKVDDSFFHRLEESFLVEEDKKHERHPIFGNIVDEVAYHEKYPTIYHLRKKLVDSTDKADLRLIYLALAHMIKFRGHFLIEGDLNPDNSDVDKLFIQLVQTYNQLFEENPINASGVDAKAILSARLSKSRRLENLIAQLPGEKKNGLFGNLIALSLGLTPNFKSNFDLAEDAKLQLSKDTYDDDLDNLLAQIGDQYADLFLAAKNLSDAILLSDILRVNTEITKAPLSASMIKRYDEHHQDLTLLKALVRQQLPEKYKEIFFDQSKNGYAGYIDGGASQEEFYKFIKPILEKMDGTEELLVKLNREDLLRKQRTFDNGSIPHQIHLGELHAILRRQEDFYPFLKDNREKIEKILTFRIPYYVGPLARGNSRFAWMTRKSEETITPWNFEEVVDKGASAQSFIERMTNFDKNLPNEKVLPKHSLLYEYFTVYNELTKVKYVTEGMRKPAFLSGEQKKAIVDLLFKTNRKVTVKQLKEDYFKKIECFDSVEISGVEDRFNASLGTYHDLLKIIKDKDFLDNEENEDILEDIVLTLTLFEDREMIEERLKTYAHLFDDKVMKQLKRRRYTGWGRLSRKLINGIRDKQSGKTILDFLKSDGFANRNFMQLIHDDSLTFKEDIQKAQVSGQGDSLHEHIANLAGSPAIKKGILQTVKVVDELVKVMGRHKPENIVIEMARENQTTQKGQKNSRERMKRIEEGIKELGSQILKEHPVENTQLQNEKLYLYYLQNGRDMYVDQELDINRLSDYDVDHIVPQSFLKDDSIDNKVLTRSDKARGKSDNVPSEEVVKKMKNYWRQLLNAKLITQRKFDNLTKAERGGLSELDKAGFIKRQLVETRQITKHVAQILDSRMNTKYDENDKLIREVKVITLKSKLVSDFRKDFQFYKVREINNYHHAHDAYLNAVVGTALIKKYPKLESEFVYGDYKVYDVRKMIAKSEQEIGKATAKYFFYSNIMNFFKTEITLANGEIRKRPLIETNGETGEIVWDKGRDFATVRKVLSMPQVNIVKKTEVQTGGFSKESILPKRNSDKLIARKKDWDPKKYGGFDSPTVAYSVLVVAKVEKGKSKKLKSVKELLGITIMERSSFEKNPIDFLEAKGYKEVKKDLIIKLPKYSLFELENGRKRMLASAGELQKGNELALPSKYVNFLYLASHYEKLKGSPEDNEQKQLFVEQHKHYLDEIIEQISEFSKRVILADANLDKVLSAYNKHRDKPIREQAENIIHLFTLTNLGAPAAFKYFDTTIDRKRYTSTKEVLDATLIHQSITGLYETRIDLSQLGGDGGPAPAPAPAPAPAPGGTLGIEDEYRLHETSTEPDVSLGSTWLSDFPQAWAETGGMGLAVRQAPLIIPLKATSTPVSIQQYPMSHEARLGIKPHIQRLLDQGILVPCQSPWNTPLLPVKKPGTNDYRPVQDLREVNKRVEDIHPTVPNPYNLLSGLPPSHQWYTVLDLKDAFFCLRLHPTSQPLFAFEWRDPGMGISGQLTWTRLPQGFKNSPTLFNEALHRDLADFRIQHPDLILLQYVDDILLAATSELDCQQGTRALLQTLGDLGYRASAKKAQICQKQVKYLGYLLREGQRWLTEARKETVMGQPVPKTPRQLREFLGTAGFCRLWIPGFAEMAAPLYPLTKPGTLFSWGPDQQKAYQEIKQALLTAPALGLPDLTKPFELFVDEKQGYAKGVLTQKLGPWRRPVAYLSKKLDPVAAGWPPCLRMVAAIAVLTKDAGKLTMGQPLVILAPHAVEALVKQPPDRWLSNARMTHYQAMLLDTDRVQFGPVVALNPATLLPLPEEGAPHDCLEILAETHGTRPDLTDQPIPDADHTWYTDGSSFLQEGQRKAGAAVTTETEVIWAGALPAGTSAQRAELIALTQALKMAEGKRLNVYTDSRYAFATAHIHGEIYRRRGWLTSEGREIKNKSEILALLKALFLPKRLSIIHCLGHQKGDSAEARGNRLADQAAREAAIKTPPDTSTLLAGKRTADGSEFEKRTADGSEFESPKKKAKVE

SEQ ID NO: 2205 - protein, 2094 aa, synthetic construct
MPAAKRVKLDGGDKKYSIGLDIGTNSVGWAVITDEYKVPSKKFKVLGNTDRHSIKKNLIGALLFDSGETAEATRLKRTARRRYTRRKNRICYLQEIFSNEMAKVDDSFFHRLEESFLVEEDKKHERHPIFGNIVDEVAYHEKYPTIYHLRKKLVDSTDKADLRLIYLALAHMIKFRGHFLIEGDLNPDNSDVDKLFIQLVQTYNQLFEENPINASGVDAKAILSARLSKSRRLENLIAQLPGEKKNGLFGNLIALSLGLTPNFKSNFDLAEDAKLQLSKDTYDDDLDNLLAQIGDQYADLFLAAKNLSDAILLSDILRVNTEITKAPLSASMIKRYDEHHQDLTLLKALVRQQLPEKYKEIFFDQSKNGYAGYIDGGASQEEFYKFIKPILEKMDGTEELLVKLNREDLLRKQRTFDNGSIPHQIHLGELHAILRRQEDFYPFLKDNREKIEKILTFRIPYYVGPLARGNSRFAWMTRKSEETITPWNFEEVVDKGASAQSFIERMTNFDKNLPNEKVLPKHSLLYEYFTVYNELTKVKYVTEGMRKPAFLSGEQKKAIVDLLFKTNRKVTVKQLKEDYFKKIECFDSVEISGVEDRFNASLGTYHDLLKIIKDKDFLDNEENEDILEDIVLTLTLFEDREMIEERLKTYAHLFDDKVMKQLKRRRYTGWGRLSRKLINGIRDKQSGKTILDFLKSDGFANRNFMQLIHDDSLTFKEDIQKAQVSGQGDSLHEHIANLAGSPAIKKGILQTVKVVDELVKVMGRHKPENIVIEMARENQTTQKGQKNSRERMKRIEEGIKELGSQILKEHPVENTQLQNEKLYLYYLQNGRDMYVDQELDINRLSDYDVDHIVPQSFLKDDSIDNKVLTRSDKARGKSDNVPSEEVVKKMKNYWRQLLNAKLITQRKFDNLTKAERGGLSELDKAGFIKRQLVETRQITKHVAQILDSRMNTKYDENDKLIREVKVITLKSKLVSDFRKDFQFYKVREINNYHHAHDAYLNAVVGTALIKKYPKLESEFVYGDYKVYDVRKMIAKSEQEIGKATAKYFFYSNIMNFFKTEITLANGEIRKRPLIETNGETGEIVWDKGRDFATVRKVLSMPQVNIVKKTEVQTGGFSKESILPKRNSDKLIARKKDWDPKKYGGFDSPTVAYSVLVVAKVEKGKSKKLKSVKELLGITIMERSSFEKNPIDFLEAKGYKEVKKDLIIKLPKYSLFELENGRKRMLASAGELQKGNELALPSKYVNFLYLASHYEKLKGSPEDNEQKQLFVEQHKHYLDEIIEQISEFSKRVILADANLDKVLSAYNKHRDKPIREQAENIIHLFTLTNLGAPAAFKYFDTTIDRKRYTSTKEVLDATLIHQSITGLYETRIDLSQLGGDGGGGSGSSGGGGGTLGIEDEYRLHETSTEPDVSLGSTWLSDFPQAWAETGGMGLAVRQAPLIIPLKATSTPVSIQQYPMSHEARLGIKPHIQRLLDQGILVPCQSPWNTPLLPVKKPGTNDYRPVQDLREVNKRVEDIHPTVPNPYNLLSGLPPSHQWYTVLDLKDAFFCLRLHPTSQPLFAFEWRDPGMGISGQLTWTRLPQGFKNSPTLFNEALHRDLADFRIQHPDLILLQYVDDILLAATSELDCQQGTRALLQTLGDLGYRASAKKAQICQKQVKYLGYLLREGQRWLTEARKETVMGQPVPKTPRQLREFLGTAGFCRLWIPGFAEMAAPLYPLTKPGTLFSWGPDQQKAYQEIKQALLTAPALGLPDLTKPFELFVDEKQGYAKGVLTQKLGPWRRPVAYLSKKLDPVAAGWPPCLRMVAAIAVLTKDAGKLTMGQPLVILAPHAVEALVKQPPDRWLSNARMTHYQAMLLDTDRVQFGPVVALNPATLLPLPEEGAPHDCLEILAETHGTRPDLTDQPIPDADHTWYTDGSSFLQEGQRKAGAAVTTETEVIWAGALPAGTSAQRAELIALTQALKMAEGKRLNVYTDSRYAFATAHIHGEIYRRRGWLTSEGREIKNKSEILALLKALFLPKRLSIIHCLGHQKGDSAEARGNRLADQAAREAAIKTPPDTSTLLAGKRTADGSEFEKRTADGSEFESPKKKAKVE

SEQ ID NO: 2206 - protein, 2093 aa, synthetic construct
MPAAKRVKLDGGDKKYSIGLDIGTNSVGWAVITDEYKVPSKKFKVLGNTDRHSIKKNLIGALLFDSGETAEATRLKRTARRRYTRRKNRICYLQEIFSNEMAKVDDSFFHRLEESFLVEEDKKHERHPIFGNIVDEVAYHEKYPTIYHLRKKLVDSTDKADLRLIYLALAHMIKFRGHFLIEGDLNPDNSDVDKLFIQLVQTYNQLFEENPINASGVDAKAILSARLSKSRRLENLIAQLPGEKKNGLFGNLIALSLGLTPNFKSNFDLAEDAKLQLSKDTYDDDLDNLLAQIGDQYADLFLAAKNLSDAILLSDILRVNTEITKAPLSASMIKRYDEHHQDLTLLKALVRQQLPEKYKEIFFDQSKNGYAGYIDGGASQEEFYKFIKPILEKMDGTEELLVKLNREDLLRKQRTFDNGSIPHQIHLGELHAILRRQEDFYPFLKDNREKIEKILTFRIPYYVGPLARGNSRFAWMTRKSEETITPWNFEEVVDKGASAQSFIERMTNFDKNLPNEKVLPKHSLLYEYFTVYNELTKVKYVTEGMRKPAFLSGEQKKAIVDLLFKTNRKVTVKQLKEDYFKKIECFDSVEISGVEDRFNASLGTYHDLLKIIKDKDFLDNEENEDILEDIVLTLTLFEDREMIEERLKTYAHLFDDKVMKQLKRRRYTGWGRLSRKLINGIRDKQSGKTILDFLKSDGFANRNFMQLIHDDSLTFKEDIQKAQVSGQGDSLHEHIANLAGSPAIKKGILQTVKVVDELVKVMGRHKPENIVIEMARENQTTQKGQKNSRERMKRIEEGIKELGSQILKEHPVENTQLQNEKLYLYYLQNGRDMYVDQELDINRLSDYDVDHIVPQSFLKDDSIDNKVLTRSDKARGKSDNVPSEEVVKKMKNYWRQLLNAKLITQRKFDNLTKAERGGLSELDKAGFIKRQLVETRQITKHVAQILDSRMNTKYDENDKLIREVKVITLKSKLVSDFRKDFQFYKVREINNYHHAHDAYLNAVVGTALIKKYPKLESEFVYGDYKVYDVRKMIAKSEQEIGKATAKYFFYSNIMNFFKTEITLANGEIRKRPLIETNGETGEIVWDKGRDFATVRKVLSMPQVNIVKKTEVQTGGFSKESILPKRNSDKLIARKKDWDPKKYGGFDSPTVAYSVLVVAKVEKGKSKKLKSVKELLGITIMERSSFEKNPIDFLEAKGYKEVKKDLIIKLPKYSLFELENGRKRMLASAGELQKGNELALPSKYVNFLYLASHYEKLKGSPEDNEQKQLFVEQHKHYLDEIIEQISEFSKRVILADANLDKVLSAYNKHRDKPIREQAENIIHLFTLTNLGAPAAFKYFDTTIDRKRYTSTKEVLDATLIHQSITGLYETRIDLSQLGGDGGPAPEAAAKGGTLGIEDEYRLHETSTEPDVSLGSTWLSDFPQAWAETGGMGLAVRQAPLIIPLKATSTPVSIQQYPMSHEARLGIKPHIQRLLDQGILVPCQSPWNTPLLPVKKPGTNDYRPVQDLREVNKRVEDIHPTVPNPYNLLSGLPPSHQWYTVLDLKDAFFCLRLHPTSQPLFAFEWRDPGMGISGQLTWTRLPQGFKNSPTLFNEALHRDLADFRIQHPDLILLQYVDDILLAATSELDCQQGTRALLQTLGDLGYRASAKKAQICQKQVKYLGYLLREGQRWLTEARKETVMGQPVPKTPRQLREFLGTAGFCRLWIPGFAEMAAPLYPLTKPGTLFSWGPDQQKAYQEIKQALLTAPALGLPDLTKPFELFVDEKQGYAKGVLTQKLGPWRRPVAYLSKKLDPVAAGWPPCLRMVAAIAVLTKDAGKLTMGQPLVILAPHAVEALVKQPPDRWLSNARMTHYQAMLLDTDRVQFGPVVALNPATLLPLPEEGAPHDCLEILAETHGTRPDLTDQPIPDADHTWYTDGSSFLQEGQRKAGAAVTTETEVIWAGALPAGTSAQRAELIALTQALKMAEGKRLNVYTDSRYAFATAHIHGEIYRRRGWLTSEGREIKNKSEILALLKALFLPKRLSIIHCLGHQKGDSAEARGNRLADQAAREAAIKTPPDTSTLLAGKRTADGSEFEKRTADGSEFESPKKKAKVE

SEQ ID NO: 2207 - protein, 2096 aa, synthetic construct; identical to SEQ ID NO: 2074

SEQ ID NO: 2208 - protein, 2093 aa, synthetic construct
MPAAKRVKLDGGDKKYSIGLDIGTNSVGWAVITDEYKVPSKKFKVLGNTDRHSIKKNLIGALLFDSGETAEATRLKRTARRRYTRRKNRICYLQEIFSNEMAKVDDSFFHRLEESFLVEEDKKHERHPIFGNIVDEVAYHEKYPTIYHLRKKLVDSTDKADLRLIYLALAHMIKFRGHFLIEGDLNPDNSDVDKLFIQLVQTYNQLFEENPINASGVDAKAILSARLSKSRRLENLIAQLPGEKKNGLFGNLIALSLGLTPNFKSNFDLAEDAKLQLSKDTYDDDLDNLLAQIGDQYADLFLAAKNLSDAILLSDILRVNTEITKAPLSASMIKRYDEHHQDLTLLKALVRQQLPEKYKEIFFDQSKNGYAGYIDGGASQEEFYKFIKPILEKMDGTEELLVKLNREDLLRKQRTFDNGSIPHQIHLGELHAILRRQEDFYPFLKDNREKIEKILTFRIPYYVGPLARGNSRFAWMTRKSEETITPWNFEEVVDKGASAQSFIERMTNFDKNLPNEKVLPKHSLLYEYFTVYNELTKVKYVTEGMRKPAFLSGEQKKAIVDLLFKTNRKVTVKQLKEDYFKKIECFDSVEISGVEDRFNASLGTYHDLLKIIKDKDFLDNEENEDILEDIVLTLTLFEDREMIEERLKTYAHLFDDKVMKQLKRRRYTGWGRLSRKLINGIRDKQSGKTILDFLKSDGFANRNFMQLIHDDSLTFKEDIQKAQVSGQGDSLHEHIANLAGSPAIKKGILQTVKVVDELVKVMGRHKPENIVIEMARENQTTQKGQKNSRERMKRIEEGIKELGSQILKEHPVENTQLQNEKLYLYYLQNGRDMYVDQELDINRLSDYDVDHIVPQSFLKDDSIDNKVLTRSDKARGKSDNVPSEEVVKKMKNYWRQLLNAKLITQRKFDNLTKAERGGLSELDKAGFIKRQLVETRQITKHVAQILDSRMNTKYDENDKLIREVKVITLKSKLVSDFRKDFQFYKVREINNYHHAHDAYLNAVVGTALIKKYPKLESEFVYGDYKVYDVRKMIAKSEQEIGKATAKYFFYSNIMNFFKTEITLANGEIRKRPLIETNGETGEIVWDKGRDFATVRKVLSMPQVNIVKKTEVQTGGFSKESILPKRNSDKLIARKKDWDPKKYGGFDSPTVAYSVLVVAKVEKGKSKKLKSVKELLGITIMERSSFEKNPIDFLEAKGYKEVKKDLIIKLPKYSLFELENGRKRMLASAGELQKGNELALPSKYVNFLYLASHYEKLKGSPEDNEQKQLFVEQHKHYLDEIIEQISEFSKRVILADANLDKVLSAYNKHRDKPIREQAENIIHLFTLTNLGAPAAFKYFDTTIDRKRYTSTKEVLDATLIHQSITGLYETRIDLSQLGGDGGGGGEAAAKGGTLGIEDEYRLHETSTEPDVSLGSTWLSDFPQAWAETGGMGLAVRQAPLIIPLKATSTPVSIQQYPMSHEARLGIKPHIQRLLDQGILVPCQSPWNTPLLPVKKPGTNDYRPVQDLREVNKRVEDIHPTVPNPYNLLSGLPPSHQWYTVLDLKDAFFCLRLHPTSQPLFAFEWRDPGMGISGQLTWTRLPQGFKNSPTLFNEALHRDLADFRIQHPDLILLQYVDDILLAATSELDCQQGTRALLQTLGDLGYRASAKKAQICQKQVKYLGYLLREGQRWLTEARKETVMGQPVPKTPRQLREFLGTAGFCRLWIPGFAEMAAPLYPLTKPGTLFSWGPDQQKAYQEIKQALLTAPALGLPDLTKPFELFVDEKQGYAKGVLTQKLGPWRRPVAYLSKKLDPVAAGWPPCLRMVAAIAVLTKDAGKLTMGQPLVILAPHAVEALVKQPPDRWLSNARMTHYQAMLLDTDRVQFGPVVALNPATLLPLPEEGAPHDCLEILAETHGTRPDLTDQPIPDADHTWYTDGSSFLQEGQRKAGAAVTTETEVIWAGALPAGTSAQRAELIALTQALKMAEGKRLNVYTDSRYAFATAHIHGEIYRRRGWLTSEGREIKNKSEILALLKALFLPKRLSIIHCLGHQKGDSAEARGNRLADQAAREAAIKTPPDTSTLLAGKRTADGSEFEKRTADGSEFESPKKKAKVE

SEQ ID NO: 2209 - protein, 2096 aa, synthetic construct
MPAAKRVKLDGGDKKYSIGLDIGTNSVGWAVITDEYKVPSKKFKVLGNTDRHSIKKNLIGALLFDSGETAEATRLKRTARRRYTRRKNRICYLQEIFSNEMAKVDDSFFHRLEESFLVEEDKKHERHPIFGNIVDEVAYHEKYPTIYHLRKKLVDSTDKADLRLIYLALAHMIKFRGHFLIEGDLNPDNSDVDKLFIQLVQTYNQLFEENPINASGVDAKAILSARLSKSRRLENLIAQLPGEKKNGLFGNLIALSLGLTPNFKSNFDLAEDAKLQLSKDTYDDDLDNLLAQIGDQYADLFLAAKNLSDAILLSDILRVNTEITKAPLSASMIKRYDEHHQDLTLLKALVRQQLPEKYKEIFFDQSKNGYAGYIDGGASQEEFYKFIKPILEKMDGTEELLVKLNREDLLRKQRTFDNGSIPHQIHLGELHAILRRQEDFYPFLKDNREKIEKILTFRIPYYVGPLARGNSRFAWMTRKSEETITPWNFEEVVDKGASAQSFIERMTNFDKNLPNEKVLPKHSLLYEYFTVYNELTKVKYVTEGMRKPAFLSGEQKKAIVDLLFKTNRKVTVKQLKEDYFKKIECFDSVEISGVEDRFNASLGTYHDLLKIIKDKDFLDNEENEDILEDIVLTLTLFEDREMIEERLKTYAHLFDDKVMKQLKRRRYTGWGRLSRKLINGIRDKQSGKTILDFLKSDGFANRNFMQLIHDDSLTFKEDIQKAQVSGQGDSLHEHIANLAGSPAIKKGILQTVKVVDELVKVMGRHKPENIVIEMARENQTTQKGQKNSRERMKRIEEGIKELGSQILKEHPVENTQLQNEKLYLYYLQNGRDMYVDQELDINRLSDYDVDHIVPQSFLKDDSIDNKVLTRSDKARGKSDNVPSEEVVKKMKNYWRQLLNAKLITQRKFDNLTKAERGGLSELDKAGFIKRQLVETRQITKHVAQILDSRMNTKYDENDKLIREVKVITLKSKLVSDFRKDFQFYKVREINNYHHAHDAYLNAVVGTALIKKYPKLESEFVYGDYKVYDVRKMIAKSEQEIGKATAKYFFYSNIMNFFKTEITLANGEIRKRPLIETNGETGEIVWDKGRDFATVRKVLSMPQVNIVKKTEVQTGGFSKESILPKRNSDKLIARKKDWDPKKYGGFDSPTVAYSVLVVAKVEKGKSKKLKSVKELLGITIMERSSFEKNPIDFLEAKGYKEVKKDLIIKLPKYSLFELENGRKRMLASAGELQKGNELALPSKYVNFLYLASHYEKLKGSPEDNEQKQLFVEQHKHYLDEIIEQISEFSKRVILADANLDKVLSAYNKHRDKPIREQAENIIHLFTLTNLGAPAAFKYFDTTIDRKRYTSTKEVLDATLIHQSITGLYETRIDLSQLGGDGGEAAAKGGGGGSGGTLGIEDEYRLHETSTEPDVSLGSTWLSDFPQAWAETGGMGLAVRQAPLIIPLKATSTPVSIQQYPMSHEARLGIKPHIQRLLDQGILVPCQSPWNTPLLPVKKPGTNDYRPVQDLREVNKRVEDIHPTVPNPYNLLSGLPPSHQWYTVLDLKDAFFCLRLHPTSQPLFAFEWRDPGMGISGQLTWTRLPQGFKNSPTLFNEALHRDLADFRIQHPDLILLQYVDDILLAATSELDCQQGTRALLQTLGDLGYRASAKKAQICQKQVKYLGYLLREGQRWLTEARKETVMGQPVPKTPRQLREFLGTAGFCRLWIPGFAEMAAPLYPLTKPGTLFSWGPDQQKAYQEIKQALLTAPALGLPDLTKPFELFVDEKQGYAKGVLTQKLGPWRRPVAYLSKKLDPVAAGWPPCLRMVAAIAVLTKDAGKLTMGQPLVILAPHAVEALVKQPPDRWLSNARMTHYQAMLLDTDRVQFGPVVALNPATLLPLPEEGAPHDCLEILAETHGTRPDLTDQPIPDADHTWYTDGSSFLQEGQRKAGAAVTTETEVIWAGALPAGTSAQRAELIALTQALKMAEGKRLNVYTDSRYAFATAHIHGEIYRRRGWLTSEGREIKNKSEILALLKALFLPKRLSIIHCLGHQKGDSAEARGNRLADQAAREAAIKTPPDTSTLLAGKRTADGSEFEKRTADGSEFESPKKKAKVE

SEQ ID NO: 2210 - protein, 2110 aa, synthetic construct
MPAAKRVKLDGGDKKYSIGLDIGTNSVGWAVITDEYKVPSKKFKVLGNTDRHSIKKNLIGALLFDSGETAEATRLKRTARRRYTRRKNRICYLQEIFSNEMAKVDDSFFHRLEESFLVEEDKKHERHPIFGNIVDEVAYHEKYPTIYHLRKKLVDSTDKADLRLIYLALAHMIKFRGHFLIEGDLNPDNSDVDKLFIQLVQTYNQLFEENPINASGVDAKAILSARLSKSRRLENLIAQLPGEKKNGLFGNLIALSLGLTPNFKSNFDLAEDAKLQLSKDTYDDDLDNLLAQIGDQYADLFLAAKNLSDAILLSDILRVNTEITKAPLSASMIKRYDEHHQDLTLLKALVRQQLPEKYKEIFFDQSKNGYAGYIDGGASQEEFYKFIKPILEKMDGTEELLVKLNREDLLRKQRTFDNGSIPHQIHLGELHAILRRQEDFYPFLKDNREKIEKILTFRIPYYVGPLARGNSRFAWMTRKSEETITPWNFEEVVDKGASAQSFIERMTNFDKNLPNEKVLPKHSLLYEYFTVYNELTKVKYVTEGMRKPAFLSGEQKKAIVDLLFKTNRKVTVKQLKEDYFKKIECFDSVEISGVEDRFNASLGTYHDLLKIIKDKDFLDNEENEDILEDIVLTLTLFEDREMIEERLKTYAHLFDDKVMKQLKRRRYTGWGRLSRKLINGIRDKQSGKTILDFLKSDGFANRNFMQLIHDDSLTFKEDIQKAQVSGQGDSLHEHIANLAGSPAIKKGILQTVKVVDELVKVMGRHKPENIVIEMARENQTTQKGQKNSRERMKRIEEGIKELGSQILKEHPVENTQLQNEKLYLYYLQNGRDMYVDQELDINRLSDYDVDHIVPQSFLKDDSIDNKVLTRSDKARGKSDNVPSEEVVKKMKNYWRQLLNAKLITQRKFDNLTKAERGGLSELDKAGFIKRQLVETRQITKHVAQILDSRMNTKYDENDKLIREVKVITLKSKLVSDFRKDFQFYKVREINNYHHAHDAYLNAVVGTALIKKYPKLESEFVYGDYKVYDVRKMIAKSEQEIGKATAKYFFYSNIMNFFKTEITLANGEIRKRPLIETNGETGEIVWDKGRDFATVRKVLSMPQVNIVKKTEVQTGGFSKESILPKRNSDKLIARKKDWDPKKYGGFDSPTVAYSVLVVAKVEKGKSKKLKSVKELLGITIMERSSFEKNPIDFLEAKGYKEVKKDLIIKLPKYSLFELENGRKRMLASAGELQKGNELALPSKYVNFLYLASHYEKLKGSPEDNEQKQLFVEQHKHYLDEIIEQISEFSKRVILADANLDKVLSAYNKHRDKPIREQAENIIHLFTLTNLGAPAAFKYFDTTIDRKRYTSTKEVLDATLIHQSITGLYETRIDLSQLGGDGGGGGGSGGGGSGGGGSGGGGSGGGGSGGTLGIEDEYRLHETSTEPDVSLGSTWLSDFPQAWAETGGMGLAVRQAPLIIPLKATSTPVSIQQYPMSHEARLGIKPHIQRLLDQGILVPCQSPWNTPLLPVKKPGTNDYRPVQDLREVNKRVEDIHPTVPNPYNLLSGLPPSHQWYTVLDLKDAFFCLRLHPTSQPLFAFEWRDPGMGISGQLTWTRLPQGFKNSPTLFNEALHRDLADFRIQHPDLILLQYVDDILLAATSELDCQQGTRALLQTLGDLGYRASAKKAQICQKQVKYLGYLLREGQRWLTEARKETVMGQPVPKTPRQLREFLGTAGFCRLWIPGFAEMAAPLYPLTKPGTLFSWGPDQQKAYQEIKQALLTAPALGLPDLTKPFELFVDEKQGYAKGVLTQKLGPWRRPVAYLSKKLDPVAAGWPPCLRMVAAIAVLTKDAGKLTMGQPLVILAPHAVEALVKQPPDRWLSNARMTHYQAMLLDTDRVQFGPVVALNPATLLPLPEEGAPHDCLEILAETHGTRPDLTDQPIPDADHTWYTDGSSFLQEGQRKAGAAVTTETEVIWAGALPAGTSAQRAELIALTQALKMAEGKRLNVYTDSRYAFATAHIHGEIYRRRGWLTSEGREIKNKSEILALLKALFLPKRLSIIHCLGHQKGDSAEARGNRLADQAAREAAIKTPPDTSTLLAGKRTADGSEFEKRTADGSEFESPKKKAKVE

SEQ ID NO: 2211 - protein, 2096 aa, synthetic construct
MPAAKRVKLDGGDKKYSIGLDIGTNSVGWAVITDEYKVPSKKFKVLGNTDRHSIKKNLIGALLFDSGETAEATRLKRTARRRYTRRKNRICYLQEIFSNEMAKVDDSFFHRLEESFLVEEDKKHERHPIFGNIVDEVAYHEKYPTIYHLRKKLVDSTDKADLRLIYLALAHMIKFRGHFLIEGDLNPDNSDVDKLFIQLVQTYNQLFEENPINASGVDAKAILSARLSKSRRLENLIAQLPGEKKNGLFGNLIALSLGLTPNFKSNFDLAEDAKLQLSKDTYDDDLDNLLAQIGDQYADLFLAAKNLSDAILLSDILRVNTEITKAPLSASMIKRYDEHHQDLTLLKALVRQQLPEKYKEIFFDQSKNGYAGYIDGGASQEEFYKFIKPILEKMDGTEELLVKLNREDLLRKQRTFDNGSIPHQIHLGELHAILRRQEDFYPFLKDNREKIEKILTFRIPYYVGPLARGNSRFAWMTRKSEETITPWNFEEVVDKGASAQSFIERMTNFDKNLPNEKVLPKHSLLYEYFTVYNELTKVKYVTEGMRKPAFLSGEQKKAIVDLLFKTNRKVTVKQLKEDYFKKIECFDSVEISGVEDRFNASLGTYHDLLKIIKDKDFLDNEENEDILEDIVLTLTLFEDREMIEERLKTYAHLFDDKVMKQLKRRRYTGWGRLSRKLINGIRDKQSGKTILDFLKSDGFANRNFMQLIHDDSLTFKEDIQKAQVSGQGDSLHEHIANLAGSPAIKKGILQTVKVVDELVKVMGRHKPENIVIEMARENQTTQKGQKNSRERMKRIEEGIKELGSQILKEHPVENTQLQNEKLYLYYLQNGRDMYVDQELDINRLSDYDVDHIVPQSFLKDDSIDNKVLTRSDKARGKSDNVPSEEVVKKMKNYWRQLLNAKLITQRKFDNLTKAERGGLSELDKAGFIKRQLVETRQITKHVAQILDSRMNTKYDENDKLIREVKVITLKSKLVSDFRKDFQFYKVREINNYHHAHDAYLNAVVGTALIKKYPKLESEFVYGDYKVYDVRKMIAKSEQEIGKATAKYFFYSNIMNFFKTEITLANGEIRKRPLIETNGETGEIVWDKGRDFATVRKVLSMPQVNIVKKTEVQTGGFSKESILPKRNSDKLIARKKDWDPKKYGGFDSPTVAYSVLVVAKVEKGKSKKLKSVKELLGITIMERSSFEKNPIDFLEAKGYKEVKKDLIIKLPKYSLFELENGRKRMLASAGELQKGNELALPSKYVNFLYLASHYEKLKGSPEDNEQKQLFVEQHKHYLDEIIEQISEFSKRVILADANLDKVLSAYNKHRDKPIREQAENIIHLFTLTNLGAPAAFKYFDTTIDRKRYTSTKEVLDATLIHQSITGLYETRIDLSQLGGDGGEAAAKGSSPAPGGTLGIEDEYRLHETSTEPDVSLGSTWLSDFPQAWAETGGMGLAVRQAPLIIPLKATSTPVSIQQYPMSHEARLGIKPHIQRLLDQGILVPCQSPWNTPLLPVKKPGTNDYRPVQDLREVNKRVEDIHPTVPNPYNLLSGLPPSHQWYTVLDLKDAFFCLRLHPTSQPLFAFEWRDPGMGISGQLTWTRLPQGFKNSPTLFNEALHRDLADFRIQHPDLILLQYVDDILLAATSELDCQQGTRALLQTLGDLGYRASAKKAQICQKQVKYLGYLLREGQRWLTEARKETVMGQPVPKTPRQLREFLGTAGFCRLWIPGFAEMAAPLYPLTKPGTLFSWGPDQQKAYQEIKQALLTAPALGLPDLTKPFELFVDEKQGYAKGVLTQKLGPWRRPVAYLSKKLDPVAAGWPPCLRMVAAIAVLTKDAGKLTMGQPLVILAPHAVEALVKQPPDRWLSNARMTHYQAMLLDTDRVQFGPVVALNPATLLPLPEEGAPHDCLEILAETHGTRPDLTDQPIPDADHTWYTDGSSFLQEGQRKAGAAVTTETEVIWAGALPAGTSAQRAELIALTQALKMAEGKRLNVYTDSRYAFATAHIHGEIYRRRGWLTSEGREIKNKSEILALLKALFLPKRLSIIHCLGHQKGDSAEARGNRLADQAAREAAIKTPPDTSTLLAGKRTADGSEFEKRTADGSEFESPKKKAKVE

SEQ ID NO: 2212 - protein, 2094 aa, synthetic construct; identical to SEQ ID NO: 2079

SEQ ID NO: 2213 - protein, 2096 aa, synthetic construct
MPAAKRVKLDGGDKKYSIGLDIGTNSVGWAVITDEYKVPSKKFKVLGNTDRHSIKKNLIGALLFDSGETAEATRLKRTARRRYTRRKNRICYLQEIFSNEMAKVDDSFFHRLEESFLVEEDKKHERHPIFGNIVDEVAYHEKYPTIYHLRKKLVDSTDKADLRLIYLALAHMIKFRGHFLIEGDLNPDNSDVDKLFIQLVQTYNQLFEENPINASGVDAKAILSARLSKSRRLENLIAQLPGEKKNGLFGNLIALSLGLTPNFKSNFDLAEDAKLQLSKDTYDDDLDNLLAQIGDQYADLFLAAKNLSDAILLSDILRVNTEITKAPLSASMIKRYDEHHQDLTLLKALVRQQLPEKYKEIFFDQSKNGYAGYIDGGASQEEFYKFIKPILEKMDGTEELLVKLNREDLLRKQRTFDNGSIPHQIHLGELHAILRRQEDFYPFLKDNREKIEKILTFRIPYYVGPLARGNSRFAWMTRKSEETITPWNFEEVVDKGASAQSFIERMTNFDKNLPNEKVLPKHSLLYEYFTVYNELTKVKYVTEGMRKPAFLSGEQKKAIVDLLFKTNRKVTVKQLKEDYFKKIECFDSVEISGVEDRFNASLGTYHDLLKIIKDKDFLDNEENEDILEDIVLTLTLFEDREMIEERLKTYAHLFDDKVMKQLKRRRYTGWGRLSRKLINGIRDKQSGKTILDFLKSDGFANRNFMQLIHDDSLTFKEDIQKAQVSGQGDSLHEHIANLAGSPAIKKGILQTVKVVDELVKVMGRHKPENIVIEMARENQTTQKGQKNSRERMKRIEEGIKELGSQILKEHPVENTQLQNEKLYLYYLQNGRDMYVDQELDINRLSDYDVDHIVPQSFLKDDSIDNKVLTRSDKARGKSDNVPSEEVVKKMKNYWRQLLNAKLITQRKFDNLTKAERGGLSELDKAGFIKRQLVETRQITKHVAQILDSRMNTKYDENDKLIREVKVITLKSKLVSDFRKDFQFYKVREINNYHHAHDAYLNAVVGTALIKKYPKLESEFVYGDYKVYDVRKMIAKSEQEIGKATAKYFFYSNIMNFFKTEITLANGEIRKRPLIETNGETGEIVWDKGRDFATVRKVLSMPQVNIVKKTEVQTGGFSKESILPKRNSDKLIARKKDWDPKKYGGFDSPTVAYSVLVVAKVEKGKSKKLKSVKELLGITIMERSSFEKNPIDFLEAKGYKEVKKDLIIKLPKYSLFELENGRKRMLASAGELQKGNELALPSKYVNFLYLASHYEKLKGSPEDNEQKQLFVEQHKHYLDEIIEQISEFSKRVILADANLDKVLSAYNKHRDKPIREQAENIIHLFTLTNLGAPAAFKYFDTTIDRKRYTSTKEVLDATLIHQSITGLYETRIDLSQLGGDGGEAAAKPAPGSSGGTLGIEDEYRLHETSTEPDVSLGSTWLSDFPQAWAETGGMGLAVRQAPLIIPLKATSTPVSIQQYPMSHEARLGIKPHIQRLLDQGILVPCQSPWNTPLLPVKKPGTNDYRPVQDLREVNKRVEDIHPTVPNPYNLLSGLPPSHQWYTVLDLKDAFFCLRLHPTSQPLFAFEWRDPGMGISGQLTWTRLPQGFKNSPTLFNEALHRDLADFRIQHPDLILLQYVDDILLAATSELDCQQGTRALLQTLGDLGYRASAKKAQICQKQVKYLGYLLREGQRWLTEARKETVMGQPVPKTPRQLREFLGTAGFCRLWIPGFAEMAAPLYPLTKPGTLFSWGPDQQKAYQEIKQALLTAPALGLPDLTKPFELFVDEKQGYAKGVLTQKLGPWRRPVAYLSKKLDPVAAGWPPCLRMVAAIAVLTKDAGKLTMGQPLVILAPHAVEALVKQPPDRWLSNARMTHYQAMLLDTDRVQFGPVVALNPATLLPLPEEGAPHDCLEILAETHGTRPDLTDQPIPDADHTWYTDGSSFLQEGQRKAGAAVTTETEVIWAGALPAGTSAQRAELIALTQALKMAEGKRLNVYTDSRYAFATAHIHGEIYRRRGWLTSEGREIKNKSEILALLKALFLPKRLSIIHCLGHQKGDSAEARGNRLADQAAREAAIKTPPDTSTLLAGKRTADGSEFEKRTADGSEFESPKKKAKVE

SEQ ID NO: 2214 - protein, 2096 aa, synthetic construct
MPAAKRVKLDGGDKKYSIGLDIGTNSVGWAVITDEYKVPSKKFKVLGNTDRHSIKKNLIGALLFDSGETAEATRLKRTARRRYTRRKNRICYLQEIFSNEMAKVDDSFFHRLEESFLVEEDKKHERHPIFGNIVDEVAYHEKYPTIYHLRKKLVDSTDKADLRLIYLALAHMIKFRGHFLIEGDLNPDNSDVDKLFIQLVQTYNQLFEENPINASGVDAKAILSARLSKSRRLENLIAQLPGEKKNGLFGNLIALSLGLTPNFKSNFDLAEDAKLQLSKDTYDDDLDNLLAQIGDQYADLFLAAKNLSDAILLSDILRVNTEITKAPLSASMIKRYDEHHQDLTLLKALVRQQLPEKYKEIFFDQSKNGYAGYIDGGASQEEFYKFIKPILEKMDGTEELLVKLNREDLLRKQRTFDNGSIPHQIHLGELHAILRRQEDFYPFLKDNREKIEKILTFRIPYYVGPLARGNSRFAWMTRKSEETITPWNFEEVVDKGASAQSFIERMTNFDKNLPNEKVLPKHSLLYEYFTVYNELTKVKYVTEGMRKPAFLSGEQKKAIVDLLFKTNRKVTVKQLKEDYFKKIECFDSVEISGVEDRFNASLGTYHDLLKIIKDKDFLDNEENEDILEDIVLTLTLFEDREMIEERLKTYAHLFDDKVMKQLKRRRYTGWGRLSRKLINGIRDKQSGKTILDFLKSDGFANRNFMQLIHDDSLTFKEDIQKAQVSGQGDSLHEHIANLAGSPAIKKGILQTVKVVDELVKVMGRHKPENIVIEMARENQTTQKGQKNSRERMKRIEEGIKELGSQILKEHPVENTQLQNEKLYLYYLQNGRDMYVDQELDINRLSDYDVDHIVPQSFLKDDSIDNKVLTRSDKARGKSDNVPSEEVVKKMKNYWRQLLNAKLITQRKFDNLTKAERGGLSELDKAGFIKRQLVETRQITKHVAQILDSRMNTKYDENDKLIREVKVITLKSKLVSDFRKDFQFYKVREINNYHHAHDAYLNAVVGTALIKKYPKLESEFVYGDYKVYDVRKMIAKSEQEIGKATAKYFFYSNIMNFFKTEITLANGEIRKRPLIETNGETGEIVWDKGRDFATVRKVLSMPQVNIVKKTEVQTGGFSKESILPKRNSDKLIARKKDWDPKKYGGFDSPTVAYSVLVVAKVEKGKSKKLKSVKELLGITIMERSSFEKNPIDFLEAKGYKEVKKDLIIKLPKYSLFELENGRKRMLASAGELQKGNELALPSKYVNFLYLASHYEKLKGSPEDNEQKQLFVEQHKHYLDEIIEQISEFSKRVILADANLDKVLSAYNKHRDKPIREQAENIIHLFTLTNLGAPAAFKYFDTTIDRKRYTSTKEVLDATLIHQSITGLYETRIDLSQLGGDGGGSSGGGEAAAKGGTLGIEDEYRLHETSTEPDVSLGSTWLSDFPQAWAETGGMGLAVRQAPLIIPLKATSTPVSIQQYPMSHEARLGIKPHIQRLLDQGILVPCQSPWNTPLLPVKKPGTNDYRPVQDLREVNKRVEDIHPTVPNPYNLLSGLPPSHQWYTVLDLKDAFFCLRLHPTSQPLFAFEWRDPGMGISGQLTWTRLPQGFKNSPTLFNEALHRDLADFRIQHPDLILLQYVDDILLAATSELDCQQGTRALLQTLGDLGYRASAKKAQICQKQVKYLGYLLREGQRWLTEARKETVMGQPVPKTPRQLREFLGTAGFCRLWIPGFAEMAAPLYPLTKPGTLFSWGPDQQKAYQEIKQALLTAPALGLPDLTKPFELFVDEKQGYAKGVLTQKLGPWRRPVAYLSKKLDPVAAGWPPCLRMVAAIAVLTKDAGKLTMGQPLVILAPHAVEALVKQPPDRWLSNARMTHYQAMLLDTDRVQFGPVVALNPATLLPLPEEGAPHDCLEILAETHGTRPDLTDQPIPDADHTWYTDGSSFLQEGQRKAGAAVTTETEVIWAGALPAGTSAQRAELIALTQALKMAEGKRLNVYTDSRYAFATAHIHGEIYRRRGWLTSEGREIKNKSEILALLKALFLPKRLSIIHCLGHQKGDSAEARGNRLADQAAREAAIKTPPDTSTLLAGKRTADGSEFEKRTADGSEFESPKKKAKVE

SEQ ID NO: 2215 - protein, 2096 aa, synthetic construct
MPAAKRVKLDGGDKKYSIGLDIGTNSVGWAVITDEYKVPSKKFKVLGNTDRHSIKKNLIGALLFDSGETAEATRLKRTARRRYTRRKNRICYLQEIFSNEMAKVDDSFFHRLEESFLVEEDKKHERHPIFGNIVDEVAYHEKYPTIYHLRKKLVDSTDKADLRLIYLALAHMIKFRGHFLIEGDLNPDNSDVDKLFIQLVQTYNQLFEENPINASGVDAKAILSARLSKSRRLENLIAQLPGEKKNGLFGNLIALSLGLTPNFKSNFDLAEDAKLQLSKDTYDDDLDNLLAQIGDQYADLFLAAKNLSDAILLSDILRVNTEITKAPLSASMIKRYDEHHQDLTLLKALVRQQLPEKYKEIFFDQSKNGYAGYIDGGASQEEFYKFIKPILEKMDGTEELLVKLNREDLLRKQRTFDNGSIPHQIHLGELHAILRRQEDFYPFLKDNREKIEKILTFRIPYYVGPLARGNSRFAWMTRKSEETITPWNFEEVVDKGASAQSFIERMTNFDKNLPNEKVLPKHSLLYEYFTVYNELTKVKYVTEGMRKPAFLSGEQKKAIVDLLFKTNRKVTVKQLKEDYFKKIECFDSVEISGVEDRFNASLGTYHDLLKIIKDKDFLDNEENEDILEDIVLTLTLFEDREMIEERLKTYAHLFDDKVMKQLKRRRYTGWGRLSRKLINGIRDKQSGKTILDFLKSDGFANRNFMQLIHDDSLTFKEDIQKAQVSGQGDSLHEHIANLAGSPAIKKGILQTVKVVDELVKVMGRHKPENIVIEMARENQTTQKGQKNSRERMKRIEEGIKELGSQILKEHPVENTQLQNEKLYLYYLQNGRDMYVDQELDINRLSDYDVDHIVPQSFLKDDSIDNKVLTRSDKARGKSDNVPSEEVVKKMKNYWRQLLNAKLITQRKFDNLTKAERGGLSELDKAGFIKRQLVETRQITKHVAQILDSRMNTKYDENDKLIREVKVITLKSKLVSDFRKDFQFYKVREINNYHHAHDAYLNAVVGTALIKKYPKLESEFVYGDYKVYDVRKMIAKSEQEIGKATAKYFFYSNIMNFFKTEITLANGEIRKRPLIETNGETGEIVWDKGRDFATVRKVLSMPQVNIVKKTEVQTGGFSKESILPKRNSDKLIARKKDWDPKKYGGFDSPTVAYSVLVVAKVEKGKSKKLKSVKELLGITIMERSSFEKNPIDFLEAKGYKEVKKDLIIKLPKYSLFELENGRKRMLASAGELQKGNELALPSKYVNFLYLASHYEKLKGSPEDNEQKQLFVEQHKHYLDEIIEQISEFSKRVILADANLDKVLSAYNKHRDKPIREQAENIIHLFTLTNLGAPAAFKYFDTTIDRKRYTSTKEVLDATLIHQSITGLYETRIDLSQLGGDGGGSSEAAAKPAPGGTLGIEDEYRLHETSTEPDVSLGSTWLSDFPQAWAETGGMGLAVRQAPLIIPLKATSTPVSIQQYPMSHEARLGIKPHIQRLLDQGILVPCQSPWNTPLLPVKKPGTNDYRPVQDLREVNKRVEDIHPTVPNPYNLLSGLPPSHQWYTVLDLKDAFFCLRLHPTSQPLFAFEWRDPGMGISGQLTWTRLPQGFKNSPTLFNEALHRDLADFRIQHPDLILLQYVDDILLAATSELDCQQGTRALLQTLGDLGYRASAKKAQICQKQVKYLGYLLREGQRWLTEARKETVMGQPVPKTPRQLREFLGTAGFCRLWIPGFAEMAAPLYPLTKPGTLFSWGPDQQKAYQEIKQALLTAPALGLPDLTKPFELFVDEKQGYAKGVLTQKLGPWRRPVAYLSKKLDPVAAGWPPCLRMVAAIAVLTKDAGKLTMGQPLVILAPHAVEALVKQPPDRWLSNARMTHYQAMLLDTDRVQFGPVVALNPATLLPLPEEGAPHDCLEILAETHGTRPDLTDQPIPDADHTWYTDGSSFLQEGQRKAGAAVTTETEVIWAGALPAGTSAQRAELIALTQALKMAEGKRLNVYTDSRYAFATAHIHGEIYRRRGWLTSEGREIKNKSEILALLKALFLPKRLSIIHCLGHQKGDSAEARGNRLADQAAREAAIKTPPDTSTLLAGKRTADGSEFEKRTADGSEFESPKKKAKVE

SEQ ID NO: 2216 - protein, 2091 aa, synthetic construct
MPAAKRVKLDGGDKKYSIGLDIGTNSVGWAVITDEYKVPSKKFKVLGNTDRHSIKKNLIGALLFDSGETAEATRLKRTARRRYTRRKNRICYLQEIFSNEMAKVDDSFFHRLEESFLVEEDKKHERHPIFGNIVDEVAYHEKYPTIYHLRKKLVDSTDKADLRLIYLALAHMIKFRGHFLIEGDLNPDNSDVDKLFIQLVQTYNQLFEENPINASGVDAKAILSARLSKSRRLENLIAQLPGEKKNGLFGNLIALSLGLTPNFKSNFDLAEDAKLQLSKDTYDDDLDNLLAQIGDQYADLFLAAKNLSDAILLSDILRVNTEITKAPLSASMIKRYDEHHQDLTLLKALVRQQLPEKYKEIFFDQSKNGYAGYIDGGASQEEFYKFIKPILEKMDGTEELLVKLNREDLLRKQRTFDNGSIPHQIHLGELHAILRRQEDFYPFLKDNREKIEKILTFRIPYYVGPLARGNSRFAWMTRKSEETITPWNFEEVVDKGASAQSFIERMTNFDKNLPNEKVLPKHSLLYEYFTVYNELTKVKYVTEGMRKPAFLSGEQKKAIVDLLFKTNRKVTVKQLKEDYFKKIECFDSVEISGVEDRFNASLGTYHDLLKIIKDKDFLDNEENEDILEDIVLTLTLFEDREMIEERLKTYAHLFDDKVMKQLKRRRYTGWGRLSRKLINGIRDKQSGKTILDFLKSDGFANRNFMQLIHDDSLTFKEDIQKAQVSGQGDSLHEHIANLAGSPAIKKGILQTVKVVDELVKVMGRHKPENIVIEMARENQTTQKGQKNSRERMKRIEEGIKELGSQILKEHPVENTQLQNEKLYLYYLQNGRDMYVDQELDINRLSDYDVDHIVPQSFLKDDSIDNKVLTRSDKARGKSDNVPSEEVVKKMKNYWRQLLNAKLITQRKFDNLTKAERGGLSELDKAGFIKRQLVETRQITKHVAQILDSRMNTKYDENDKLIREVKVITLKSKLVSDFRKDFQFYKVREINNYHHAHDAYLNAVVGTALIKKYPKLESEFVYGDYKVYDVRKMIAKSEQEIGKATAKYFFYSNIMNFFKTEITLANGEIRKRPLIETNGETGEIVWDKGRDFATVRKVLSMPQVNIVKKTEVQTGGFSKESILPKRNSDKLIARKKDWDPKKYGGFDSPTVAYSVLVVAKVEKGKSKKLKSVKELLGITIMERSSFEKNPIDFLEAKGYKEVKKDLIIKLPKYSLFELENGRKRMLASAGELQKGNELALPSKYVNFLYLASHYEKLKGSPEDNEQKQLFVEQHKHYLDEIIEQISEFSKRVILADANLDKVLSAYNKHRDKPIREQAENIIHLFTLTNLGAPAAFKYFDTTIDRKRYTSTKEVLDATLIHQSITGLYETRIDLSQLGGDGGGGGGGGGGTLGIEDEYRLHETSTEPDVSLGSTWLSDFPQAWAETGGMGLAVRQAPLIIPLKATSTPVSIQQYPMSHEARLGIKPHIQRLLDQGILVPCQSPWNTPLLPVKKPGTNDYRPVQDLREVNKRVEDIHPTVPNPYNLLSGLPPSHQWYTVLDLKDAFFCLRLHPTSQPLFAFEWRDPGMGISGQLTWTRLPQGFKNSPTLFNEALHRDLADFRIQHPDLILLQYVDDILLAATSELDCQQGTRALLQTLGDLGYRASAKKAQICQKQVKYLGYLLREGQRWLTEARKETVMGQPVPKTPRQLREFLGTAGFCRLWIPGFAEMAAPLYPLTKPGTLFSWGPDQQKAYQEIKQALLTAPALGLPDLTKPFELFVDEKQGYAKGVLTQKLGPWRRPVAYLSKKLDPVAAGWPPCLRMVAAIAVLTKDAGKLTMGQPLVILAPHAVEALVKQPPDRWLSNARMTHYQAMLLDTDRVQFGPVVALNPATLLPLPEEGAPHDCLEILAETHGTRPDLTDQPIPDADHTWYTDGSSFLQEGQRKAGAAVTTETEVIWAGALPAGTSAQRAELIALTQALKMAEGKRLNVYTDSRYAFATAHIHGEIYRRRGWLTSEGREIKNKSEILALLKALFLPKRLSIIHCLGHQKGDSAEARGNRLADQAAREAAIKTPPDTSTLLAGKRTADGSEFEKRTADGSEFESPKKKAKVE

SEQ ID NO: 2217 - protein, 2094 aa, synthetic construct
MPAAKRVKLDGGDKKYSIGLDIGTNSVGWAVITDEYKVPSKKFKVLGNTDRHSIKKNLIGALLFDSGETAEATRLKRTARRRYTRRKNRICYLQEIFSNEMAKVDDSFFHRLEESFLVEEDKKHERHPIFGNIVDEVAYHEKYPTIYHLRKKLVDSTDKADLRLIYLALAHMIKFRGHFLIEGDLNPDNSDVDKLFIQLVQTYNQLFEENPINASGVDAKAILSARLSKSRRLENLIAQLPGEKKNGLFGNLIALSLGLTPNFKSNFDLAEDAKLQLSKDTYDDDLDNLLAQIGDQYADLFLAAKNLSDAILLSDILRVNTEITKAPLSASMIKRYDEHHQDLTLLKALVRQQLPEKYKEIFFDQSKNGYAGYIDGGASQEEFYKFIKPILEKMDGTEELLVKLNREDLLRKQRTFDNGSIPHQIHLGELHAILRRQEDFYPFLKDNREKIEKILTFRIPYYVGPLARGNSRFAWMTRKSEETITPWNFEEVVDKGASAQSFIERMTNFDKNLPNEKVLPKHSLLYEYFTVYNELTKVKYVTEGMRKPAFLSGEQKKAIVDLLFKTNRKVTVKQLKEDYFKKIECFDSVEISGVEDRFNASLGTYHDLLKIIKDKDFLDNEENEDILEDIVLTLTLFEDREMIEERLKTYAHLFDDKVMKQLKRRRYTGWGRLSRKLINGIRDKQSGKTILDFLKSDGFANRNFMQLIHDDSLTFKEDIQKAQVSGQGDSLHEHIANLAGSPAIKKGILQTVKVVDELVKVMGRHKPENIVIEMARENQTTQKGQKNSRERMKRIEEGIKELGSQILKEHPVENTQLQNEKLYLYYLQNGRDMYVDQELDINRLSDYDVDHIVPQSFLKDDSIDNKVLTRSDKARGKSDNVPSEEVVKKMKNYWRQLLNAKLITQRKFDNLTKAERGGLSELDKAGFIKRQLVETRQITKHVAQILDSRMNTKYDENDKLIREVKVITLKSKLVSDFRKDFQFYKVREINNYHHAHDAYLNAVVGTALIKKYPKLESEFVYGDYKVYDVRKMIAKSEQEIGKATAKYFFYSNIMNFFKTEITLANGEIRKRPLIETNGETGEIVWDKGRDFATVRKVLSMPQVNIVKKTEVQTGGFSKESILPKRNSDKLIARKKDWDPKKYGGFDSPTVAYSVLVVAKVEKGKSKKLKSVKELLGITIMERSSFEKNPIDFLEAKGYKEVKKDLIIKLPKYSLFELENGRKRMLASAGELQKGNELALPSKYVNFLYLASHYEKLKGSPEDNEQKQLFVEQHKHYLDEIIEQISEFSKRVILADANLDKVLSAYNKHRDKPIREQAENIIHLFTLTNLGAPAAFKYFDTTIDRKRYTSTKEVLDATLIHQSITGLYETRIDLSQLGGDGGGGSGSSPAPGGTLGIEDEYRLHETSTEPDVSLGSTWLSDFPQAWAETGGMGLAVRQAPLIIPLKATSTPVSIQQYPMSHEARLGIKPHIQRLLDQGILVPCQSPWNTPLLPVKKPGTNDYRPVQDLREVNKRVEDIHPTVPNPYNLLSGLPPSHQWYTVLDLKDAFFCLRLHPTSQPLFAFEWRDPGMGISGQLTWTRLPQGFKNSPTLFNEALHRDLADFRIQHPDLILLQYVDDILLAATSELDCQQGTRALLQTLGDLGYRASAKKAQICQKQVKYLGYLLREGQRWLTEARKETVMGQPVPKTPRQLREFLGTAGFCRLWIPGFAEMAAPLYPLTKPGTLFSWGPDQQKAYQEIKQALLTAPALGLPDLTKPFELFVDEKQGYAKGVLTQKLGPWRRPVAYLSKKLDPVAAGWPPCLRMVAAIAVLTKDAGKLTMGQPLVILAPHAVEALVKQPPDRWLSNARMTHYQAMLLDTDRVQFGPVVALNPATLLPLPEEGAPHDCLEILAETHGTRPDLTDQPIPDADHTWYTDGSSFLQEGQRKAGAAVTTETEVIWAGALPAGTSAQRAELIALTQALKMAEGKRLNVYTDSRYAFATAHIHGEIYRRRGWLTSEGREIKNKSEILALLKALFLPKRLSIIHCLGHQKGDSAEARGNRLADQAAREAAIKTPPDTSTLLAGKRTADGSEFEKRTADGSEFESPKKKAKVE

SEQ ID NO: 2218 - protein, 2096 aa, synthetic construct
MPAAKRVKLDGGDKKYSIGLDIGTNSVGWAVITDEYKVPSKKFKVLGNTDRHSIKKNLIGALLFDSGETAEATRLKRTARRRYTRRKNRICYLQEIFSNEMAKVDDSFFHRLEESFLVEEDKKHERHPIFGNIVDEVAYHEKYPTIYHLRKKLVDSTDKADLRLIYLALAHMIKFRGHFLIEGDLNPDNSDVDKLFIQLVQTYNQLFEENPINASGVDAKAILSARLSKSRRLENLIAQLPGEKKNGLFGNLIALSLGLTPNFKSNFDLAEDAKLQLSKDTYDDDLDNLLAQIGDQYADLFLAAKNLSDAILLSDILRVNTEITKAPLSASMIKRYDEHHQDLTLLKALVRQQLPEKYKEIFFDQSKNGYAGYIDGGASQEEFYKFIKPILEKMDGTEELLVKLNREDLLRKQRTFDNGSIPHQIHLGELHAILRRQEDFYPFLKDNREKIEKILTFRIPYYVGPLARGNSRFAWMTRKSEETITPWNFEEVVDKGASAQSFIERMTNFDKNLPNEKVLPKHSLLYEYFTVYNELTKVKYVTEGMRKPAFLSGEQKKAIVDLLFKTNRKVTVKQLKEDYFKKIECFDSVEISGVEDRFNASLGTYHDLLKIIKDKDFLDNEENEDILEDIVLTLTLFEDREMIEERLKTYAHLFDDKVMKQLKRRRYTGWGRLSRKLINGIRDKQSGKTILDFLKSDGFANRNFMQLIHDDSLTFKEDIQKAQVSGQGDSLHEHIANLAGSPAIKKGILQTVKVVDELVKVMGRHKPENIVIEMARENQTTQKGQKNSRERMKRIEEGIKELGSQILKEHPVENTQLQNEKLYLYYLQNGRDMYVDQELDINRLSDYDVDHIVPQSFLKDDSIDNKVLTRSDKARGKSDNVPSEEVVKKMKNYWRQLLNAKLITQRKFDNLTKAERGGLSELDKAGFIKRQLVETRQITKHVAQILDSRMNTKYDENDKLIREVKVITLKSKLVSDFRKDFQFYKVREINNYHHAHDAYLNAVVGTALIKKYPKLESEFVYGDYKVYDVRKMIAKSEQEIGKATAKYFFYSNIMNFFKTEITLANGEIRKRPLIETNGETGEIVWDKGRDFATVRKVLSMPQVNIVKKTEVQTGGFSKESILPKRNSDKLIARKKDWDPKKYGGFDSPTVAYSVLVVAKVEKGKSKKLKSVKELLGITIMERSSFEKNPIDFLEAKGYKEVKKDLIIKLPKYSLFELENGRKRMLASAGELQKGNELALPSKYVNFLYLASHYEKLKGSPEDNEQKQLFVEQHKHYLDEIIEQISEFSKRVILADANLDKVLSAYNKHRDKPIREQAENIIHLFTLTNLGAPAAFKYFDTTIDRKRYTSTKEVLDATLIHQSITGLYETRIDLSQLGGDGGEAAAKGGSGGGGGTLGIEDEYRLHETSTEPDVSLGSTWLSDFPQAWAETGGMGLAVRQAPLIIPLKATSTPVSIQQYPMSHEARLGIKPHIQRLLDQGILVPCQSPWNTPLLPVKKPGTNDYRPVQDLREVNKRVEDIHPTVPNPYNLLSGLPPSHQWYTVLDLKDAFFCLRLHPTSQPLFAFEWRDPGMGISGQLTWTRLPQGFKNSPTLFNEALHRDLADFRIQHPDLILLQYVDDILLAATSELDCQQGTRALLQTLGDLGYRASAKKAQICQKQVKYLGYLLREGQRWLTEARKETVMGQPVPKTPRQLREFLGTAGFCRLWIPGFAEMAAPLYPLTKPGTLFSWGPDQQKAYQEIKQALLTAPALGLPDLTKPFELFVDEKQGYAKGVLTQKLGPWRRPVAYLSKKLDPVAAGWPPCLRMVAAIAVLTKDAGKLTMGQPLVILAPHAVEALVKQPPDRWLSNARMTHYQAMLLDTDRVQFGPVVALNPATLLPLPEEGAPHDCLEILAETHGTRPDLTDQPIPDADHTWYTDGSSFLQEGQRKAGAAVTTETEVIWAGALPAGTSAQRAELIALTQALKMAEGKRLNVYTDSRYAFATAHIHGEIYRRRGWLTSEGREIKNKSEILALLKALFLPKRLSIIHCLGHQKGDSAEARGNRLADQAAREAAIKTPPDTSTLLAGKRTADGSEFEKRTADGSEFESPKKKAKVE

SEQ ID NO: 2219 - protein, 2094 aa, synthetic construct
MPAAKRVKLDGGDKKYSIGLDIGTNSVGWAVITDEYKVPSKKFKVLGNTDRHSIKKNLIGALLFDSGETAEATRLKRTARRRYTRRKNRICYLQEIFSNEMAKVDDSFFHRLEESFLVEEDKKHERHPIFGNIVDEVAYHEKYPTIYHLRKKLVDSTDKADLRLIYLALAHMIKFRGHFLIEGDLNPDNSDVDKLFIQLVQTYNQLFEENPINASGVDAKAILSARLSKSRRLENLIAQLPGEKKNGLFGNLIALSLGLTPNFKSNFDLAEDAKLQLSKDTYDDDLDNLLAQIGDQYADLFLAAKNLSDAILLSDILRVNTEITKAPLSASMIKRYDEHHQDLTLLKALVRQQLPEKYKEIFFDQSKNGYAGYIDGGASQEEFYKFIKPILEKMDGTEELLVKLNREDLLRKQRTFDNGSIPHQIHLGELHAILRRQEDFYPFLKDNREKIEKILTFRIPYYVGPLARGNSRFAWMTRKSEETITPWNFEEVVDKGASAQSFIERMTNFDKNLPNEKVLPKHSLLYEYFTVYNELTKVKYVTEGMRKPAFLSGEQKKAIVDLLFKTNRKVTVKQLKEDYFKKIECFDSVEISGVEDRFNASLGTYHDLLKIIKDKDFLDNEENEDILEDIVLTLTLFEDREMIEERLKTYAHLFDDKVMKQLKRRRYTGWGRLSRKLINGIRDKQSGKTILDFLKSDGFANRNFMQLIHDDSLTFKEDIQKAQVSGQGDSLHEHIANLAGSPAIKKGILQTVKVVDELVKVMGRHKPENIVIEMARENQTTQKGQKNSRERMKRIEEGIKELGSQILKEHPVENTQLQNEKLYLYYLQNGRDMYVDQELDINRLSDYDVDHIVPQSFLKDDSIDNKVLTRSDKARGKSDNVPSEEVVKKMKNYWRQLLNAKLITQRKFDNLTKAERGGLSELDKAGFIKRQLVETRQITKHVAQILDSRMNTKYDENDKLIREVKVITLKSKLVSDFRKDFQFYKVREINNYHHAHDAYLNAVVGTALIKKYPKLESEFVYGDYKVYDVRKMIAKSEQEIGKATAKYFFYSNIMNFFKTEITLANGEIRKRPLIETNGETGEIVWDKGRDFATVRKVLSMPQVNIVKKTEVQTGGFSKESILPKRNSDKLIARKKDWDPKKYGGFDSPTVAYSVLVVAKVEKGKSKKLKSVKELLGITIMERSSFEKNPIDFLEAKGYKEVKKDLIIKLPKYSLFELENGRKRMLASAGELQKGNELALPSKYVNFLYLASHYEKLKGSPEDNEQKQLFVEQHKHYLDEIIEQISEFSKRVILADANLDKVLSAYNKHRDKPIREQAENIIHLFTLTNLGAPAAFKYFDTTIDRKRYTSTKEVLDATLIHQSITGLYETRIDLSQLGGDGGGSSGSSGSSGGTLGIEDEYRLHETSTEPDVSLGSTWLSDFPQAWAETGGMGLAVRQAPLIIPLKATSTPVSIQQYPMSHEARLGIKPHIQRLLDQGILVPCQSPWNTPLLPVKKPGTNDYRPVQDLREVNKRVEDIHPTVPNPYNLLSGLPPSHQWYTVLDLKDAFFCLRLHPTSQPLFAFEWRDPGMGISGQLTWTRLPQGFKNSPTLFNEALHRDLADFRIQHPDLILLQYVDDILLAATSELDCQQGTRALLQTLGDLGYRASAKKAQICQKQVKYLGYLLREGQRWLTEARKETVMGQPVPKTPRQLREFLGTAGFCRLWIPGFAEMAAPLYPLTKPGTLFSWGPDQQKAYQEIKQALLTAPALGLPDLTKPFELFVDEKQGYAKGVLTQKLGPWRRPVAYLSKKLDPVAAGWPPCLRMVAAIAVLTKDAGKLTMGQPLVILAPHAVEALVKQPPDRWLSNARMTHYQAMLLDTDRVQFGPVVALNPATLLPLPEEGAPHDCLEILAETHGTRPDLTDQPIPDADHTWYTDGSSFLQEGQRKAGAAVTTETEVIWAGALPAGTSAQRAELIALTQALKMAEGKRLNVYTDSRYAFATAHIHGEIYRRRGWLTSEGREIKNKSEILALLKALFLPKRLSIIHCLGHQKGDSAEARGNRLADQAAREAAIKTPPDTSTLLAGKRTADGSEFEKRTADGSEFESPKKKAKVE

SEQ ID NO: 2220 - protein, 2097 aa, synthetic construct
MPAAKRVKLDGGDKKYSIGLDIGTNSVGWAVITDEYKVPSKKFKVLGNTDRHSIKKNLIGALLFDSGETAEATRLKRTARRRYTRRKNRICYLQEIFSNEMAKVDDSFFHRLEESFLVEEDKKHERHPIFGNIVDEVAYHEKYPTIYHLRKKLVDSTDKADLRLIYLALAHMIKFRGHFLIEGDLNPDNSDVDKLFIQLVQTYNQLFEENPINASGVDAKAILSARLSKSRRLENLIAQLPGEKKNGLFGNLIALSLGLTPNFKSNFDLAEDAKLQLSKDTYDDDLDNLLAQIGDQYADLFLAAKNLSDAILLSDILRVNTEITKAPLSASMIKRYDEHHQDLTLLKALVRQQLPEKYKEIFFDQSKNGYAGYIDGGASQEEFYKFIKPILEKMDGTEELLVKLNREDLLRKQRTFDNGSIPHQIHLGELHAILRRQEDFYPFLKDNREKIEKILTFRIPYYVGPLARGNSRFAWMTRKSEETITPWNFEEVVDKGASAQSFIERMTNFDKNLPNEKVLPKHSLLYEYFTVYNELTKVKYVTEGMRKPAFLSGEQKKAIVDLLFKTNRKVTVKQLKEDYFKKIECFDSVEISGVEDRFNASLGTYHDLLKIIKDKDFLDNEENEDILEDIVLTLTLFEDREMIEERLKTYAHLFDDKVMKQLKRRRYTGWGRLSRKLINGIRDKQSGKTILDFLKSDGFANRNFMQLIHDDSLTFKEDIQKAQVSGQGDSLHEHIANLAGSPAIKKGILQTVKVVDELVKVMGRHKPENIVIEMARENQTTQKGQKNSRERMKRIEEGIKELGSQILKEHPVENTQLQNEKLYLYYLQNGRDMYVDQELDINRLSDYDVDHIVPQSFLKDDSIDNKVLTRSDKARGKSDNVPSEEVVKKMKNYWRQLLNAKLITQRKFDNLTKAERGGLSELDKAGFIKRQLVETRQITKHVAQILDSRMNTKYDENDKLIREVKVITLKSKLVSDFRKDFQFYKVREINNYHHAHDAYLNAVVGTALIKKYPKLESEFVYGDYKVYDVRKMIAKSEQEIGKATAKYFFYSNIMNFFKTEITLANGEIRKRPLIETNGETGEIVWDKGRDFATVRKVLSMPQVNIVKKTEVQTGGFSKESILPKRNSDKLIARKKDWDPKKYGGFDSPTVAYSVLVVAKVEKGKSKKLKSVKELLGITIMERSSFEKNPIDFLEAKGYKEVKKDLIIKLPKYSLFELENGRKRMLASAGELQKGNELALPSKYVNFLYLASHYEKLKGSPEDNEQKQLFVEQHKHYLDEIIEQISEFSKRVILADANLDKVLSAYNKHRDKPIREQAENIIHLFTLTNLGAPAAFKYFDTTIDRKRYTSTKEVLDATLIHQSITGLYETRIDLSQLGGDGGGSAGSAAGSGEFGGTLGIEDEYRLHETSTEPDVSLGSTWLSDFPQAWAETGGMGLAVRQAPLIIPLKATSTPVSIQQYPMSHEARLGIKPHIQRLLDQGILVPCQSPWNTPLLPVKKPGTNDYRPVQDLREVNKRVEDIHPTVPNPYNLLSGLPPSHQWYTVLDLKDAFFCLRLHPTSQPLFAFEWRDPGMGISGQLTWTRLPQGFKNSPTLFNEALHRDLADFRIQHPDLILLQYVDDILLAATSELDCQQGTRALLQTLGDLGYRASAKKAQICQKQVKYLGYLLREGQRWLTEARKETVMGQPVPKTPRQLREFLGTAGFCRLWIPGFAEMAAPLYPLTKPGTLFSWGPDQQKAYQEIKQALLTAPALGLPDLTKPFELFVDEKQGYAKGVLTQKLGPWRRPVAYLSKKLDPVAAGWPPCLRMVAAIAVLTKDAGKLTMGQPLVILAPHAVEALVKQPPDRWLSNARMTHYQAMLLDTDRVQFGPVVALNPATLLPLPEEGAPHDCLEILAETHGTRPDLTDQPIPDADHTWYTDGSSFLQEGQRKAGAAVTTETEVIWAGALPAGTSAQRAELIALTQALKMAEGKRLNVYTDSRYAFATAHIHGEIYRRRGWLTSEGREIKNKSEILALLKALFLPKRLSIIHCLGHQKGDSAEARGNRLADQAAREAAIKTPPDTSTLLAGKRTADGSEFEKRTADGSEFESPKKKAKVE

SEQ ID NO: 2221 - protein, 2090 aa, synthetic construct
MPAAKRVKLDGGDKKYSIGLDIGTNSVGWAVITDEYKVPSKKFKVLGNTDRHSIKKNLIGALLFDSGETAEATRLKRTARRRYTRRKNRICYLQEIFSNEMAKVDDSFFHRLEESFLVEEDKKHERHPIFGNIVDEVAYHEKYPTIYHLRKKLVDSTDKADLRLIYLALAHMIKFRGHFLIEGDLNPDNSDVDKLFIQLVQTYNQLFEENPINASGVDAKAILSARLSKSRRLENLIAQLPGEKKNGLFGNLIALSLGLTPNFKSNFDLAEDAKLQLSKDTYDDDLDNLLAQIGDQYADLFLAAKNLSDAILLSDILRVNTEITKAPLSASMIKRYDEHHQDLTLLKALVRQQLPEKYKEIFFDQSKNGYAGYIDGGASQEEFYKFIKPILEKMDGTEELLVKLNREDLLRKQRTFDNGSIPHQIHLGELHAILRRQEDFYPFLKDNREKIEKILTFRIPYYVGPLARGNSRFAWMTRKSEETITPWNFEEVVDKGASAQSFIERMTNFDKNLPNEKVLPKHSLLYEYFTVYNELTKVKYVTEGMRKPAFLSGEQKKAIVDLLFKTNRKVTVKQLKEDYFKKIECFDSVEISGVEDRFNASLGTYHDLLKIIKDKDFLDNEENEDILEDIVLTLTLFEDREMIEERLKTYAHLFDDKVMKQLKRRRYTGWGRLSRKLINGIRDKQSGKTILDFLKSDGFANRNFMQLIHDDSLTFKEDIQKAQVSGQGDSLHEHIANLAGSPAIKKGILQTVKVVDELVKVMGRHKPENIVIEMARENQTTQKGQKNSRERMKRIEEGIKELGSQILKEHPVENTQLQNEKLYLYYLQNGRDMYVDQELDINRLSDYDVDHIVPQSFLKDDSIDNKVLTRSDKARGKSDNVPSEEVVKKMKNYWRQLLNAKLITQRKFDNLTKAERGGLSELDKAGFIKRQLVETRQITKHVAQILDSRMNTKYDENDKLIREVKVITLKSKLVSDFRKDFQFYKVREINNYHHAHDAYLNAVVGTALIKKYPKLESEFVYGDYKVYDVRKMIAKSEQEIGKATAKYFFYSNIMNFFKTEITLANGEIRKRPLIETNGETGEIVWDKGRDFATVRKVLSMPQVNIVKKTEVQTGGFSKESILPKRNSDKLIARKKDWDPKKYGGFDSPTVAYSVLVVAKVEKGKSKKLKSVKELLGITIMERSSFEKNPIDFLEAKGYKEVKKDLIIKLPKYSLFELENGRKRMLASAGELQKGNELALPSKYVNFLYLASHYEKLKGSPEDNEQKQLFVEQHKHYLDEIIEQISEFSKRVILADANLDKVLSAYNKHRDKPIREQAENIIHLFTLTNLGAPAAFKYFDTTIDRKRYTSTKEVLDATLIHQSITGLYETRIDLSQLGGDGGGGGGGGGTLGIEDEYRLHETSTEPDVSLGSTWLSDFPQAWAETGGMGLAVRQAPLIIPLKATSTPVSIQQYPMSHEARLGIKPHIQRLLDQGILVPCQSPWNTPLLPVKKPGTNDYRPVQDLREVNKRVEDIHPTVPNPYNLLSGLPPSHQWYTVLDLKDAFFCLRLHPTSQPLFAFEWRDPGMGISGQLTWTRLPQGFKNSPTLFNEALHRDLADFRIQHPDLILLQYVDDILLAATSELDCQQGTRALLQTLGDLGYRASAKKAQICQKQVKYLGYLLREGQRWLTEARKETVMGQPVPKTPRQLREFLGTAGFCRLWIPGFAEMAAPLYPLTKPGTLFSWGPDQQKAYQEIKQALLTAPALGLPDLTKPFELFVDEKQGYAKGVLTQKLGPWRRPVAYLSKKLDPVAAGWPPCLRMVAAIAVLTKDAGKLTMGQPLVILAPHAVEALVKQPPDRWLSNARMTHYQAMLLDTDRVQFGPVVALNPATLLPLPEEGAPHDCLEILAETHGTRPDLTDQPIPDADHTWYTDGSSFLQEGQRKAGAAVTTETEVIWAGALPAGTSAQRAELIALTQALKMAEGKRLNVYTDSRYAFATAHIHGEIYRRRGWLTSEGREIKNKSEILALLKALFLPKRLSIIHCLGHQKGDSAEARGNRLADQAAREAAIKTPPDTSTLLAGKRTADGSEFEKRTADGSEFESPKKKAKVE

SEQ ID NO: 2222 - protein, 2094 aa, synthetic construct
MPAAKRVKLDGGDKKYSIGLDIGTNSVGWAVITDEYKVPSKKFKVLGNTDRHSIKKNLIGALLFDSGETAEATRLKRTARRRYTRRKNRICYLQEIFSNEMAKVDDSFFHRLEESFLVEEDKKHERHPIFGNIVDEVAYHEKYPTIYHLRKKLVDSTDKADLRLIYLALAHMIKFRGHFLIEGDLNPDNSDVDKLFIQLVQTYNQLFEENPINASGVDAKAILSARLSKSRRLENLIAQLPGEKKNGLFGNLIALSLGLTPNFKSNFDLAEDAKLQLSKDTYDDDLDNLLAQIGDQYADLFLAAKNLSDAILLSDILRVNTEITKAPLSASMIKRYDEHHQDLTLLKALVRQQLPEKYKEIFFDQSKNGYAGYIDGGASQEEFYKFIKPILEKMDGTEELLVKLNREDLLRKQRTFDNGSIPHQIHLGELHAILRRQEDFYPFLKDNREKIEKILTFRIPYYVGPLARGNSRFAWMTRKSEETITPWNFEEVVDKGASAQSFIERMTNFDKNLPNEKVLPKHSLLYEYFTVYNELTKVKYVTEGMRKPAFLSGEQKKAIVDLLFKTNRKVTVKQLKEDYFKKIECFDSVEISGVEDRFNASLGTYHDLLKIIKDKDFLDNEENEDILEDIVLTLTLFEDREMIEERLKTYAHLFDDKVMKQLKRRRYTGWGRLSRKLINGIRDKQSGKTILDFLKSDGFANRNFMQLIHDDSLTFKEDIQKAQVSGQGDSLHEHIANLAGSPAIKKGILQTVKVVDELVKVMGRHKPENIVIEMARENQTTQKGQKNSRERMKRIEEGIKELGSQILKEHPVENTQLQNEKLYLYYLQNGRDMYVDQELDINRLSDYDVDHIVPQSFLKDDSIDNKVLTRSDKARGKSDNVPSEEVVKKMKNYWRQLLNAKLITQRKFDNLTKAERGGLSELDKAGFIKRQLVETRQITKHVAQILDSRMNTKYDENDKLIREVKVITLKSKLVSDFRKDFQFYKVREINNYHHAHDAYLNAVVGTALIKKYPKLESEFVYGDYKVYDVRKMIAKSEQEIGKATAKYFFYSNIMNFFKTEITLANGEIRKRPLIETNGETGEIVWDKGRDFATVRKVLSMPQVNIVKKTEVQTGGFSKESILPKRNSDKLIARKKDWDPKKYGGFDSPTVAYSVLVVAKVEKGKSKKLKSVKELLGITIMERSSFEKNPIDFLEAKGYKEVKKDLIIKLPKYSLFELENGRKRMLASAGELQKGNELALPSKYVNFLYLASHYEKLKGSPEDNEQKQLFVEQHKHYLDEIIEQISEFSKRVILADANLDKVLSAYNKHRDKPIREQAENIIHLFTLTNLGAPAAFKYFDTTIDRKRYTSTKEVLDATLIHQSITGLYETRIDLSQLGGDGGGSSGGSPAPGGTLGIEDEYRLHETSTEPDVSLGSTWLSDFPQAWAETGGMGLAVRQAPLIIPLKATSTPVSIQQYPMSHEARLGIKPHIQRLLDQGILVPCQSPWNTPLLPVKKPGTNDYRPVQDLREVNKRVEDIHPTVPNPYNLLSGLPPSHQWYTVLDLKDAFFCLRLHPTSQPLFAFEWRDPGMGISGQLTWTRLPQGFKNSPTLFNEALHRDLADFRIQHPDLILLQYVDDILLAATSELDCQQGTRALLQTLGDLGYRASAKKAQICQKQVKYLGYLLREGQRWLTEARKETVMGQPVPKTPRQLREFLGTAGFCRLWIPGFAEMAAPLYPLTKPGTLFSWGPDQQKAYQEIKQALLTAPALGLPDLTKPFELFVDEKQGYAKGVLTQKLGPWRRPVAYLSKKLDPVAAGWPPCLRMVAAIAVLTKDAGKLTMGQPLVILAPHAVEALVKQPPDRWLSNARMTHYQAMLLDTDRVQFGPVVALNPATLLPLPEEGAPHDCLEILAETHGTRPDLTDQPIPDADHTWYTDGSSFLQEGQRKAGAAVTTETEVIWAGALPAGTSAQRAELIALTQALKMAEGKRLNVYTDSRYAFATAHIHGEIYRRRGWLTSEGREIKNKSEILALLKALFLPKRLSIIHCLGHQKGDSAEARGNRLADQAAREAAIKTPPDTSTLLAGKRTADGSEFEKRTADGSEFESPKKKAKVE

SEQ ID NO: 2223 - protein, 2096 aa, synthetic construct
MPAAKRVKLDGGDKKYSIGLDIGTNSVGWAVITDEYKVPSKKFKVLGNTDRHSIKKNLIGALLFDSGETAEATRLKRTARRRYTRRKNRICYLQEIFSNEMAKVDDSFFHRLEESFLVEEDKKHERHPIFGNIVDEVAYHEKYPTIYHLRKKLVDSTDKADLRLIYLALAHMIKFRGHFLIEGDLNPDNSDVDKLFIQLVQTYNQLFEENPINASGVDAKAILSARLSKSRRLENLIAQLPGEKKNGLFGNLIALSLGLTPNFKSNFDLAEDAKLQLSKDTYDDDLDNLLAQIGDQYADLFLAAKNLSDAILLSDILRVNTEITKAPLSASMIKRYDEHHQDLTLLKALVRQQLPEKYKEIFFDQSKNGYAGYIDGGASQEEFYKFIKPILEKMDGTEELLVKLNREDLLRKQRTFDNGSIPHQIHLGELHAILRRQEDFYPFLKDNREKIEKILTFRIPYYVGPLARGNSRFAWMTRKSEETITPWNFEEVVDKGASAQSFIERMTNFDKNLPNEKVLPKHSLLYEYFTVYNELTKVKYVTEGMRKPAFLSGEQKKAIVDLLFKTNRKVTVKQLKEDYFKKIECFDSVEISGVEDRFNASLGTYHDLLKIIKDKDFLDNEENEDILEDIVLTLTLFEDREMIEERLKTYAHLFDDKVMKQLKRRRYTGWGRLSRKLINGIRDKQSGKTILDFLKSDGFANRNFMQLIHDDSLTFKEDIQKAQVSGQGDSLHEHIANLAGSPAIKKGILQTVKVVDELVKVMGRHKPENIVIEMARENQTTQKGQKNSRERMKRIEEGIKELGSQILKEHPVENTQLQNEKLYLYYLQNGRDMYVDQELDINRLSDYDVDHIVPQSFLKDDSIDNKVLTRSDKARGKSDNVPSEEVVKKMKNYWRQLLNAKLITQRKFDNLTKAERGGLSELDKAGFIKRQLVETRQITKHVAQILDSRMNTKYDENDKLIREVKVITLKSKLVSDFRKDFQFYKVREINNYHHAHDAYLNAVVGTALIKKYPKLESEFVYGDYKVYDVRKMIAKSEQEIGKATAKYFFYSNIMNFFKTEITLANGEIRKRPLIETNGETGEIVWDKGRDFATVRKVLSMPQVNIVKKTEVQTGGFSKESILPKRNSDKLIARKKDWDPKKYGGFDSPTVAYSVLVVAKVEKGKSKKLKSVKELLGITIMERSSFEKNPIDFLEAKGYKEVKKDLIIKLPKYSLFELENGRKRMLASAGELQKGNELALPSKYVNFLYLASHYEKLKGSPEDNEQKQLFVEQHKHYLDEIIEQISEFSKRVILADANLDKVLSAYNKHRDKPIREQAENIIHLFTLTNLGAPAAFKYFDTTIDRKRYTSTKEVLDATLIHQSITGLYETRIDLSQLGGDGGEAAAKPAPGGGGGTLNIEDEYRLHETSKEPDVSLGSTWLSDFPQAWAETGGMGLAVRQAPLIIPLKATSTPVSIKQYPMSQEARLGIKPHIQRLLDQGILVPCQSPWNTPLLPVKKPGTNDYRPVQDLREVNKRVEDIHPTVPNPYNLLSGLPPSHQWYTVLDLKDAFFCLRLHPTSQPLFAFEWRDPEMGISGQLTWTRLPQGFKNSPTLFDEALHRDLAGFRIQHPDLILLQYVDDLLLAATSELDCQQGTRALLQTLGDLGYRASAKKAQICQKQVKYLGYLLKEGQRWLTEARKETVMGQPIPKTPRQLREFLGTAGFCRLWIPGFAEMAAPLYPLTKTGTLFNWGPDQQKAFQEIKQALLTAPALGLPDLTKPFELFVDEKQGYAKGVLTQKLGPWRRPVAYLSKKLDPVAAGWPPCLRMVAAIAVLTKDAGKLTMGQPLVILAPHAVEALVKQPPDRWLSNARMTHYQALLLDTDRVQFGPVVALNPATLLPLPEEGLQHDCLDILAEAHGTRSDLMDQPLPDADHTWYTDGSSFLQEGQRKAGAAVTTETEVIWARALPAGTSAQRAELIALTQALKMAEGKKLNVYTDSRYAFATAHIHGEIYRRRGLLTSEGKEIKNKDEILALLKALFLPKRLSIIHCPGHQKGNSAEARGNRMADQAAREVATRETPETSTLLAGKRTADGSEFEKRTADGSEFESPKKKAKVE

SEQ ID NO: 2224 - protein, 2115 aa, synthetic construct
MPAAKRVKLDGGDKKYSIGLDIGTNSVGWAVITDEYKVPSKKFKVLGNTDRHSIKKNLIGALLFDSGETAEATRLKRTARRRYTRRKNRICYLQEIFSNEMAKVDDSFFHRLEESFLVEEDKKHERHPIFGNIVDEVAYHEKYPTIYHLRKKLVDSTDKADLRLIYLALAHMIKFRGHFLIEGDLNPDNSDVDKLFIQLVQTYNQLFEENPINASGVDAKAILSARLSKSRRLENLIAQLPGEKKNGLFGNLIALSLGLTPNFKSNFDLAEDAKLQLSKDTYDDDLDNLLAQIGDQYADLFLAAKNLSDAILLSDILRVNTEITKAPLSASMIKRYDEHHQDLTLLKALVRQQLPEKYKEIFFDQSKNGYAGYIDGGASQEEFYKFIKPILEKMDGTEELLVKLNREDLLRKQRTFDNGSIPHQIHLGELHAILRRQEDFYPFLKDNREKIEKILTFRIPYYVGPLARGNSRFAWMTRKSEETITPWNFEEVVDKGASAQSFIERMTNFDKNLPNEKVLPKHSLLYEYFTVYNELTKVKYVTEGMRKPAFLSGEQKKAIVDLLFKTNRKVTVKQLKEDYFKKIECFDSVEISGVEDRFNASLGTYHDLLKIIKDKDFLDNEENEDILEDIVLTLTLFEDREMIEERLKTYAHLFDDKVMKQLKRRRYTGWGRLSRKLINGIRDKQSGKTILDFLKSDGFANRNFMQLIHDDSLTFKEDIQKAQVSGQGDSLHEHIANLAGSPAIKKGILQTVKVVDELVKVMGRHKPENIVIEMARENQTTQKGQKNSRERMKRIEEGIKELGSQILKEHPVENTQLQNEKLYLYYLQNGRDMYVDQELDINRLSDYDVDHIVPQSFLKDDSIDNKVLTRSDKARGKSDNVPSEEVVKKMKNYWRQLLNAKLITQRKFDNLTKAERGGLSELDKAGFIKRQLVETRQITKHVAQILDSRMNTKYDENDKLIREVKVITLKSKLVSDFRKDFQFYKVREINNYHHAHDAYLNAVVGTALIKKYPKLESEFVYGDYKVYDVRKMIAKSEQEIGKATAKYFFYSNIMNFFKTEITLANGEIRKRPLIETNGETGEIVWDKGRDFATVRKVLSMPQVNIVKKTEVQTGGFSKESILPKRNSDKLIARKKDWDPKKYGGFDSPTVAYSVLVVAKVEKGKSKKLKSVKELLGITIMERSSFEKNPIDFLEAKGYKEVKKDLIIKLPKYSLFELENGRKRMLASAGELQKGNELALPSKYVNFLYLASHYEKLKGSPEDNEQKQLFVEQHKHYLDEIIEQISEFSKRVILADANLDKVLSAYNKHRDKPIREQAENIIHLFTLTNLGAPAAFKYFDTTIDRKRYTSTKEVLDATLIHQSITGLYETRIDLSQLGGDGGGGGGSGGGGSGGGGSGGGGSGGGGSGGGGSGGTLNIEDEYRLHETSKEPDVSLGSTWLSDFPQAWAETGGMGLAVRQAPLIIPLKATSTPVSIKQYPMSQEARLGIKPHIQRLLDQGILVPCQSPWNTPLLPVKKPGTNDYRPVQDLREVNKRVEDIHPTVPNPYNLLSGLPPSHQWYTVLDLKDAFFCLRLHPTSQPLFAFEWRDPEMGISGQLTWTRLPQGFKNSPTLFNEALHRDLAGFRIQHPDLILLQYVDDLLLAATSELDCQQGTRALLQTLGDLGYRASAKKAQICQKQVKYLGYLLKEGQRWLTEARKETVMGQPIPKTPRQLREFLGTAGFCRLWIPGFAEMAAPLYPLTKPGTLFNWGPDQQKAFQEIKQALLTAPALGLPDLTKPFELFVDEKQGYAKGVLTQKLGPWRRPVAYLSKKLDPVAAGWPPCLRMVAAIAVLTKDAGKLTMGQPLVILAPHAVEALVKQPPDRWLSNARMTHYQALLLDTDRVQFGPVVALNPATLLPLPEEGLQHDCLDILAEAHGTRSDLMDQPLPDADHTWYTDGSSFLQEGQRKAGAAVTTETEVIWARALPAGTSAQRAELIALTQALKMAEGKKLNVYTDSRYAFATAHIHGEIYRRRGWLTSEGKEIKNKDEILALLKALFLPKRLSIIHCPGHQKGNSAEARGNRMADQAAREVATRETPETSTLLAGKRTADGSEFEKRTADGSEFESPKKKAKVE

SEQ ID NO: 2225 - protein, 2096 aa, synthetic construct
MPAAKRVKLDGGDKKYSIGLDIGTNSVGWAVITDEYKVPSKKFKVLGNTDRHSIKKNLIGALLFDSGETAEATRLKRTARRRYTRRKNRICYLQEIFSNEMAKVDDSFFHRLEESFLVEEDKKHERHPIFGNIVDEVAYHEKYPTIYHLRKKLVDSTDKADLRLIYLALAHMIKFRGHFLIEGDLNPDNSDVDKLFIQLVQTYNQLFEENPINASGVDAKAILSARLSKSRRLENLIAQLPGEKKNGLFGNLIALSLGLTPNFKSNFDLAEDAKLQLSKDTYDDDLDNLLAQIGDQYADLFLAAKNLSDAILLSDILRVNTEITKAPLSASMIKRYDEHHQDLTLLKALVRQQLPEKYKEIFFDQSKNGYAGYIDGGASQEEFYKFIKPILEKMDGTEELLVKLNREDLLRKQRTFDNGSIPHQIHLGELHAILRRQEDFYPFLKDNREKIEKILTFRIPYYVGPLARGNSRFAWMTRKSEETITPWNFEEVVDKGASAQSFIERMTNFDKNLPNEKVLPKHSLLYEYFTVYNELTKVKYVTEGMRKPAFLSGEQKKAIVDLLFKTNRKVTVKQLKEDYFKKIECFDSVEISGVEDRFNASLGTYHDLLKIIKDKDFLDNEENEDILEDIVLTLTLFEDREMIEERLKTYAHLFDDKVMKQLKRRRYTGWGRLSRKLINGIRDKQSGKTILDFLKSDGFANRNFMQLIHDDSLTFKEDIQKAQVSGQGDSLHEHIANLAGSPAIKKGILQTVKVVDELVKVMGRHKPENIVIEMARENQTTQKGQKNSRERMKRIEEGIKELGSQILKEHPVENTQLQNEKLYLYYLQNGRDMYVDQELDINRLSDYDVDHIVPQSFLKDDSIDNKVLTRSDKARGKSDNVPSEEVVKKMKNYWRQLLNAKLITQRKFDNLTKAERGGLSELDKAGFIKRQLVETRQITKHVAQILDSRMNTKYDENDKLIREVKVITLKSKLVSDFRKDFQFYKVREINNYHHAHDAYLNAVVGTALIKKYPKLESEFVYGDYKVYDVRKMIAKSEQEIGKATAKYFFYSNIMNFFKTEITLANGEIRKRPLIETNGETGEIVWDKGRDFATVRKVLSMPQVNIVKKTEVQTGGFSKESILPKRNSDKLIARKKDWDPKKYGGFDSPTVAYSVLVVAKVEKGKSKKLKSVKELLGITIMERSSFEKNPIDFLEAKGYKEVKKDLIIKLPKYSLFELENGRKRMLASAGELQKGNELALPSKYVNFLYLASHYEKLKGSPEDNEQKQLFVEQHKHYLDEIIEQISEFSKRVILADANLDKVLSAYNKHRDKPIREQAENIIHLFTLTNLGAPAAFKYFDTTIDRKRYTSTKEVLDATLIHQSITGLYETRIDLSQLGGDGGPAPGSSEAAAKGGTLNIEDEYRLHETSKEPDVSLGSTWLSDFPQAWAETGGMGLAVRQAPLIIPLKATSTPVSIKQYPMSQEARLGIKPHIQRLLDQGILVPCQSPWNTPLLPVKKPGTNDYRPVQDLREVNKRVEDIHPTVPNPYNLLSGLPPSHQWYTVLDLKDAFFCLRLHPTSQPLFAFEWRDPEMGISGQLTWTRLPQGFKNSPTLFNEALHRDLAGFRIQHPDLILLQYVDDLLLAATSELDCQQGTRALLQTLGDLGYRASAKKAQICQKQVKYLGYLLKEGQRWLTEARKETVMGQPIPKTPRQLREFLGTAGFCRLWIPGFAEMAAPLYPLTKPGTLFNWGPDQQKAFQEIKQALLTAPALGLPDLTKPFELFVDEKQGYAKGVLTQKLGPWRRPVAYLSKKLDPVAAGWPPCLRMVAAIAVLTKDAGKLTMGQPLVILAPHAVEALVKQPPDRWLSNARMTHYQALLLDTDRVQFGPVVALNPATLLPLPEEGLQHDCLDILAEAHGTRSDLMDQPLPDADHTWYTDGSSFLQEGQRKAGAAVTTETEVIWARALPAGTSAQRAELIALTQALKMAEGKKLNVYTDSRYAFATAHIHGEIYRRRGWLTSEGKEIKNKDEILALLKALFLPKRLSIIHCPGHQKGNSAEARGNRMADQAAREVATRETPETSTLLAGKRTADGSEFEKRTADGSEFESPKKKAKVE

SEQ ID NO: 2226 - protein, 2100 aa, synthetic construct
MPAAKRVKLDGGDKKYSIGLDIGTNSVGWAVITDEYKVPSKKFKVLGNTDRHSIKKNLIGALLFDSGETAEATRLKRTARRRYTRRKNRICYLQEIFSNEMAKVDDSFFHRLEESFLVEEDKKHERHPIFGNIVDEVAYHEKYPTIYHLRKKLVDSTDKADLRLIYLALAHMIKFRGHFLIEGDLNPDNSDVDKLFIQLVQTYNQLFEENPINASGVDAKAILSARLSKSRRLENLIAQLPGEKKNGLFGNLIALSLGLTPNFKSNFDLAEDAKLQLSKDTYDDDLDNLLAQIGDQYADLFLAAKNLSDAILLSDILRVNTEITKAPLSASMIKRYDEHHQDLTLLKALVRQQLPEKYKEIFFDQSKNGYAGYIDGGASQEEFYKFIKPILEKMDGTEELLVKLNREDLLRKQRTFDNGSIPHQIHLGELHAILRRQEDFYPFLKDNREKIEKILTFRIPYYVGPLARGNSRFAWMTRKSEETITPWNFEEVVDKGASAQSFIERMTNFDKNLPNEKVLPKHSLLYEYFTVYNELTKVKYVTEGMRKPAFLSGEQKKAIVDLLFKTNRKVTVKQLKEDYFKKIECFDSVEISGVEDRFNASLGTYHDLLKIIKDKDFLDNEENEDILEDIVLTLTLFEDREMIEERLKTYAHLFDDKVMKQLKRRRYTGWGRLSRKLINGIRDKQSGKTILDFLKSDGFANRNFMQLIHDDSLTFKEDIQKAQVSGQGDSLHEHIANLAGSPAIKKGILQTVKVVDELVKVMGRHKPENIVIEMARENQTTQKGQKNSRERMKRIEEGIKELGSQILKEHPVENTQLQNEKLYLYYLQNGRDMYVDQELDINRLSDYDVDHIVPQSFLKDDSIDNKVLTRSDKARGKSDNVPSEEVVKKMKNYWRQLLNAKLITQRKFDNLTKAERGGLSELDKAGFIKRQLVETRQITKHVAQILDSRMNTKYDENDKLIREVKVITLKSKLVSDFRKDFQFYKVREINNYHHAHDAYLNAVVGTALIKKYPKLESEFVYGDYKVYDVRKMIAKSEQEIGKATAKYFFYSNIMNFFKTEITLANGEIRKRPLIETNGETGEIVWDKGRDFATVRKVLSMPQVNIVKKTEVQTGGFSKESILPKRNSDKLIARKKDWDPKKYGGFDSPTVAYSVLVVAKVEKGKSKKLKSVKELLGITIMERSSFEKNPIDFLEAKGYKEVKKDLIIKLPKYSLFELENGRKRMLASAGELQKGNELALPSKYVNFLYLASHYEKLKGSPEDNEQKQLFVEQHKHYLDEIIEQISEFSKRVILADANLDKVLSAYNKHRDKPIREQAENIIHLFTLTNLGAPAAFKYFDTTIDRKRYTSTKEVLDATLIHQSITGLYETRIDLSQLGGDGGEAAAKGGGGSEAAAKGGTLNIEDEYRLHETSKEPDVSLGSTWLSDFPQAWAETGGMGLAVRQAPLIIPLKATSTPVSIKQYPMSQEARLGIKPHIQRLLDQGILVPCQSPWNTPLLPVKKPGTNDYRPVQDLREVNKRVEDIHPTVPNPYNLLSGLPPSHQWYTVLDLKDAFFCLRLHPTSQPLFAFEWRDPEMGISGQLTWTRLPQGFKNSPTLFNEALHRDLAGFRIQHPDLILLQYVDDLLLAATSELDCQQGTRALLQTLGDLGYRASAKKAQICQKQVKYLGYLLKEGQRWLTEARKETVMGQPIPKTPRQLREFLGTAGFCRLWIPGFAEMAAPLYPLTKPGTLFNWGPDQQKAFQEIKQALLTAPALGLPDLTKPFELFVDEKQGYAKGVLTQKLGPWRRPVAYLSKKLDPVAAGWPPCLRMVAAIAVLTKDAGKLTMGQPLVILAPHAVEALVKQPPDRWLSNARMTHYQALLLDTDRVQFGPVVALNPATLLPLPEEGLQHDCLDILAEAHGTRSDLMDQPLPDADHTWYTDGSSFLQEGQRKAGAAVTTETEVIWARALPAGTSAQRAELIALTQALKMAEGKKLNVYTDSRYAFATAHIHGEIYRRRGWLTSEGKEIKNKDEILALLKALFLPKRLSIIHCPGHQKGNSAEARGNRMADQAAREVATRETPETSTLLAGKRTADGSEFEKRTADGSEFESPKKKAKVE

SEQ ID NO: 2227 - protein, 2091 aa, synthetic construct
MPAAKRVKLDGGDKKYSIGLDIGTNSVGWAVITDEYKVPSKKFKVLGNTDRHSIKKNLIGALLFDSGETAEATRLKRTARRRYTRRKNRICYLQEIFSNEMAKVDDSFFHRLEESFLVEEDKKHERHPIFGNIVDEVAYHEKYPTIYHLRKKLVDSTDKADLRLIYLALAHMIKFRGHFLIEGDLNPDNSDVDKLFIQLVQTYNQLFEENPINASGVDAKAILSARLSKSRRLENLIAQLPGEKKNGLFGNLIALSLGLTPNFKSNFDLAEDAKLQLSKDTYDDDLDNLLAQIGDQYADLFLAAKNLSDAILLSDILRVNTEITKAPLSASMIKRYDEHHQDLTLLKALVRQQLPEKYKEIFFDQSKNGYAGYIDGGASQEEFYKFIKPILEKMDGTEELLVKLNREDLLRKQRTFDNGSIPHQIHLGELHAILRRQEDFYPFLKDNREKIEKILTFRIPYYVGPLARGNSRFAWMTRKSEETITPWNFEEVVDKGASAQSFIERMTNFDKNLPNEKVLPKHSLLYEYFTVYNELTKVKYVTEGMRKPAFLSGEQKKAIVDLLFKTNRKVTVKQLKEDYFKKIECFDSVEISGVEDRFNASLGTYHDLLKIIKDKDFLDNEENEDILEDIVLTLTLFEDREMIEERLKTYAHLFDDKVMKQLKRRRYTGWGRLSRKLINGIRDKQSGKTILDFLKSDGFANRNFMQLIHDDSLTFKEDIQKAQVSGQGDSLHEHIANLAGSPAIKKGILQTVKVVDELVKVMGRHKPENIVIEMARENQTTQKGQKNSRERMKRIEEGIKELGSQILKEHPVENTQLQNEKLYLYYLQNGRDMYVDQELDINRLSDYDVDHIVPQSFLKDDSIDNKVLTRSDKARGKSDNVPSEEVVKKMKNYWRQLLNAKLITQRKFDNLTKAERGGLSELDKAGFIKRQLVETRQITKHVAQILDSRMNTKYDENDKLIREVKVITLKSKLVSDFRKDFQFYKVREINNYHHAHDAYLNAVVGTALIKKYPKLESEFVYGDYKVYDVRKMIAKSEQEIGKATAKYFFYSNIMNFFKTEITLANGEIRKRPLIETNGETGEIVWDKGRDFATVRKVLSMPQVNIVKKTEVQTGGFSKESILPKRNSDKLIARKKDWDPKKYGGFDSPTVAYSVLVVAKVEKGKSKKLKSVKELLGITIMERSSFEKNPIDFLEAKGYKEVKKDLIIKLPKYSLFELENGRKRMLASAGELQKGNELALPSKYVNFLYLASHYEKLKGSPEDNEQKQLFVEQHKHYLDEIIEQISEFSKRVILADANLDKVLSAYNKHRDKPIREQAENIIHLFTLTNLGAPAAFKYFDTTIDRKRYTSTKEVLDATLIHQSITGLYETRIDLSQLGGDGGGSSGSSGGTLNIEDEYRLHETSKEPDVSLGSTWLSDFPQAWAETGGMGLAVRQAPLIIPLKATSTPVSIKQYPMSQEARLGIKPHIQRLLDQGILVPCQSPWNTPLLPVKKPGTNDYRPVQDLREVNKRVEDIHPTVPNPYNLLSGLPPSHQWYTVLDLKDAFFCLRLHPTSQPLFAFEWRDPEMGISGQLTWTRLPQGFKNSPTLFNEALHRDLAGFRIQHPDLILLQYVDDLLLAATSELDCQQGTRALLQTLGDLGYRASAKKAQICQKQVKYLGYLLKEGQRWLTEARKETVMGQPIPKTPRQLREFLGTAGFCRLWIPGFAEMAAPLYPLTKPGTLFNWGPDQQKAFQEIKQALLTAPALGLPDLTKPFELFVDEKQGYAKGVLTQKLGPWRRPVAYLSKKLDPVAAGWPPCLRMVAAIAVLTKDAGKLTMGQPLVILAPHAVEALVKQPPDRWLSNARMTHYQALLLDTDRVQFGPVVALNPATLLPLPEEGLQHDCLDILAEAHGTRSDLMDQPLPDADHTWYTDGSSFLQEGQRKAGAAVTTETEVIWARALPAGTSAQRAELIALTQALKMAEGKKLNVYTDSRYAFATAHIHGEIYRRRGWLTSEGKEIKNKDEILALLKALFLPKRLSIIHCPGHQKGNSAEARGNRMADQAAREVATRETPETSTLLAGKRTADGSEFEKRTADGSEFESPKKKAKVE

SEQ ID NO: 2228 - protein, 2097 aa, synthetic construct
MPAAKRVKLDGGDKKYSIGLDIGTNSVGWAVITDEYKVPSKKFKVLGNTDRHSIKKNLIGALLFDSGETAEATRLKRTARRRYTRRKNRICYLQEIFSNEMAKVDDSFFHRLEESFLVEEDKKHERHPIFGNIVDEVAYHEKYPTIYHLRKKLVDSTDKADLRLIYLALAHMIKFRGHFLIEGDLNPDNSDVDKLFIQLVQTYNQLFEENPINASGVDAKAILSARLSKSRRLENLIAQLPGEKKNGLFGNLIALSLGLTPNFKSNFDLAEDAKLQLSKDTYDDDLDNLLAQIGDQYADLFLAAKNLSDAILLSDILRVNTEITKAPLSASMIKRYDEHHQDLTLLKALVRQQLPEKYKEIFFDQSKNGYAGYIDGGASQEEFYKFIKPILEKMDGTEELLVKLNREDLLRKQRTFDNGSIPHQIHLGELHAILRRQEDFYPFLKDNREKIEKILTFRIPYYVGPLARGNSRFAWMTRKSEETITPWNFEEVVDKGASAQSFIERMTNFDKNLPNEKVLPKHSLLYEYFTVYNELTKVKYVTEGMRKPAFLSGEQKKAIVDLLFKTNRKVTVKQLKEDYFKKIECFDSVEISGVEDRFNASLGTYHDLLKIIKDKDFLDNEENEDILEDIVLTLTLFEDREMIEERLKTYAHLFDDKVMKQLKRRRYTGWGRLSRKLINGIRDKQSGKTILDFLKSDGFANRNFMQLIHDDSLTFKEDIQKAQVSGQGDSLHEHIANLAGSPAIKKGILQTVKVVDELVKVMGRHKPENIVIEMARENQTTQKGQKNSRERMKRIEEGIKELGSQILKEHPVENTQLQNEKLYLYYLQNGRDMYVDQELDINRLSDYDVDHIVPQSFLKDDSIDNKVLTRSDKARGKSDNVPSEEVVKKMKNYWRQLLNAKLITQRKFDNLTKAERGGLSELDKAGFIKRQLVETRQITKHVAQILDSRMNTKYDENDKLIREVKVITLKSKLVSDFRKDFQFYKVREINNYHHAHDAYLNAVVGTALIKKYPKLESEFVYGDYKVYDVRKMIAKSEQEIGKATAKYFFYSNIMNFFKTEITLANGEIRKRPLIETNGETGEIVWDKGRDFATVRKVLSMPQVNIVKKTEVQTGGFSKESILPKRNSDKLIARKKDWDPKKYGGFDSPTVAYSVLVVAKVEKGKSKKLKSVKELLGITIMERSSFEKNPIDFLEAKGYKEVKKDLIIKLPKYSLFELENGRKRMLASAGELQKGNELALPSKYVNFLYLASHYEKLKGSPEDNEQKQLFVEQHKHYLDEIIEQISEFSKRVILADANLDKVLSAYNKHRDKPIREQAENIIHLFTLTNLGAPAAFKYFDTTIDRKRYTSTKEVLDATLIHQSITGLYETRIDLSQLGGDGGGSAGSAAGSGEFGGTLNIEDEYRLHETSKEPDVSLGSTWLSDFPQAWAETGGMGLAVRQAPLIIPLKATSTPVSIKQYPMSQEARLGIKPHIQRLLDQGILVPCQSPWNTPLLPVKKPGTNDYRPVQDLREVNKRVEDIHPTVPNPYNLLSGLPPSHQWYTVLDLKDAFFCLRLHPTSQPLFAFEWRDPEMGISGQLTWTRLPQGFKNSPTLFNEALHRDLAGFRIQHPDLILLQYVDDLLLAATSELDCQQGTRALLQTLGDLGYRASAKKAQICQKQVKYLGYLLKEGQRWLTEARKETVMGQPIPKTPRQLREFLGTAGFCRLWIPGFAEMAAPLYPLTKPGTLFNWGPDQQKAFQEIKQALLTAPALGLPDLTKPFELFVDEKQGYAKGVLTQKLGPWRRPVAYLSKKLDPVAAGWPPCLRMVAAIAVLTKDAGKLTMGQPLVILAPHAVEALVKQPPDRWLSNARMTHYQALLLDTDRVQFGPVVALNPATLLPLPEEGLQHDCLDILAEAHGTRSDLMDQPLPDADHTWYTDGSSFLQEGQRKAGAAVTTETEVIWARALPAGTSAQRAELIALTQALKMAEGKKLNVYTDSRYAFATAHIHGEIYRRRGWLTSEGKEIKNKDEILALLKALFLPKRLSIIHCPGHQKGNSAEARGNRMADQAAREVATRETPETSTLLAGKRTADGSEFEKRTADGSEFESPKKKAKVE

SEQ ID NO: 2229 - protein, 2088 aa, synthetic construct
MPAAKRVKLDGGDKKYSIGLDIGTNSVGWAVITDEYKVPSKKFKVLGNTDRHSIKKNLIGALLFDSGETAEATRLKRTARRRYTRRKNRICYLQEIFSNEMAKVDDSFFHRLEESFLVEEDKKHERHPIFGNIVDEVAYHEKYPTIYHLRKKLVDSTDKADLRLIYLALAHMIKFRGHFLIEGDLNPDNSDVDKLFIQLVQTYNQLFEENPINASGVDAKAILSARLSKSRRLENLIAQLPGEKKNGLFGNLIALSLGLTPNFKSNFDLAEDAKLQLSKDTYDDDLDNLLAQIGDQYADLFLAAKNLSDAILLSDILRVNTEITKAPLSASMIKRYDEHHQDLTLLKALVRQQLPEKYKEIFFDQSKNGYAGYIDGGASQEEFYKFIKPILEKMDGTEELLVKLNREDLLRKQRTFDNGSIPHQIHLGELHAILRRQEDFYPFLKDNREKIEKILTFRIPYYVGPLARGNSRFAWMTRKSEETITPWNFEEVVDKGASAQSFIERMTNFDKNLPNEKVLPKHSLLYEYFTVYNELTKVKYVTEGMRKPAFLSGEQKKAIVDLLFKTNRKVTVKQLKEDYFKKIECFDSVEISGVEDRFNASLGTYHDLLKIIKDKDFLDNEENEDILEDIVLTLTLFEDREMIEERLKTYAHLFDDKVMKQLKRRRYTGWGRLSRKLINGIRDKQSGKTILDFLKSDGFANRNFMQLIHDDSLTFKEDIQKAQVSGQGDSLHEHIANLAGSPAIKKGILQTVKVVDELVKVMGRHKPENIVIEMARENQTTQKGQKNSRERMKRIEEGIKELGSQILKEHPVENTQLQNEKLYLYYLQNGRDMYVDQELDINRLSDYDVDHIVPQSFLKDDSIDNKVLTRSDKARGKSDNVPSEEVVKKMKNYWRQLLNAKLITQRKFDNLTKAERGGLSELDKAGFIKRQLVETRQITKHVAQILDSRMNTKYDENDKLIREVKVITLKSKLVSDFRKDFQFYKVREINNYHHAHDAYLNAVVGTALIKKYPKLESEFVYGDYKVYDVRKMIAKSEQEIGKATAKYFFYSNIMNFFKTEITLANGEIRKRPLIETNGETGEIVWDKGRDFATVRKVLSMPQVNIVKKTEVQTGGFSKESILPKRNSDKLIARKKDWDPKKYGGFDSPTVAYSVLVVAKVEKGKSKKLKSVKELLGITIMERSSFEKNPIDFLEAKGYKEVKKDLIIKLPKYSLFELENGRKRMLASAGELQKGNELALPSKYVNFLYLASHYEKLKGSPEDNEQKQLFVEQHKHYLDEIIEQISEFSKRVILADANLDKVLSAYNKHRDKPIREQAENIIHLFTLTNLGAPAAFKYFDTTIDRKRYTSTKEVLDATLIHQSITGLYETRIDLSQLGGDGGGGGGGTLNIEDEYRLHETSKEPDVSLGSTWLSDFPQAWAETGGMGLAVRQAPLIIPLKATSTPVSIKQYPMSQEARLGIKPHIQRLLDQGILVPCQSPWNTPLLPVKKPGTNDYRPVQDLREVNKRVEDIHPTVPNPYNLLSGLPPSHQWYTVLDLKDAFFCLRLHPTSQPLFAFEWRDPEMGISGQLTWTRLPQGFKNSPTLFNEALHRDLAGFRIQHPDLILLQYVDDLLLAATSELDCQQGTRALLQTLGDLGYRASAKKAQICQKQVKYLGYLLKEGQRWLTEARKETVMGQPIPKTPRQLREFLGTAGFCRLWIPGFAEMAAPLYPLTKPGTLFNWGPDQQKAFQEIKQALLTAPALGLPDLTKPFELFVDEKQGYAKGVLTQKLGPWRRPVAYLSKKLDPVAAGWPPCLRMVAAIAVLTKDAGKLTMGQPLVILAPHAVEALVKQPPDRWLSNARMTHYQALLLDTDRVQFGPVVALNPATLLPLPEEGLQHDCLDILAEAHGTRSDLMDQPLPDADHTWYTDGSSFLQEGQRKAGAAVTTETEVIWARALPAGTSAQRAELIALTQALKMAEGKKLNVYTDSRYAFATAHIHGEIYRRRGWLTSEGKEIKNKDEILALLKALFLPKRLSIIHCPGHQKGNSAEARGNRMADQAAREVATRETPETSTLLAGKRTADGSEFEKRTADGSEFESPKKKAKVE

SEQ ID NO: 2230 - protein, 2096 aa, synthetic construct
MPAAKRVKLDGGDKKYSIGLDIGTNSVGWAVITDEYKVPSKKFKVLGNTDRHSIKKNLIGALLFDSGETAEATRLKRTARRRYTRRKNRICYLQEIFSNEMAKVDDSFFHRLEESFLVEEDKKHERHPIFGNIVDEVAYHEKYPTIYHLRKKLVDSTDKADLRLIYLALAHMIKFRGHFLIEGDLNPDNSDVDKLFIQLVQTYNQLFEENPINASGVDAKAILSARLSKSRRLENLIAQLPGEKKNGLFGNLIALSLGLTPNFKSNFDLAEDAKLQLSKDTYDDDLDNLLAQIGDQYADLFLAAKNLSDAILLSDILRVNTEITKAPLSASMIKRYDEHHQDLTLLKALVRQQLPEKYKEIFFDQSKNGYAGYIDGGASQEEFYKFIKPILEKMDGTEELLVKLNREDLLRKQRTFDNGSIPHQIHLGELHAILRRQEDFYPFLKDNREKIEKILTFRIPYYVGPLARGNSRFAWMTRKSEETITPWNFEEVVDKGASAQSFIERMTNFDKNLPNEKVLPKHSLLYEYFTVYNELTKVKYVTEGMRKPAFLSGEQKKAIVDLLFKTNRKVTVKQLKEDYFKKIECFDSVEISGVEDRFNASLGTYHDLLKIIKDKDFLDNEENEDILEDIVLTLTLFEDREMIEERLKTYAHLFDDKVMKQLKRRRYTGWGRLSRKLINGIRDKQSGKTILDFLKSDGFANRNFMQLIHDDSLTFKEDIQKAQVSGQGDSLHEHIANLAGSPAIKKGILQTVKVVDELVKVMGRHKPENIVIEMARENQTTQKGQKNSRERMKRIEEGIKELGSQILKEHPVENTQLQNEKLYLYYLQNGRDMYVDQELDINRLSDYDVDHIVPQSFLKDDSIDNKVLTRSDKARGKSDNVPSEEVVKKMKNYWRQLLNAKLITQRKFDNLTKAERGGLSELDKAGFIKRQLVETRQITKHVAQILDSRMNTKYDENDKLIREVKVITLKSKLVSDFRKDFQFYKVREINNYHHAHDAYLNAVVGTALIKKYPKLESEFVYGDYKVYDVRKMIAKSEQEIGKATAKYFFYSNIMNFFKTEITLANGEIRKRPLIETNGETGEIVWDKGRDFATVRKVLSMPQVNIVKKTEVQTGGFSKESILPKRNSDKLIARKKDWDPKKYGGFDSPTVAYSVLVVAKVEKGKSKKLKSVKELLGITIMERSSFEKNPIDFLEAKGYKEVKKDLIIKLPKYSLFELENGRKRMLASAGELQKGNELALPSKYVNFLYLASHYEKLKGSPEDNEQKQLFVEQHKHYLDEIIEQISEFSKRVILADANLDKVLSAYNKHRDKPIREQAENIIHLFTLTNLGAPAAFKYFDTTIDRKRYTSTKEVLDATLIHQSITGLYETRIDLSQLGGDGGEAAAKPAPGGGGGTLNIEDEYRLHETSKEPDVSLGSTWLSDFPQAWAETGGMGLAVRQAPLIIPLKATSTPVSIKQYPMSQEARLGIKPHIQRLLDQGILVPCQSPWNTPLLPVKKPGTNDYRPVQDLREVNKRVEDIHPTVPNPYNLLSGLPPSHQWYTVLDLKDAFFCLRLHPTSQPLFAFEWRDPEMGISGQLTWTRLPQGFKNSPTLFNEALHRDLAGFRIQHPDLILLQYVDDLLLAATSELDCQQGTRALLQTLGDLGYRASAKKAQICQKQVKYLGYLLKEGQRWLTEARKETVMGQPIPKTPRQLREFLGTAGFCRLWIPGFAEMAAPLYPLTKPGTLFNWGPDQQKAFQEIKQALLTAPALGLPDLTKPFELFVDEKQGYAKGVLTQKLGPWRRPVAYLSKKLDPVAAGWPPCLRMVAAIAVLTKDAGKLTMGQPLVILAPHAVEALVKQPPDRWLSNARMTHYQALLLDTDRVQFGPVVALNPATLLPLPEEGLQHDCLDILAEAHGTRSDLMDQPLPDADHTWYTDGSSFLQEGQRKAGAAVTTETEVIWARALPAGTSAQRAELIALTQALKMAEGKKLNVYTDSRYAFATAHIHGEIYRRRGWLTSEGKEIKNKDEILALLKALFLPKRLSIIHCPGHQKGNSAEARGNRMADQAAREVATRETPETSTLLAGKRTADGSEFEKRTADGSEFESPKKKAKVE

SEQ ID NO: 2231 - protein, 2094 aa, synthetic construct
MPAAKRVKLDGGDKKYSIGLDIGTNSVGWAVITDEYKVPSKKFKVLGNTDRHSIKKNLIGALLFDSGETAEATRLKRTARRRYTRRKNRICYLQEIFSNEMAKVDDSFFHRLEESFLVEEDKKHERHPIFGNIVDEVAYHEKYPTIYHLRKKLVDSTDKADLRLIYLALAHMIKFRGHFLIEGDLNPDNSDVDKLFIQLVQTYNQLFEENPINASGVDAKAILSARLSKSRRLENLIAQLPGEKKNGLFGNLIALSLGLTPNFKSNFDLAEDAKLQLSKDTYDDDLDNLLAQIGDQYADLFLAAKNLSDAILLSDILRVNTEITKAPLSASMIKRYDEHHQDLTLLKALVRQQLPEKYKEIFFDQSKNGYAGYIDGGASQEEFYKFIKPILEKMDGTEELLVKLNREDLLRKQRTFDNGSIPHQIHLGELHAILRRQEDFYPFLKDNREKIEKILTFRIPYYVGPLARGNSRFAWMTRKSEETITPWNFEEVVDKGASAQSFIERMTNFDKNLPNEKVLPKHSLLYEYFTVYNELTKVKYVTEGMRKPAFLSGEQKKAIVDLLFKTNRKVTVKQLKEDYFKKIECFDSVEISGVEDRFNASLGTYHDLLKIIKDKDFLDNEENEDILEDIVLTLTLFEDREMIEERLKTYAHLFDDKVMKQLKRRRYTGWGRLSRKLINGIRDKQSGKTILDFLKSDGFANRNFMQLIHDDSLTFKEDIQKAQVSGQGDSLHEHIANLAGSPAIKKGILQTVKVVDELVKVMGRHKPENIVIEMARENQTTQKGQKNSRERMKRIEEGIKELGSQILKEHPVENTQLQNEKLYLYYLQNGRDMYVDQELDINRLSDYDVDHIVPQSFLKDDSIDNKVLTRSDKARGKSDNVPSEEVVKKMKNYWRQLLNAKLITQRKFDNLTKAERGGLSELDKAGFIKRQLVETRQITKHVAQILDSRMNTKYDENDKLIREVKVITLKSKLVSDFRKDFQFYKVREINNYHHAHDAYLNAVVGTALIKKYPKLESEFVYGDYKVYDVRKMIAKSEQEIGKATAKYFFYSNIMNFFKTEITLANGEIRKRPLIETNGETGEIVWDKGRDFATVRKVLSMPQVNIVKKTEVQTGGFSKESILPKRNSDKLIARKKDWDPKKYGGFDSPTVAYSVLVVAKVEKGKSKKLKSVKELLGITIMERSSFEKNPIDFLEAKGYKEVKKDLIIKLPKYSLFELENGRKRMLASAGELQKGNELALPSKYVNFLYLASHYEKLKGSPEDNEQKQLFVEQHKHYLDEIIEQISEFSKRVILADANLDKVLSAYNKHRDKPIREQAENIIHLFTLTNLGAPAAFKYFDTTIDRKRYTSTKEVLDATLIHQSITGLYETRIDLSQLGGDGGGGGGGSGSSGGTLNIEDEYRLHETSKEPDVSLGSTWLSDFPQAWAETGGMGLAVRQAPLIIPLKATSTPVSIKQYPMSQEARLGIKPHIQRLLDQGILVPCQSPWNTPLLPVKKPGTNDYRPVQDLREVNKRVEDIHPTVPNPYNLLSGLPPSHQWYTVLDLKDAFFCLRLHPTSQPLFAFEWRDPEMGISGQLTWTRLPQGFKNSPTLFNEALHRDLAGFRIQHPDLILLQYVDDLLLAATSELDCQQGTRALLQTLGDLGYRASAKKAQICQKQVKYLGYLLKEGQRWLTEARKETVMGQPIPKTPRQLREFLGTAGFCRLWIPGFAEMAAPLYPLTKPGTLFNWGPDQQKAFQEIKQALLTAPALGLPDLTKPFELFVDEKQGYAKGVLTQKLGPWRRPVAYLSKKLDPVAAGWPPCLRMVAAIAVLTKDAGKLTMGQPLVILAPHAVEALVKQPPDRWLSNARMTHYQALLLDTDRVQFGPVVALNPATLLPLPEEGLQHDCLDILAEAHGTRSDLMDQPLPDADHTWYTDGSSFLQEGQRKAGAAVTTETEVIWARALPAGTSAQRAELIALTQALKMAEGKKLNVYTDSRYAFATAHIHGEIYRRRGWLTSEGKEIKNKDEILALLKALFLPKRLSIIHCPGHQKGNSAEARGNRMADQAAREVATRETPETSTLLAGKRTADGSEFEKRTADGSEFESPKKKAKVE

SEQ ID NO: 2232 - protein, 2096 aa, synthetic construct
MPAAKRVKLDGGDKKYSIGLDIGTNSVGWAVITDEYKVPSKKFKVLGNTDRHSIKKNLIGALLFDSGETAEATRLKRTARRRYTRRKNRICYLQEIFSNEMAKVDDSFFHRLEESFLVEEDKKHERHPIFGNIVDEVAYHEKYPTIYHLRKKLVDSTDKADLRLIYLALAHMIKFRGHFLIEGDLNPDNSDVDKLFIQLVQTYNQLFEENPINASGVDAKAILSARLSKSRRLENLIAQLPGEKKNGLFGNLIALSLGLTPNFKSNFDLAEDAKLQLSKDTYDDDLDNLLAQIGDQYADLFLAAKNLSDAILLSDILRVNTEITKAPLSASMIKRYDEHHQDLTLLKALVRQQLPEKYKEIFFDQSKNGYAGYIDGGASQEEFYKFIKPILEKMDGTEELLVKLNREDLLRKQRTFDNGSIPHQIHLGELHAILRRQEDFYPFLKDNREKIEKILTFRIPYYVGPLARGNSRFAWMTRKSEETITPWNFEEVVDKGASAQSFIERMTNFDKNLPNEKVLPKHSLLYEYFTVYNELTKVKYVTEGMRKPAFLSGEQKKAIVDLLFKTNRKVTVKQLKEDYFKKIECFDSVEISGVEDRFNASLGTYHDLLKIIKDKDFLDNEENEDILEDIVLTLTLFEDREMIEERLKTYAHLFDDKVMKQLKRRRYTGWGRLSRKLINGIRDKQSGKTILDFLKSDGFANRNFMQLIHDDSLTFKEDIQKAQVSGQGDSLHEHIANLAGSPAIKKGILQTVKVVDELVKVMGRHKPENIVIEMARENQTTQKGQKNSRERMKRIEEGIKELGSQILKEHPVENTQLQNEKLYLYYLQNGRDMYVDQELDINRLSDYDVDHIVPQSFLKDDSIDNKVLTRSDKARGKSDNVPSEEVVKKMKNYWRQLLNAKLITQRKFDNLTKAERGGLSELDKAGFIKRQLVETRQITKHVAQILDSRMNTKYDENDKLIREVKVITLKSKLVSDFRKDFQFYKVREINNYHHAHDAYLNAVVGTALIKKYPKLESEFVYGDYKVYDVRKMIAKSEQEIGKATAKYFFYSNIMNFFKTEITLANGEIRKRPLIETNGETGEIVWDKGRDFATVRKVLSMPQVNIVKKTEVQTGGFSKESILPKRNSDKLIARKKDWDPKKYGGFDSPTVAYSVLVVAKVEKGKSKKLKSVKELLGITIMERSSFEKNPIDFLEAKGYKEVKKDLIIKLPKYSLFELENGRKRMLASAGELQKGNELALPSKYVNFLYLASHYEKLKGSPEDNEQKQLFVEQHKHYLDEIIEQISEFSKRVILADANLDKVLSAYNKHRDKPIREQAENIIHLFTLTNLGAPAAFKYFDTTIDRKRYTSTKEVLDATLIHQSITGLYETRIDLSQLGGDGGPAPEAAAKGGSGGTLNIEDEYRLHETSKEPDVSLGSTWLSDFPQAWAETGGMGLAVRQAPLIIPLKATSTPVSIKQYPMSQEARLGIKPHIQRLLDQGILVPCQSPWNTPLLPVKKPGTNDYRPVQDLREVNKRVEDIHPTVPNPYNLLSGLPPSHQWYTVLDLKDAFFCLRLHPTSQPLFAFEWRDPEMGISGQLTWTRLPQGFKNSPTLFNEALHRDLAGFRIQHPDLILLQYVDDLLLAATSELDCQQGTRALLQTLGDLGYRASAKKAQICQKQVKYLGYLLKEGQRWLTEARKETVMGQPIPKTPRQLREFLGTAGFCRLWIPGFAEMAAPLYPLTKPGTLFNWGPDQQKAFQEIKQALLTAPALGLPDLTKPFELFVDEKQGYAKGVLTQKLGPWRRPVAYLSKKLDPVAAGWPPCLRMVAAIAVLTKDAGKLTMGQPLVILAPHAVEALVKQPPDRWLSNARMTHYQALLLDTDRVQFGPVVALNPATLLPLPEEGLQHDCLDILAEAHGTRSDLMDQPLPDADHTWYTDGSSFLQEGQRKAGAAVTTETEVIWARALPAGTSAQRAELIALTQALKMAEGKKLNVYTDSRYAFATAHIHGEIYRRRGWLTSEGKEIKNKDEILALLKALFLPKRLSIIHCPGHQKGNSAEARGNRMADQAAREVATRETPETSTLLAGKRTADGSEFEKRTADGSEFESPKKKAKVE

SEQ ID NO: 2233 - protein, 2093 aa, synthetic construct
MPAAKRVKLDGGDKKYSIGLDIGTNSVGWAVITDEYKVPSKKFKVLGNTDRHSIKKNLIGALLFDSGETAEATRLKRTARRRYTRRKNRICYLQEIFSNEMAKVDDSFFHRLEESFLVEEDKKHERHPIFGNIVDEVAYHEKYPTIYHLRKKLVDSTDKADLRLIYLALAHMIKFRGHFLIEGDLNPDNSDVDKLFIQLVQTYNQLFEENPINASGVDAKAILSARLSKSRRLENLIAQLPGEKKNGLFGNLIALSLGLTPNFKSNFDLAEDAKLQLSKDTYDDDLDNLLAQIGDQYADLFLAAKNLSDAILLSDILRVNTEITKAPLSASMIKRYDEHHQDLTLLKALVRQQLPEKYKEIFFDQSKNGYAGYIDGGASQEEFYKFIKPILEKMDGTEELLVKLNREDLLRKQRTFDNGSIPHQIHLGELHAILRRQEDFYPFLKDNREKIEKILTFRIPYYVGPLARGNSRFAWMTRKSEETITPWNFEEVVDKGASAQSFIERMTNFDKNLPNEKVLPKHSLLYEYFTVYNELTKVKYVTEGMRKPAFLSGEQKKAIVDLLFKTNRKVTVKQLKEDYFKKIECFDSVEISGVEDRFNASLGTYHDLLKIIKDKDFLDNEENEDILEDIVLTLTLFEDREMIEERLKTYAHLFDDKVMKQLKRRRYTGWGRLSRKLINGIRDKQSGKTILDFLKSDGFANRNFMQLIHDDSLTFKEDIQKAQVSGQGDSLHEHIANLAGSPAIKKGILQTVKVVDELVKVMGRHKPENIVIEMARENQTTQKGQKNSRERMKRIEEGIKELGSQILKEHPVENTQLQNEKLYLYYLQNGRDMYVDQELDINRLSDYDVDHIVPQSFLKDDSIDNKVLTRSDKARGKSDNVPSEEVVKKMKNYWRQLLNAKLITQRKFDNLTKAERGGLSELDKAGFIKRQLVETRQITKHVAQILDSRMNTKYDENDKLIREVKVITLKSKLVSDFRKDFQFYKVREINNYHHAHDAYLNAVVGTALIKKYPKLESEFVYGDYKVYDVRKMIAKSEQEIGKATAKYFFYSNIMNFFKTEITLANGEIRKRPLIETNGETGEIVWDKGRDFATVRKVLSMPQVNIVKKTEVQTGGFSKESILPKRNSDKLIARKKDWDPKKYGGFDSPTVAYSVLVVAKVEKGKSKKLKSVKELLGITIMERSSFEKNPIDFLEAKGYKEVKKDLIIKLPKYSLFELENGRKRMLASAGELQKGNELALPSKYVNFLYLASHYEKLKGSPEDNEQKQLFVEQHKHYLDEIIEQISEFSKRVILADANLDKVLSAYNKHRDKPIREQAENIIHLFTLTNLGAPAAFKYFDTTIDRKRYTSTKEVLDATLIHQSITGLYETRIDLSQLGGDGGGSSEAAAKGGTLNIEDEYRLHETSKEPDVSLGSTWLSDFPQAWAETGGMGLAVRQAPLIIPLKATSTPVSIKQYPMSQEARLGIKPHIQRLLDQGILVPCQSPWNTPLLPVKKPGTNDYRPVQDLREVNKRVEDIHPTVPNPYNLLSGLPPSHQWYTVLDLKDAFFCLRLHPTSQPLFAFEWRDPEMGISGQLTWTRLPQGFKNSPTLFNEALHRDLAGFRIQHPDLILLQYVDDLLLAATSELDCQQGTRALLQTLGDLGYRASAKKAQICQKQVKYLGYLLKEGQRWLTEARKETVMGQPIPKTPRQLREFLGTAGFCRLWIPGFAEMAAPLYPLTKPGTLFNWGPDQQKAFQEIKQALLTAPALGLPDLTKPFELFVDEKQGYAKGVLTQKLGPWRRPVAYLSKKLDPVAAGWPPCLRMVAAIAVLTKDAGKLTMGQPLVILAPHAVEALVKQPPDRWLSNARMTHYQALLLDTDRVQFGPVVALNPATLLPLPEEGLQHDCLDILAEAHGTRSDLMDQPLPDADHTWYTDGSSFLQEGQRKAGAAVTTETEVIWARALPAGTSAQRAELIALTQALKMAEGKKLNVYTDSRYAFATAHIHGEIYRRRGWLTSEGKEIKNKDEILALLKALFLPKRLSIIHCPGHQKGNSAEARGNRMADQAAREVATRETPETSTLLAGKRTADGSEFEKRTADGSEFESPKKKAKVE

SEQ ID NO: 2234 - protein, 2094 aa, synthetic construct
MPAAKRVKLDGGDKKYSIGLDIGTNSVGWAVITDEYKVPSKKFKVLGNTDRHSIKKNLIGALLFDSGETAEATRLKRTARRRYTRRKNRICYLQEIFSNEMAKVDDSFFHRLEESFLVEEDKKHERHPIFGNIVDEVAYHEKYPTIYHLRKKLVDSTDKADLRLIYLALAHMIKFRGHFLIEGDLNPDNSDVDKLFIQLVQTYNQLFEENPINASGVDAKAILSARLSKSRRLENLIAQLPGEKKNGLFGNLIALSLGLTPNFKSNFDLAEDAKLQLSKDTYDDDLDNLLAQIGDQYADLFLAAKNLSDAILLSDILRVNTEITKAPLSASMIKRYDEHHQDLTLLKALVRQQLPEKYKEIFFDQSKNGYAGYIDGGASQEEFYKFIKPILEKMDGTEELLVKLNREDLLRKQRTFDNGSIPHQIHLGELHAILRRQEDFYPFLKDNREKIEKILTFRIPYYVGPLARGNSRFAWMTRKSEETITPWNFEEVVDKGASAQSFIERMTNFDKNLPNEKVLPKHSLLYEYFTVYNELTKVKYVTEGMRKPAFLSGEQKKAIVDLLFKTNRKVTVKQLKEDYFKKIECFDSVEISGVEDRFNASLGTYHDLLKIIKDKDFLDNEENEDILEDIVLTLTLFEDREMIEERLKTYAHLFDDKVMKQLKRRRYTGWGRLSRKLINGIRDKQSGKTILDFLKSDGFANRNFMQLIHDDSLTFKEDIQKAQVSGQGDSLHEHIANLAGSPAIKKGILQTVKVVDELVKVMGRHKPENIVIEMARENQTTQKGQKNSRERMKRIEEGIKELGSQILKEHPVENTQLQNEKLYLYYLQNGRDMYVDQELDINRLSDYDVDHIVPQSFLKDDSIDNKVLTRSDKARGKSDNVPSEEVVKKMKNYWRQLLNAKLITQRKFDNLTKAERGGLSELDKAGFIKRQLVETRQITKHVAQILDSRMNTKYDENDKLIREVKVITLKSKLVSDFRKDFQFYKVREINNYHHAHDAYLNAVVGTALIKKYPKLESEFVYGDYKVYDVRKMIAKSEQEIGKATAKYFFYSNIMNFFKTEITLANGEIRKRPLIETNGETGEIVWDKGRDFATVRKVLSMPQVNIVKKTEVQTGGFSKESILPKRNSDKLIARKKDWDPKKYGGFDSPTVAYSVLVVAKVEKGKSKKLKSVKELLGITIMERSSFEKNPIDFLEAKGYKEVKKDLIIKLPKYSLFELENGRKRMLASAGELQKGNELALPSKYVNFLYLASHYEKLKGSPEDNEQKQLFVEQHKHYLDEIIEQISEFSKRVILADANLDKVLSAYNKHRDKPIREQAENIIHLFTLTNLGAPAAFKYFDTTIDRKRYTSTKEVLDATLIHQSITGLYETRIDLSQLGGDGGPAPGGGGSSGGTLNIEDEYRLHETSKEPDVSLGSTWLSDFPQAWAETGGMGLAVRQAPLIIPLKATSTPVSIKQYPMSQEARLGIKPHIQRLLDQGILVPCQSPWNTPLLPVKKPGTNDYRPVQDLREVNKRVEDIHPTVPNPYNLLSGLPPSHQWYTVLDLKDAFFCLRLHPTSQPLFAFEWRDPEMGISGQLTWTRLPQGFKNSPTLFNEALHRDLAGFRIQHPDLILLQYVDDLLLAATSELDCQQGTRALLQTLGDLGYRASAKKAQICQKQVKYLGYLLKEGQRWLTEARKETVMGQPIPKTPRQLREFLGTAGFCRLWIPGFAEMAAPLYPLTKPGTLFNWGPDQQKAFQEIKQALLTAPALGLPDLTKPFELFVDEKQGYAKGVLTQKLGPWRRPVAYLSKKLDPVAAGWPPCLRMVAAIAVLTKDAGKLTMGQPLVILAPHAVEALVKQPPDRWLSNARMTHYQALLLDTDRVQFGPVVALNPATLLPLPEEGLQHDCLDILAEAHGTRSDLMDQPLPDADHTWYTDGSSFLQEGQRKAGAAVTTETEVIWARALPAGTSAQRAELIALTQALKMAEGKKLNVYTDSRYAFATAHIHGEIYRRRGWLTSEGKEIKNKDEILALLKALFLPKRLSIIHCPGHQKGNSAEARGNRMADQAAREVATRETPETSTLLAGKRTADGSEFEKRTADGSEFESPKKKAKVE

SEQ ID NO: 2235 - protein, 2096 aa, synthetic construct
MPAAKRVKLDGGDKKYSIGLDIGTNSVGWAVITDEYKVPSKKFKVLGNTDRHSIKKNLIGALLFDSGETAEATRLKRTARRRYTRRKNRICYLQEIFSNEMAKVDDSFFHRLEESFLVEEDKKHERHPIFGNIVDEVAYHEKYPTIYHLRKKLVDSTDKADLRLIYLALAHMIKFRGHFLIEGDLNPDNSDVDKLFIQLVQTYNQLFEENPINASGVDAKAILSARLSKSRRLENLIAQLPGEKKNGLFGNLIALSLGLTPNFKSNFDLAEDAKLQLSKDTYDDDLDNLLAQIGDQYADLFLAAKNLSDAILLSDILRVNTEITKAPLSASMIKRYDEHHQDLTLLKALVRQQLPEKYKEIFFDQSKNGYAGYIDGGASQEEFYKFIKPILEKMDGTEELLVKLNREDLLRKQRTFDNGSIPHQIHLGELHAILRRQEDFYPFLKDNREKIEKILTFRIPYYVGPLARGNSRFAWMTRKSEETITPWNFEEVVDKGASAQSFIERMTNFDKNLPNEKVLPKHSLLYEYFTVYNELTKVKYVTEGMRKPAFLSGEQKKAIVDLLFKTNRKVTVKQLKEDYFKKIECFDSVEISGVEDRFNASLGTYHDLLKIIKDKDFLDNEENEDILEDIVLTLTLFEDREMIEERLKTYAHLFDDKVMKQLKRRRYTGWGRLSRKLINGIRDKQSGKTILDFLKSDGFANRNFMQLIHDDSLTFKEDIQKAQVSGQGDSLHEHIANLAGSPAIKKGILQTVKVVDELVKVMGRHKPENIVIEMARENQTTQKGQKNSRERMKRIEEGIKELGSQILKEHPVENTQLQNEKLYLYYLQNGRDMYVDQELDINRLSDYDVDHIVPQSFLKDDSIDNKVLTRSDKARGKSDNVPSEEVVKKMKNYWRQLLNAKLITQRKFDNLTKAERGGLSELDKAGFIKRQLVETRQITKHVAQILDSRMNTKYDENDKLIREVKVITLKSKLVSDFRKDFQFYKVREINNYHHAHDAYLNAVVGTALIKKYPKLESEFVYGDYKVYDVRKMIAKSEQEIGKATAKYFFYSNIMNFFKTEITLANGEIRKRPLIETNGETGEIVWDKGRDFATVRKVLSMPQVNIVKKTEVQTGGFSKESILPKRNSDKLIARKKDWDPKKYGGFDSPTVAYSVLVVAKVEKGKSKKLKSVKELLGITIMERSSFEKNPIDFLEAKGYKEVKKDLIIKLPKYSLFELENGRKRMLASAGELQKGNELALPSKYVNFLYLASHYEKLKGSPEDNEQKQLFVEQHKHYLDEIIEQISEFSKRVILADANLDKVLSAYNKHRDKPIREQAENIIHLFTLTNLGAPAAFKYFDTTIDRKRYTSTKEVLDATLIHQSITGLYETRIDLSQLGGDGGEAAAKGSSPAPGGTLNIEDEYRLHETSKEPDVSLGSTWLSDFPQAWAETGGMGLAVRQAPLIIPLKATSTPVSIKQYPMSQEARLGIKPHIQRLLDQGILVPCQSPWNTPLLPVKKPGTNDYRPVQDLREVNKRVEDIHPTVPNPYNLLSGLPPSHQWYTVLDLKDAFFCLRLHPTSQPLFAFEWRDPEMGISGQLTWTRLPQGFKNSPTLFNEALHRDLAGFRIQHPDLILLQYVDDLLLAATSELDCQQGTRALLQTLGDLGYRASAKKAQICQKQVKYLGYLLKEGQRWLTEARKETVMGQPIPKTPRQLREFLGTAGFCRLWIPGFAEMAAPLYPLTKPGTLFNWGPDQQKAFQEIKQALLTAPALGLPDLTKPFELFVDEKQGYAKGVLTQKLGPWRRPVAYLSKKLDPVAAGWPPCLRMVAAIAVLTKDAGKLTMGQPLVILAPHAVEALVKQPPDRWLSNARMTHYQALLLDTDRVQFGPVVALNPATLLPLPEEGLQHDCLDILAEAHGTRSDLMDQPLPDADHTWYTDGSSFLQEGQRKAGAAVTTETEVIWARALPAGTSAQRAELIALTQALKMAEGKKLNVYTDSRYAFATAHIHGEIYRRRGWLTSEGKEIKNKDEILALLKALFLPKRLSIIHCPGHQKGNSAEARGNRMADQAAREVATRETPETSTLLAGKRTADGSEFEKRTADGSEFESPKKKAKVE

SEQ ID NO: 2236 - protein, 2095 aa, synthetic construct
MPAAKRVKLDGGDKKYSIGLDIGTNSVGWAVITDEYKVPSKKFKVLGNTDRHSIKKNLIGALLFDSGETAEATRLKRTARRRYTRRKNRICYLQEIFSNEMAKVDDSFFHRLEESFLVEEDKKHERHPIFGNIVDEVAYHEKYPTIYHLRKKLVDSTDKADLRLIYLALAHMIKFRGHFLIEGDLNPDNSDVDKLFIQLVQTYNQLFEENPINASGVDAKAILSARLSKSRRLENLIAQLPGEKKNGLFGNLIALSLGLTPNFKSNFDLAEDAKLQLSKDTYDDDLDNLLAQIGDQYADLFLAAKNLSDAILLSDILRVNTEITKAPLSASMIKRYDEHHQDLTLLKALVRQQLPEKYKEIFFDQSKNGYAGYIDGGASQEEFYKFIKPILEKMDGTEELLVKLNREDLLRKQRTFDNGSIPHQIHLGELHAILRRQEDFYPFLKDNREKIEKILTFRIPYYVGPLARGNSRFAWMTRKSEETITPWNFEEVVDKGASAQSFIERMTNFDKNLPNEKVLPKHSLLYEYFTVYNELTKVKYVTEGMRKPAFLSGEQKKAIVDLLFKTNRKVTVKQLKEDYFKKIECFDSVEISGVEDRFNASLGTYHDLLKIIKDKDFLDNEENEDILEDIVLTLTLFEDREMIEERLKTYAHLFDDKVMKQLKRRRYTGWGRLSRKLINGIRDKQSGKTILDFLKSDGFANRNFMQLIHDDSLTFKEDIQKAQVSGQGDSLHEHIANLAGSPAIKKGILQTVKVVDELVKVMGRHKPENIVIEMARENQTTQKGQKNSRERMKRIEEGIKELGSQILKEHPVENTQLQNEKLYLYYLQNGRDMYVDQELDINRLSDYDVDHIVPQSFLKDDSIDNKVLTRSDKARGKSDNVPSEEVVKKMKNYWRQLLNAKLITQRKFDNLTKAERGGLSELDKAGFIKRQLVETRQITKHVAQILDSRMNTKYDENDKLIREVKVITLKSKLVSDFRKDFQFYKVREINNYHHAHDAYLNAVVGTALIKKYPKLESEFVYGDYKVYDVRKMIAKSEQEIGKATAKYFFYSNIMNFFKTEITLANGEIRKRPLIETNGETGEIVWDKGRDFATVRKVLSMPQVNIVKKTEVQTGGFSKESILPKRNSDKLIARKKDWDPKKYGGFDSPTVAYSVLVVAKVEKGKSKKLKSVKELLGITIMERSSFEKNPIDFLEAKGYKEVKKDLIIKLPKYSLFELENGRKRMLASAGELQKGNELALPSKYVNFLYLASHYEKLKGSPEDNEQKQLFVEQHKHYLDEIIEQISEFSKRVILADANLDKVLSAYNKHRDKPIREQAENIIHLFTLTNLGAPAAFKYFDTTIDRKRYTSTKEVLDATLIHQSITGLYETRIDLSQLGGDGGEAAAKEAAAKGGTLNIEDEYRLHETSKEPDVSLGSTWLSDFPQAWAETGGMGLAVRQAPLIIPLKATSTPVSIKQYPMSQEARLGIKPHIQRLLDQGILVPCQSPWNTPLLPVKKPGTNDYRPVQDLREVNKRVEDIHPTVPNPYNLLSGLPPSHQWYTVLDLKDAFFCLRLHPTSQPLFAFEWRDPEMGISGQLTWTRLPQGFKNSPTLFNEALHRDLAGFRIQHPDLILLQYVDDLLLAATSELDCQQGTRALLQTLGDLGYRASAKKAQICQKQVKYLGYLLKEGQRWLTEARKETVMGQPIPKTPRQLREFLGTAGFCRLWIPGFAEMAAPLYPLTKPGTLFNWGPDQQKAFQEIKQALLTAPALGLPDLTKPFELFVDEKQGYAKGVLTQKLGPWRRPVAYLSKKLDPVAAGWPPCLRMVAAIAVLTKDAGKLTMGQPLVILAPHAVEALVKQPPDRWLSNARMTHYQALLLDTDRVQFGPVVALNPATLLPLPEEGLQHDCLDILAEAHGTRSDLMDQPLPDADHTWYTDGSSFLQEGQRKAGAAVTTETEVIWARALPAGTSAQRAELIALTQALKMAEGKKLNVYTDSRYAFATAHIHGEIYRRRGWLTSEGKEIKNKDEILALLKALFLPKRLSIIHCPGHQKGNSAEARGNRMADQAAREVATRETPETSTLLAGKRTADGSEFEKRTADGSEFESPKKKAKVE

SEQ ID NO: 2237 - protein, 2105 aa, synthetic construct
MPAAKRVKLDGGDKKYSIGLDIGTNSVGWAVITDEYKVPSKKFKVLGNTDRHSIKKNLIGALLFDSGETAEATRLKRTARRRYTRRKNRICYLQEIFSNEMAKVDDSFFHRLEESFLVEEDKKHERHPIFGNIVDEVAYHEKYPTIYHLRKKLVDSTDKADLRLIYLALAHMIKFRGHFLIEGDLNPDNSDVDKLFIQLVQTYNQLFEENPINASGVDAKAILSARLSKSRRLENLIAQLPGEKKNGLFGNLIALSLGLTPNFKSNFDLAEDAKLQLSKDTYDDDLDNLLAQIGDQYADLFLAAKNLSDAILLSDILRVNTEITKAPLSASMIKRYDEHHQDLTLLKALVRQQLPEKYKEIFFDQSKNGYAGYIDGGASQEEFYKFIKPILEKMDGTEELLVKLNREDLLRKQRTFDNGSIPHQIHLGELHAILRRQEDFYPFLKDNREKIEKILTFRIPYYVGPLARGNSRFAWMTRKSEETITPWNFEEVVDKGASAQSFIERMTNFDKNLPNEKVLPKHSLLYEYFTVYNELTKVKYVTEGMRKPAFLSGEQKKAIVDLLFKTNRKVTVKQLKEDYFKKIECFDSVEISGVEDRFNASLGTYHDLLKIIKDKDFLDNEENEDILEDIVLTLTLFEDREMIEERLKTYAHLFDDKVMKQLKRRRYTGWGRLSRKLINGIRDKQSGKTILDFLKSDGFANRNFMQLIHDDSLTFKEDIQKAQVSGQGDSLHEHIANLAGSPAIKKGILQTVKVVDELVKVMGRHKPENIVIEMARENQTTQKGQKNSRERMKRIEEGIKELGSQILKEHPVENTQLQNEKLYLYYLQNGRDMYVDQELDINRLSDYDVDHIVPQSFLKDDSIDNKVLTRSDKARGKSDNVPSEEVVKKMKNYWRQLLNAKLITQRKFDNLTKAERGGLSELDKAGFIKRQLVETRQITKHVAQILDSRMNTKYDENDKLIREVKVITLKSKLVSDFRKDFQFYKVREINNYHHAHDAYLNAVVGTALIKKYPKLESEFVYGDYKVYDVRKMIAKSEQEIGKATAKYFFYSNIMNFFKTEITLANGEIRKRPLIETNGETGEIVWDKGRDFATVRKVLSMPQVNIVKKTEVQTGGFSKESILPKRNSDKLIARKKDWDPKKYGGFDSPTVAYSVLVVAKVEKGKSKKLKSVKELLGITIMERSSFEKNPIDFLEAKGYKEVKKDLIIKLPKYSLFELENGRKRMLASAGELQKGNELALPSKYVNFLYLASHYEKLKGSPEDNEQKQLFVEQHKHYLDEIIEQISEFSKRVILADANLDKVLSAYNKHRDKPIREQAENIIHLFTLTNLGAPAAFKYFDTTIDRKRYTSTKEVLDATLIHQSITGLYETRIDLSQLGGDGGEAAAKEAAAKEAAAKEAAAKGGTLNIEDEYRLHETSKEPDVSLGSTWLSDFPQAWAETGGMGLAVRQAPLIIPLKATSTPVSIKQYPMSQEARLGIKPHIQRLLDQGILVPCQSPWNTPLLPVKKPGTNDYRPVQDLREVNKRVEDIHPTVPNPYNLLSGLPPSHQWYTVLDLKDAFFCLRLHPTSQPLFAFEWRDPEMGISGQLTWTRLPQGFKNSPTLFNEALHRDLAGFRIQHPDLILLQYVDDLLLAATSELDCQQGTRALLQTLGDLGYRASAKKAQICQKQVKYLGYLLKEGQRWLTEARKETVMGQPIPKTPRQLREFLGTAGFCRLWIPGFAEMAAPLYPLTKPGTLFNWGPDQQKAFQEIKQALLTAPALGLPDLTKPFELFVDEKQGYAKGVLTQKLGPWRRPVAYLSKKLDPVAAGWPPCLRMVAAIAVLTKDAGKLTMGQPLVILAPHAVEALVKQPPDRWLSNARMTHYQALLLDTDRVQFGPVVALNPATLLPLPEEGLQHDCLDILAEAHGTRSDLMDQPLPDADHTWYTDGSSFLQEGQRKAGAAVTTETEVIWARALPAGTSAQRAELIALTQALKMAEGKKLNVYTDSRYAFATAHIHGEIYRRRGWLTSEGKEIKNKDEILALLKALFLPKRLSIIHCPGHQKGNSAEARGNRMADQAAREVATRETPETSTLLAGKRTADGSEFEKRTADGSEFESPKKKAKVE

SEQ ID NO: 2238 - protein, 2093 aa, synthetic construct
MPAAKRVKLDGGDKKYSIGLDIGTNSVGWAVITDEYKVPSKKFKVLGNTDRHSIKKNLIGALLFDSGETAEATRLKRTARRRYTRRKNRICYLQEIFSNEMAKVDDSFFHRLEESFLVEEDKKHERHPIFGNIVDEVAYHEKYPTIYHLRKKLVDSTDKADLRLIYLALAHMIKFRGHFLIEGDLNPDNSDVDKLFIQLVQTYNQLFEENPINASGVDAKAILSARLSKSRRLENLIAQLPGEKKNGLFGNLIALSLGLTPNFKSNFDLAEDAKLQLSKDTYDDDLDNLLAQIGDQYADLFLAAKNLSDAILLSDILRVNTEITKAPLSASMIKRYDEHHQDLTLLKALVRQQLPEKYKEIFFDQSKNGYAGYIDGGASQEEFYKFIKPILEKMDGTEELLVKLNREDLLRKQRTFDNGSIPHQIHLGELHAILRRQEDFYPFLKDNREKIEKILTFRIPYYVGPLARGNSRFAWMTRKSEETITPWNFEEVVDKGASAQSFIERMTNFDKNLPNEKVLPKHSLLYEYFTVYNELTKVKYVTEGMRKPAFLSGEQKKAIVDLLFKTNRKVTVKQLKEDYFKKIECFDSVEISGVEDRFNASLGTYHDLLKIIKDKDFLDNEENEDILEDIVLTLTLFEDREMIEERLKTYAHLFDDKVMKQLKRRRYTGWGRLSRKLINGIRDKQSGKTILDFLKSDGFANRNFMQLIHDDSLTFKEDIQKAQVSGQGDSLHEHIANLAGSPAIKKGILQTVKVVDELVKVMGRHKPENIVIEMARENQTTQKGQKNSRERMKRIEEGIKELGSQILKEHPVENTQLQNEKLYLYYLQNGRDMYVDQELDINRLSDYDVDHIVPQSFLKDDSIDNKVLTRSDKARGKSDNVPSEEVVKKMKNYWRQLLNAKLITQRKFDNLTKAERGGLSELDKAGFIKRQLVETRQITKHVAQILDSRMNTKYDENDKLIREVKVITLKSKLVSDFRKDFQFYKVREINNYHHAHDAYLNAVVGTALIKKYPKLESEFVYGDYKVYDVRKMIAKSEQEIGKATAKYFFYSNIMNFFKTEITLANGEIRKRPLIETNGETGEIVWDKGRDFATVRKVLSMPQVNIVKKTEVQTGGFSKESILPKRNSDKLIARKKDWDPKKYGGFDSPTVAYSVLVVAKVEKGKSKKLKSVKELLGITIMERSSFEKNPIDFLEAKGYKEVKKDLIIKLPKYSLFELENGRKRMLASAGELQKGNELALPSKYVNFLYLASHYEKLKGSPEDNEQKQLFVEQHKHYLDEIIEQISEFSKRVILADANLDKVLSAYNKHRDKPIREQAENIIHLFTLTNLGAPAAFKYFDTTIDRKRYTSTKEVLDATLIHQSITGLYETRIDLSQLGGDGGEAAAKGGSGGTLNIEDEYRLHETSKEPDVSLGSTWLSDFPQAWAETGGMGLAVRQAPLIIPLKATSTPVSIKQYPMSQEARLGIKPHIQRLLDQGILVPCQSPWNTPLLPVKKPGTNDYRPVQDLREVNKRVEDIHPTVPNPYNLLSGLPPSHQWYTVLDLKDAFFCLRLHPTSQPLFAFEWRDPEMGISGQLTWTRLPQGFKNSPTLFNEALHRDLAGFRIQHPDLILLQYVDDLLLAATSELDCQQGTRALLQTLGDLGYRASAKKAQICQKQVKYLGYLLKEGQRWLTEARKETVMGQPIPKTPRQLREFLGTAGFCRLWIPGFAEMAAPLYPLTKPGTLFNWGPDQQKAFQEIKQALLTAPALGLPDLTKPFELFVDEKQGYAKGVLTQKLGPWRRPVAYLSKKLDPVAAGWPPCLRMVAAIAVLTKDAGKLTMGQPLVILAPHAVEALVKQPPDRWLSNARMTHYQALLLDTDRVQFGPVVALNPATLLPLPEEGLQHDCLDILAEAHGTRSDLMDQPLPDADHTWYTDGSSFLQEGQRKAGAAVTTETEVIWARALPAGTSAQRAELIALTQALKMAEGKKLNVYTDSRYAFATAHIHGEIYRRRGWLTSEGKEIKNKDEILALLKALFLPKRLSIIHCPGHQKGNSAEARGNRMADQAAREVATRETPETSTLLAGKRTADGSEFEKRTADGSEFESPKKKAKVE

SEQ ID NO: 2239 - protein, 2096 aa, synthetic construct
MPAAKRVKLDGGDKKYSIGLDIGTNSVGWAVITDEYKVPSKKFKVLGNTDRHSIKKNLIGALLFDSGETAEATRLKRTARRRYTRRKNRICYLQEIFSNEMAKVDDSFFHRLEESFLVEEDKKHERHPIFGNIVDEVAYHEKYPTIYHLRKKLVDSTDKADLRLIYLALAHMIKFRGHFLIEGDLNPDNSDVDKLFIQLVQTYNQLFEENPINASGVDAKAILSARLSKSRRLENLIAQLPGEKKNGLFGNLIALSLGLTPNFKSNFDLAEDAKLQLSKDTYDDDLDNLLAQIGDQYADLFLAAKNLSDAILLSDILRVNTEITKAPLSASMIKRYDEHHQDLTLLKALVRQQLPEKYKEIFFDQSKNGYAGYIDGGASQEEFYKFIKPILEKMDGTEELLVKLNREDLLRKQRTFDNGSIPHQIHLGELHAILRRQEDFYPFLKDNREKIEKILTFRIPYYVGPLARGNSRFAWMTRKSEETITPWNFEEVVDKGASAQSFIERMTNFDKNLPNEKVLPKHSLLYEYFTVYNELTKVKYVTEGMRKPAFLSGEQKKAIVDLLFKTNRKVTVKQLKEDYFKKIECFDSVEISGVEDRFNASLGTYHDLLKIIKDKDFLDNEENEDILEDIVLTLTLFEDREMIEERLKTYAHLFDDKVMKQLKRRRYTGWGRLSRKLINGIRDKQSGKTILDFLKSDGFANRNFMQLIHDDSLTFKEDIQKAQVSGQGDSLHEHIANLAGSPAIKKGILQTVKVVDELVKVMGRHKPENIVIEMARENQTTQKGQKNSRERMKRIEEGIKELGSQILKEHPVENTQLQNEKLYLYYLQNGRDMYVDQELDINRLSDYDVDHIVPQSFLKDDSIDNKVLTRSDKARGKSDNVPSEEVVKKMKNYWRQLLNAKLITQRKFDNLTKAERGGLSELDKAGFIKRQLVETRQITKHVAQILDSRMNTKYDENDKLIREVKVITLKSKLVSDFRKDFQFYKVREINNYHHAHDAYLNAVVGTALIKKYPKLESEFVYGDYKVYDVRKMIAKSEQEIGKATAKYFFYSNIMNFFKTEITLANGEIRKRPLIETNGETGEIVWDKGRDFATVRKVLSMPQVNIVKKTEVQTGGFSKESILPKRNSDKLIARKKDWDPKKYGGFDSPTVAYSVLVVAKVEKGKSKKLKSVKELLGITIMERSSFEKNPIDFLEAKGYKEVKKDLIIKLPKYSLFELENGRKRMLASAGELQKGNELALPSKYVNFLYLASHYEKLKGSPEDNEQKQLFVEQHKHYLDEIIEQISEFSKRVILADANLDKVLSAYNKHRDKPIREQAENIIHLFTLTNLGAPAAFKYFDTTIDRKRYTSTKEVLDATLIHQSITGLYETRIDLSQLGGDGGEAAAKGGSGSSGGTLNIEDEYRLHETSKEPDVSLGSTWLSDFPQAWAETGGMGLAVRQAPLIIPLKATSTPVSIKQYPMSQEARLGIKPHIQRLLDQGILVPCQSPWNTPLLPVKKPGTNDYRPVQDLREVNKRVEDIHPTVPNPYNLLSGLPPSHQWYTVLDLKDAFFCLRLHPTSQPLFAFEWRDPEMGISGQLTWTRLPQGFKNSPTLFNEALHRDLAGFRIQHPDLILLQYVDDLLLAATSELDCQQGTRALLQTLGDLGYRASAKKAQICQKQVKYLGYLLKEGQRWLTEARKETVMGQPIPKTPRQLREFLGTAGFCRLWIPGFAEMAAPLYPLTKPGTLFNWGPDQQKAFQEIKQALLTAPALGLPDLTKPFELFVDEKQGYAKGVLTQKLGPWRRPVAYLSKKLDPVAAGWPPCLRMVAAIAVLTKDAGKLTMGQPLVILAPHAVEALVKQPPDRWLSNARMTHYQALLLDTDRVQFGPVVALNPATLLPLPEEGLQHDCLDILAEAHGTRSDLMDQPLPDADHTWYTDGSSFLQEGQRKAGAAVTTETEVIWARALPAGTSAQRAELIALTQALKMAEGKKLNVYTDSRYAFATAHIHGEIYRRRGWLTSEGKEIKNKDEILALLKALFLPKRLSIIHCPGHQKGNSAEARGNRMADQAAREVATRETPETSTLLAGKRTADGSEFEKRTADGSEFESPKKKAKVE

SEQ ID NO: 2240 - protein, 2100 aa, synthetic construct
MPAAKRVKLDGGDKKYSIGLDIGTNSVGWAVITDEYKVPSKKFKVLGNTDRHSIKKNLIGALLFDSGETAEATRLKRTARRRYTRRKNRICYLQEIFSNEMAKVDDSFFHRLEESFLVEEDKKHERHPIFGNIVDEVAYHEKYPTIYHLRKKLVDSTDKADLRLIYLALAHMIKFRGHFLIEGDLNPDNSDVDKLFIQLVQTYNQLFEENPINASGVDAKAILSARLSKSRRLENLIAQLPGEKKNGLFGNLIALSLGLTPNFKSNFDLAEDAKLQLSKDTYDDDLDNLLAQIGDQYADLFLAAKNLSDAILLSDILRVNTEITKAPLSASMIKRYDEHHQDLTLLKALVRQQLPEKYKEIFFDQSKNGYAGYIDGGASQEEFYKFIKPILEKMDGTEELLVKLNREDLLRKQRTFDNGSIPHQIHLGELHAILRRQEDFYPFLKDNREKIEKILTFRIPYYVGPLARGNSRFAWMTRKSEETITPWNFEEVVDKGASAQSFIERMTNFDKNLPNEKVLPKHSLLYEYFTVYNELTKVKYVTEGMRKPAFLSGEQKKAIVDLLFKTNRKVTVKQLKEDYFKKIECFDSVEISGVEDRFNASLGTYHDLLKIIKDKDFLDNEENEDILEDIVLTLTLFEDREMIEERLKTYAHLFDDKVMKQLKRRRYTGWGRLSRKLINGIRDKQSGKTILDFLKSDGFANRNFMQLIHDDSLTFKEDIQKAQVSGQGDSLHEHIANLAGSPAIKKGILQTVKVVDELVKVMGRHKPENIVIEMARENQTTQKGQKNSRERMKRIEEGIKELGSQILKEHPVENTQLQNEKLYLYYLQNGRDMYVDQELDINRLSDYDVDHIVPQSFLKDDSIDNKVLTRSDKARGKSDNVPSEEVVKKMKNYWRQLLNAKLITQRKFDNLTKAERGGLSELDKAGFIKRQLVETRQITKHVAQILDSRMNTKYDENDKLIREVKVITLKSKLVSDFRKDFQFYKVREINNYHHAHDAYLNAVVGTALIKKYPKLESEFVYGDYKVYDVRKMIAKSEQEIGKATAKYFFYSNIMNFFKTEITLANGEIRKRPLIETNGETGEIVWDKGRDFATVRKVLSMPQVNIVKKTEVQTGGFSKESILPKRNSDKLIARKKDWDPKKYGGFDSPTVAYSVLVVAKVEKGKSKKLKSVKELLGITIMERSSFEKNPIDFLEAKGYKEVKKDLIIKLPKYSLFELENGRKRMLASAGELQKGNELALPSKYVNFLYLASHYEKLKGSPEDNEQKQLFVEQHKHYLDEIIEQISEFSKRVILADANLDKVLSAYNKHRDKPIREQAENIIHLFTLTNLGAPAAFKYFDTTIDRKRYTSTKEVLDATLIHQSITGLYETRIDLSQLGGDGGGGGGSGGGGSGGGGSGGTLNIEDEYRLHETSKEPDVSLGSTWLSDFPQAWAETGGMGLAVRQAPLIIPLKATSTPVSIKQYPMSQEARLGIKPHIQRLLDQGILVPCQSPWNTPLLPVKKPGTNDYRPVQDLREVNKRVEDIHPTVPNPYNLLSGLPPSHQWYTVLDLKDAFFCLRLHPTSQPLFAFEWRDPEMGISGQLTWTRLPQGFKNSPTLFNEALHRDLAGFRIQHPDLILLQYVDDLLLAATSELDCQQGTRALLQTLGDLGYRASAKKAQICQKQVKYLGYLLKEGQRWLTEARKETVMGQPIPKTPRQLREFLGTAGFCRLWIPGFAEMAAPLYPLTKPGTLFNWGPDQQKAFQEIKQALLTAPALGLPDLTKPFELFVDEKQGYAKGVLTQKLGPWRRPVAYLSKKLDPVAAGWPPCLRMVAAIAVLTKDAGKLTMGQPLVILAPHAVEALVKQPPDRWLSNARMTHYQALLLDTDRVQFGPVVALNPATLLPLPEEGLQHDCLDILAEAHGTRSDLMDQPLPDADHTWYTDGSSFLQEGQRKAGAAVTTETEVIWARALPAGTSAQRAELIALTQALKMAEGKKLNVYTDSRYAFATAHIHGEIYRRRGWLTSEGKEIKNKDEILALLKALFLPKRLSIIHCPGHQKGNSAEARGNRMADQAAREVATRETPETSTLLAGKRTADGSEFEKRTADGSEFESPKKKAKVE

SEQ ID NO: 2241 - protein, 2093 aa, synthetic construct
MPAAKRVKLDGGDKKYSIGLDIGTNSVGWAVITDEYKVPSKKFKVLGNTDRHSIKKNLIGALLFDSGETAEATRLKRTARRRYTRRKNRICYLQEIFSNEMAKVDDSFFHRLEESFLVEEDKKHERHPIFGNIVDEVAYHEKYPTIYHLRKKLVDSTDKADLRLIYLALAHMIKFRGHFLIEGDLNPDNSDVDKLFIQLVQTYNQLFEENPINASGVDAKAILSARLSKSRRLENLIAQLPGEKKNGLFGNLIALSLGLTPNFKSNFDLAEDAKLQLSKDTYDDDLDNLLAQIGDQYADLFLAAKNLSDAILLSDILRVNTEITKAPLSASMIKRYDEHHQDLTLLKALVRQQLPEKYKEIFFDQSKNGYAGYIDGGASQEEFYKFIKPILEKMDGTEELLVKLNREDLLRKQRTFDNGSIPHQIHLGELHAILRRQEDFYPFLKDNREKIEKILTFRIPYYVGPLARGNSRFAWMTRKSEETITPWNFEEVVDKGASAQSFIERMTNFDKNLPNEKVLPKHSLLYEYFTVYNELTKVKYVTEGMRKPAFLSGEQKKAIVDLLFKTNRKVTVKQLKEDYFKKIECFDSVEISGVEDRFNASLGTYHDLLKIIKDKDFLDNEENEDILEDIVLTLTLFEDREMIEERLKTYAHLFDDKVMKQLKRRRYTGWGRLSRKLINGIRDKQSGKTILDFLKSDGFANRNFMQLIHDDSLTFKEDIQKAQVSGQGDSLHEHIANLAGSPAIKKGILQTVKVVDELVKVMGRHKPENIVIEMARENQTTQKGQKNSRERMKRIEEGIKELGSQILKEHPVENTQLQNEKLYLYYLQNGRDMYVDQELDINRLSDYDVDHIVPQSFLKDDSIDNKVLTRSDKARGKSDNVPSEEVVKKMKNYWRQLLNAKLITQRKFDNLTKAERGGLSELDKAGFIKRQLVETRQITKHVAQILDSRMNTKYDENDKLIREVKVITLKSKLVSDFRKDFQFYKVREINNYHHAHDAYLNAVVGTALIKKYPKLESEFVYGDYKVYDVRKMIAKSEQEIGKATAKYFFYSNIMNFFKTEITLANGEIRKRPLIETNGETGEIVWDKGRDFATVRKVLSMPQVNIVKKTEVQTGGFSKESILPKRNSDKLIARKKDWDPKKYGGFDSPTVAYSVLVVAKVEKGKSKKLKSVKELLGITIMERSSFEKNPIDFLEAKGYKEVKKDLIIKLPKYSLFELENGRKRMLASAGELQKGNELALPSKYVNFLYLASHYEKLKGSPEDNEQKQLFVEQHKHYLDEIIEQISEFSKRVILADANLDKVLSAYNKHRDKPIREQAENIIHLFTLTNLGAPAAFKYFDTTIDRKRYTSTKEVLDATLIHQSITGLYETRIDLSQLGGDGGGGGEAAAKGGTLNIEDEYRLHETSKEPDVSLGSTWLSDFPQAWAETGGMGLAVRQAPLIIPLKATSTPVSIKQYPMSQEARLGIKPHIQRLLDQGILVPCQSPWNTPLLPVKKPGTNDYRPVQDLREVNKRVEDIHPTVPNPYNLLSGLPPSHQWYTVLDLKDAFFCLRLHPTSQPLFAFEWRDPEMGISGQLTWTRLPQGFKNSPTLFNEALHRDLAGFRIQHPDLILLQYVDDLLLAATSELDCQQGTRALLQTLGDLGYRASAKKAQICQKQVKYLGYLLKEGQRWLTEARKETVMGQPIPKTPRQLREFLGTAGFCRLWIPGFAEMAAPLYPLTKPGTLFNWGPDQQKAFQEIKQALLTAPALGLPDLTKPFELFVDEKQGYAKGVLTQKLGPWRRPVAYLSKKLDPVAAGWPPCLRMVAAIAVLTKDAGKLTMGQPLVILAPHAVEALVKQPPDRWLSNARMTHYQALLLDTDRVQFGPVVALNPATLLPLPEEGLQHDCLDILAEAHGTRSDLMDQPLPDADHTWYTDGSSFLQEGQRKAGAAVTTETEVIWARALPAGTSAQRAELIALTQALKMAEGKKLNVYTDSRYAFATAHIHGEIYRRRGWLTSEGKEIKNKDEILALLKALFLPKRLSIIHCPGHQKGNSAEARGNRMADQAAREVATRETPETSTLLAGKRTADGSEFEKRTADGSEFESPKKKAKVE

SEQ ID NO: 2242 - protein, 2088 aa, synthetic construct
MPAAKRVKLDGGDKKYSIGLDIGTNSVGWAVITDEYKVPSKKFKVLGNTDRHSIKKNLIGALLFDSGETAEATRLKRTARRRYTRRKNRICYLQEIFSNEMAKVDDSFFHRLEESFLVEEDKKHERHPIFGNIVDEVAYHEKYPTIYHLRKKLVDSTDKADLRLIYLALAHMIKFRGHFLIEGDLNPDNSDVDKLFIQLVQTYNQLFEENPINASGVDAKAILSARLSKSRRLENLIAQLPGEKKNGLFGNLIALSLGLTPNFKSNFDLAEDAKLQLSKDTYDDDLDNLLAQIGDQYADLFLAAKNLSDAILLSDILRVNTEITKAPLSASMIKRYDEHHQDLTLLKALVRQQLPEKYKEIFFDQSKNGYAGYIDGGASQEEFYKFIKPILEKMDGTEELLVKLNREDLLRKQRTFDNGSIPHQIHLGELHAILRRQEDFYPFLKDNREKIEKILTFRIPYYVGPLARGNSRFAWMTRKSEETITPWNFEEVVDKGASAQSFIERMTNFDKNLPNEKVLPKHSLLYEYFTVYNELTKVKYVTEGMRKPAFLSGEQKKAIVDLLFKTNRKVTVKQLKEDYFKKIECFDSVEISGVEDRFNASLGTYHDLLKIIKDKDFLDNEENEDILEDIVLTLTLFEDREMIEERLKTYAHLFDDKVMKQLKRRRYTGWGRLSRKLINGIRDKQSGKTILDFLKSDGFANRNFMQLIHDDSLTFKEDIQKAQVSGQGDSLHEHIANLAGSPAIKKGILQTVKVVDELVKVMGRHKPENIVIEMARENQTTQKGQKNSRERMKRIEEGIKELGSQILKEHPVENTQLQNEKLYLYYLQNGRDMYVDQELDINRLSDYDVDHIVPQSFLKDDSIDNKVLTRSDKARGKSDNVPSEEVVKKMKNYWRQLLNAKLITQRKFDNLTKAERGGLSELDKAGFIKRQLVETRQITKHVAQILDSRMNTKYDENDKLIREVKVITLKSKLVSDFRKDFQFYKVREINNYHHAHDAYLNAVVGTALIKKYPKLESEFVYGDYKVYDVRKMIAKSEQEIGKATAKYFFYSNIMNFFKTEITLANGEIRKRPLIETNGETGEIVWDKGRDFATVRKVLSMPQVNIVKKTEVQTGGFSKESILPKRNSDKLIARKKDWDPKKYGGFDSPTVAYSVLVVAKVEKGKSKKLKSVKELLGITIMERSSFEKNPIDFLEAKGYKEVKKDLIIKLPKYSLFELENGRKRMLASAGELQKGNELALPSKYVNFLYLASHYEKLKGSPEDNEQKQLFVEQHKHYLDEIIEQISEFSKRVILADANLDKVLSAYNKHRDKPIREQAENIIHLFTLTNLGAPAAFKYFDTTIDRKRYTSTKEVLDATLIHQSITGLYETRIDLSQLGGDGGGSSGGTLNIEDEYRLHETSKEPDVSLGSTWLSDFPQAWAETGGMGLAVRQAPLIIPLKATSTPVSIKQYPMSQEARLGIKPHIQRLLDQGILVPCQSPWNTPLLPVKKPGTNDYRPVQDLREVNKRVEDIHPTVPNPYNLLSGLPPSHQWYTVLDLKDAFFCLRLHPTSQPLFAFEWRDPEMGISGQLTWTRLPQGFKNSPTLFNEALHRDLAGFRIQHPDLILLQYVDDLLLAATSELDCQQGTRALLQTLGDLGYRASAKKAQICQKQVKYLGYLLKEGQRWLTEARKETVMGQPIPKTPRQLREFLGTAGFCRLWIPGFAEMAAPLYPLTKPGTLFNWGPDQQKAFQEIKQALLTAPALGLPDLTKPFELFVDEKQGYAKGVLTQKLGPWRRPVAYLSKKLDPVAAGWPPCLRMVAAIAVLTKDAGKLTMGQPLVILAPHAVEALVKQPPDRWLSNARMTHYQALLLDTDRVQFGPVVALNPATLLPLPEEGLQHDCLDILAEAHGTRSDLMDQPLPDADHTWYTDGSSFLQEGQRKAGAAVTTETEVIWARALPAGTSAQRAELIALTQALKMAEGKKLNVYTDSRYAFATAHIHGEIYRRRGWLTSEGKEIKNKDEILALLKALFLPKRLSIIHCPGHQKGNSAEARGNRMADQAAREVATRETPETSTLLAGKRTADGSEFEKRTADGSEFESPKKKAKVE

SEQ ID NO: 2243 - protein, 2090 aa, synthetic construct
MPAAKRVKLDGGDKKYSIGLDIGTNSVGWAVITDEYKVPSKKFKVLGNTDRHSIKKNLIGALLFDSGETAEATRLKRTARRRYTRRKNRICYLQEIFSNEMAKVDDSFFHRLEESFLVEEDKKHERHPIFGNIVDEVAYHEKYPTIYHLRKKLVDSTDKADLRLIYLALAHMIKFRGHFLIEGDLNPDNSDVDKLFIQLVQTYNQLFEENPINASGVDAKAILSARLSKSRRLENLIAQLPGEKKNGLFGNLIALSLGLTPNFKSNFDLAEDAKLQLSKDTYDDDLDNLLAQIGDQYADLFLAAKNLSDAILLSDILRVNTEITKAPLSASMIKRYDEHHQDLTLLKALVRQQLPEKYKEIFFDQSKNGYAGYIDGGASQEEFYKFIKPILEKMDGTEELLVKLNREDLLRKQRTFDNGSIPHQIHLGELHAILRRQEDFYPFLKDNREKIEKILTFRIPYYVGPLARGNSRFAWMTRKSEETITPWNFEEVVDKGASAQSFIERMTNFDKNLPNEKVLPKHSLLYEYFTVYNELTKVKYVTEGMRKPAFLSGEQKKAIVDLLFKTNRKVTVKQLKEDYFKKIECFDSVEISGVEDRFNASLGTYHDLLKIIKDKDFLDNEENEDILEDIVLTLTLFEDREMIEERLKTYAHLFDDKVMKQLKRRRYTGWGRLSRKLINGIRDKQSGKTILDFLKSDGFANRNFMQLIHDDSLTFKEDIQKAQVSGQGDSLHEHIANLAGSPAIKKGILQTVKVVDELVKVMGRHKPENIVIEMARENQTTQKGQKNSRERMKRIEEGIKELGSQILKEHPVENTQLQNEKLYLYYLQNGRDMYVDQELDINRLSDYDVDHIVPQSFLKDDSIDNKVLTRSDKARGKSDNVPSEEVVKKMKNYWRQLLNAKLITQRKFDNLTKAERGGLSELDKAGFIKRQLVETRQITKHVAQILDSRMNTKYDENDKLIREVKVITLKSKLVSDFRKDFQFYKVREINNYHHAHDAYLNAVVGTALIKKYPKLESEFVYGDYKVYDVRKMIAKSEQEIGKATAKYFFYSNIMNFFKTEITLANGEIRKRPLIETNGETGEIVWDKGRDFATVRKVLSMPQVNIVKKTEVQTGGFSKESILPKRNSDKLIARKKDWDPKKYGGFDSPTVAYSVLVVAKVEKGKSKKLKSVKELLGITIMERSSFEKNPIDFLEAKGYKEVKKDLIIKLPKYSLFELENGRKRMLASAGELQKGNELALPSKYVNFLYLASHYEKLKGSPEDNEQKQLFVEQHKHYLDEIIEQISEFSKRVILADANLDKVLSAYNKHRDKPIREQAENIIHLFTLTNLGAPAAFKYFDTTIDRKRYTSTKEVLDATLIHQSITGLYETRIDLSQLGGDGGPAPAPGGTLNIEDEYRLHETSKEPDVSLGSTWLSDFPQAWAETGGMGLAVRQAPLIIPLKATSTPVSIKQYPMSQEARLGIKPHIQRLLDQGILVPCQSPWNTPLLPVKKPGTNDYRPVQDLREVNKRVEDIHPTVPNPYNLLSGLPPSHQWYTVLDLKDAFFCLRLHPTSQPLFAFEWRDPEMGISGQLTWTRLPQGFKNSPTLFNEALHRDLAGFRIQHPDLILLQYVDDLLLAATSELDCQQGTRALLQTLGDLGYRASAKKAQICQKQVKYLGYLLKEGQRWLTEARKETVMGQPIPKTPRQLREFLGTAGFCRLWIPGFAEMAAPLYPLTKPGTLFNWGPDQQKAFQEIKQALLTAPALGLPDLTKPFELFVDEKQGYAKGVLTQKLGPWRRPVAYLSKKLDPVAAGWPPCLRMVAAIAVLTKDAGKLTMGQPLVILAPHAVEALVKQPPDRWLSNARMTHYQALLLDTDRVQFGPVVALNPATLLPLPEEGLQHDCLDILAEAHGTRSDLMDQPLPDADHTWYTDGSSFLQEGQRKAGAAVTTETEVIWARALPAGTSAQRAELIALTQALKMAEGKKLNVYTDSRYAFATAHIHGEIYRRRGWLTSEGKEIKNKDEILALLKALFLPKRLSIIHCPGHQKGNSAEARGNRMADQAAREVATRETPETSTLLAGKRTADGSEFEKRTADGSEFESPKKKAKVE

SEQ ID NO: 2244 - protein, 2096 aa, synthetic construct
MPAAKRVKLDGGDKKYSIGLDIGTNSVGWAVITDEYKVPSKKFKVLGNTDRHSIKKNLIGALLFDSGETAEATRLKRTARRRYTRRKNRICYLQEIFSNEMAKVDDSFFHRLEESFLVEEDKKHERHPIFGNIVDEVAYHEKYPTIYHLRKKLVDSTDKADLRLIYLALAHMIKFRGHFLIEGDLNPDNSDVDKLFIQLVQTYNQLFEENPINASGVDAKAILSARLSKSRRLENLIAQLPGEKKNGLFGNLIALSLGLTPNFKSNFDLAEDAKLQLSKDTYDDDLDNLLAQIGDQYADLFLAAKNLSDAILLSDILRVNTEITKAPLSASMIKRYDEHHQDLTLLKALVRQQLPEKYKEIFFDQSKNGYAGYIDGGASQEEFYKFIKPILEKMDGTEELLVKLNREDLLRKQRTFDNGSIPHQIHLGELHAILRRQEDFYPFLKDNREKIEKILTFRIPYYVGPLARGNSRFAWMTRKSEETITPWNFEEVVDKGASAQSFIERMTNFDKNLPNEKVLPKHSLLYEYFTVYNELTKVKYVTEGMRKPAFLSGEQKKAIVDLLFKTNRKVTVKQLKEDYFKKIECFDSVEISGVEDRFNASLGTYHDLLKIIKDKDFLDNEENEDILEDIVLTLTLFEDREMIEERLKTYAHLFDDKVMKQLKRRRYTGWGRLSRKLINGIRDKQSGKTILDFLKSDGFANRNFMQLIHDDSLTFKEDIQKAQVSGQGDSLHEHIANLAGSPAIKKGILQTVKVVDELVKVMGRHKPENIVIEMARENQTTQKGQKNSRERMKRIEEGIKELGSQILKEHPVENTQLQNEKLYLYYLQNGRDMYVDQELDINRLSDYDVDHIVPQSFLKDDSIDNKVLTRSDKARGKSDNVPSEEVVKKMKNYWRQLLNAKLITQRKFDNLTKAERGGLSELDKAGFIKRQLVETRQITKHVAQILDSRMNTKYDENDKLIREVKVITLKSKLVSDFRKDFQFYKVREINNYHHAHDAYLNAVVGTALIKKYPKLESEFVYGDYKVYDVRKMIAKSEQEIGKATAKYFFYSNIMNFFKTEITLANGEIRKRPLIETNGETGEIVWDKGRDFATVRKVLSMPQVNIVKKTEVQTGGFSKESILPKRNSDKLIARKKDWDPKKYGGFDSPTVAYSVLVVAKVEKGKSKKLKSVKELLGITIMERSSFEKNPIDFLEAKGYKEVKKDLIIKLPKYSLFELENGRKRMLASAGELQKGNELALPSKYVNFLYLASHYEKLKGSPEDNEQKQLFVEQHKHYLDEIIEQISEFSKRVILADANLDKVLSAYNKHRDKPIREQAENIIHLFTLTNLGAPAAFKYFDTTIDRKRYTSTKEVLDATLIHQSITGLYETRIDLSQLGGDGGGSSEAAAKGGSGGTLNIEDEYRLHETSKEPDVSLGSTWLSDFPQAWAETGGMGLAVRQAPLIIPLKATSTPVSIKQYPMSQEARLGIKPHIQRLLDQGILVPCQSPWNTPLLPVKKPGTNDYRPVQDLREVNKRVEDIHPTVPNPYNLLSGLPPSHQWYTVLDLKDAFFCLRLHPTSQPLFAFEWRDPEMGISGQLTWTRLPQGFKNSPTLFNEALHRDLAGFRIQHPDLILLQYVDDLLLAATSELDCQQGTRALLQTLGDLGYRASAKKAQICQKQVKYLGYLLKEGQRWLTEARKETVMGQPIPKTPRQLREFLGTAGFCRLWIPGFAEMAAPLYPLTKPGTLFNWGPDQQKAFQEIKQALLTAPALGLPDLTKPFELFVDEKQGYAKGVLTQKLGPWRRPVAYLSKKLDPVAAGWPPCLRMVAAIAVLTKDAGKLTMGQPLVILAPHAVEALVKQPPDRWLSNARMTHYQALLLDTDRVQFGPVVALNPATLLPLPEEGLQHDCLDILAEAHGTRSDLMDQPLPDADHTWYTDGSSFLQEGQRKAGAAVTTETEVIWARALPAGTSAQRAELIALTQALKMAEGKKLNVYTDSRYAFATAHIHGEIYRRRGWLTSEGKEIKNKDEILALLKALFLPKRLSIIHCPGHQKGNSAEARGNRMADQAAREVATRETPETSTLLAGKRTADGSEFEKRTADGSEFESPKKKAKVE

SEQ ID NO: 2245 - protein, 2091 aa, synthetic construct
MPAAKRVKLDGGDKKYSIGLDIGTNSVGWAVITDEYKVPSKKFKVLGNTDRHSIKKNLIGALLFDSGETAEATRLKRTARRRYTRRKNRICYLQEIFSNEMAKVDDSFFHRLEESFLVEEDKKHERHPIFGNIVDEVAYHEKYPTIYHLRKKLVDSTDKADLRLIYLALAHMIKFRGHFLIEGDLNPDNSDVDKLFIQLVQTYNQLFEENPINASGVDAKAILSARLSKSRRLENLIAQLPGEKKNGLFGNLIALSLGLTPNFKSNFDLAEDAKLQLSKDTYDDDLDNLLAQIGDQYADLFLAAKNLSDAILLSDILRVNTEITKAPLSASMIKRYDEHHQDLTLLKALVRQQLPEKYKEIFFDQSKNGYAGYIDGGASQEEFYKFIKPILEKMDGTEELLVKLNREDLLRKQRTFDNGSIPHQIHLGELHAILRRQEDFYPFLKDNREKIEKILTFRIPYYVGPLARGNSRFAWMTRKSEETITPWNFEEVVDKGASAQSFIERMTNFDKNLPNEKVLPKHSLLYEYFTVYNELTKVKYVTEGMRKPAFLSGEQKKAIVDLLFKTNRKVTVKQLKEDYFKKIECFDSVEISGVEDRFNASLGTYHDLLKIIKDKDFLDNEENEDILEDIVLTLTLFEDREMIEERLKTYAHLFDDKVMKQLKRRRYTGWGRLSRKLINGIRDKQSGKTILDFLKSDGFANRNFMQLIHDDSLTFKEDIQKAQVSGQGDSLHEHIANLAGSPAIKKGILQTVKVVDELVKVMGRHKPENIVIEMARENQTTQKGQKNSRERMKRIEEGIKELGSQILKEHPVENTQLQNEKLYLYYLQNGRDMYVDQELDINRLSDYDVDHIVPQSFLKDDSIDNKVLTRSDKARGKSDNVPSEEVVKKMKNYWRQLLNAKLITQRKFDNLTKAERGGLSELDKAGFIKRQLVETRQITKHVAQILDSRMNTKYDENDKLIREVKVITLKSKLVSDFRKDFQFYKVREINNYHHAHDAYLNAVVGTALIKKYPKLESEFVYGDYKVYDVRKMIAKSEQEIGKATAKYFFYSNIMNFFKTEITLANGEIRKRPLIETNGETGEIVWDKGRDFATVRKVLSMPQVNIVKKTEVQTGGFSKESILPKRNSDKLIARKKDWDPKKYGGFDSPTVAYSVLVVAKVEKGKSKKLKSVKELLGITIMERSSFEKNPIDFLEAKGYKEVKKDLIIKLPKYSLFELENGRKRMLASAGELQKGNELALPSKYVNFLYLASHYEKLKGSPEDNEQKQLFVEQHKHYLDEIIEQISEFSKRVILADANLDKVLSAYNKHRDKPIREQAENIIHLFTLTNLGAPAAFKYFDTTIDRKRYTSTKEVLDATLIHQSITGLYETRIDLSQLGGDGGPAPGGSGGTLNIEDEYRLHETSKEPDVSLGSTWLSDFPQAWAETGGMGLAVRQAPLIIPLKATSTPVSIKQYPMSQEARLGIKPHIQRLLDQGILVPCQSPWNTPLLPVKKPGTNDYRPVQDLREVNKRVEDIHPTVPNPYNLLSGLPPSHQWYTVLDLKDAFFCLRLHPTSQPLFAFEWRDPEMGISGQLTWTRLPQGFKNSPTLFNEALHRDLAGFRIQHPDLILLQYVDDLLLAATSELDCQQGTRALLQTLGDLGYRASAKKAQICQKQVKYLGYLLKEGQRWLTEARKETVMGQPIPKTPRQLREFLGTAGFCRLWIPGFAEMAAPLYPLTKPGTLFNWGPDQQKAFQEIKQALLTAPALGLPDLTKPFELFVDEKQGYAKGVLTQKLGPWRRPVAYLSKKLDPVAAGWPPCLRMVAAIAVLTKDAGKLTMGQPLVILAPHAVEALVKQPPDRWLSNARMTHYQALLLDTDRVQFGPVVALNPATLLPLPEEGLQHDCLDILAEAHGTRSDLMDQPLPDADHTWYTDGSSFLQEGQRKAGAAVTTETEVIWARALPAGTSAQRAELIALTQALKMAEGKKLNVYTDSRYAFATAHIHGEIYRRRGWLTSEGKEIKNKDEILALLKALFLPKRLSIIHCPGHQKGNSAEARGNRMADQAAREVATRETPETSTLLAGKRTADGSEFEKRTADGSEFESPKKKAKVE

SEQ ID NO: 2246 - protein, 2096 aa, synthetic construct
MPAAKRVKLDGGDKKYSIGLDIGTNSVGWAVITDEYKVPSKKFKVLGNTDRHSIKKNLIGALLFDSGETAEATRLKRTARRRYTRRKNRICYLQEIFSNEMAKVDDSFFHRLEESFLVEEDKKHERHPIFGNIVDEVAYHEKYPTIYHLRKKLVDSTDKADLRLIYLALAHMIKFRGHFLIEGDLNPDNSDVDKLFIQLVQTYNQLFEENPINASGVDAKAILSARLSKSRRLENLIAQLPGEKKNGLFGNLIALSLGLTPNFKSNFDLAEDAKLQLSKDTYDDDLDNLLAQIGDQYADLFLAAKNLSDAILLSDILRVNTEITKAPLSASMIKRYDEHHQDLTLLKALVRQQLPEKYKEIFFDQSKNGYAGYIDGGASQEEFYKFIKPILEKMDGTEELLVKLNREDLLRKQRTFDNGSIPHQIHLGELHAILRRQEDFYPFLKDNREKIEKILTFRIPYYVGPLARGNSRFAWMTRKSEETITPWNFEEVVDKGASAQSFIERMTNFDKNLPNEKVLPKHSLLYEYFTVYNELTKVKYVTEGMRKPAFLSGEQKKAIVDLLFKTNRKVTVKQLKEDYFKKIECFDSVEISGVEDRFNASLGTYHDLLKIIKDKDFLDNEENEDILEDIVLTLTLFEDREMIEERLKTYAHLFDDKVMKQLKRRRYTGWGRLSRKLINGIRDKQSGKTILDFLKSDGFANRNFMQLIHDDSLTFKEDIQKAQVSGQGDSLHEHIANLAGSPAIKKGILQTVKVVDELVKVMGRHKPENIVIEMARENQTTQKGQKNSRERMKRIEEGIKELGSQILKEHPVENTQLQNEKLYLYYLQNGRDMYVDQELDINRLSDYDVDHIVPQSFLKDDSIDNKVLTRSDKARGKSDNVPSEEVVKKMKNYWRQLLNAKLITQRKFDNLTKAERGGLSELDKAGFIKRQLVETRQITKHVAQILDSRMNTKYDENDKLIREVKVITLKSKLVSDFRKDFQFYKVREINNYHHAHDAYLNAVVGTALIKKYPKLESEFVYGDYKVYDVRKMIAKSEQEIGKATAKYFFYSNIMNFFKTEITLANGEIRKRPLIETNGETGEIVWDKGRDFATVRKVLSMPQVNIVKKTEVQTGGFSKESILPKRNSDKLIARKKDWDPKKYGGFDSPTVAYSVLVVAKVEKGKSKKLKSVKELLGITIMERSSFEKNPIDFLEAKGYKEVKKDLIIKLPKYSLFELENGRKRMLASAGELQKGNELALPSKYVNFLYLASHYEKLKGSPEDNEQKQLFVEQHKHYLDEIIEQISEFSKRVILADANLDKVLSAYNKHRDKPIREQAENIIHLFTLTNLGAPAAFKYFDTTIDRKRYTSTKEVLDATLIHQSITGLYETRIDLSQLGGDGGGGGGGSEAAAKGGTLNIEDEYRLHETSKEPDVSLGSTWLSDFPQAWAETGGMGLAVRQAPLIIPLKATSTPVSIKQYPMSQEARLGIKPHIQRLLDQGILVPCQSPWNTPLLPVKKPGTNDYRPVQDLREVNKRVEDIHPTVPNPYNLLSGLPPSHQWYTVLDLKDAFFCLRLHPTSQPLFAFEWRDPEMGISGQLTWTRLPQGFKNSPTLFNEALHRDLAGFRIQHPDLILLQYVDDLLLAATSELDCQQGTRALLQTLGDLGYRASAKKAQICQKQVKYLGYLLKEGQRWLTEARKETVMGQPIPKTPRQLREFLGTAGFCRLWIPGFAEMAAPLYPLTKPGTLFNWGPDQQKAFQEIKQALLTAPALGLPDLTKPFELFVDEKQGYAKGVLTQKLGPWRRPVAYLSKKLDPVAAGWPPCLRMVAAIAVLTKDAGKLTMGQPLVILAPHAVEALVKQPPDRWLSNARMTHYQALLLDTDRVQFGPVVALNPATLLPLPEEGLQHDCLDILAEAHGTRSDLMDQPLPDADHTWYTDGSSFLQEGQRKAGAAVTTETEVIWARALPAGTSAQRAELIALTQALKMAEGKKLNVYTDSRYAFATAHIHGEIYRRRGWLTSEGKEIKNKDEILALLKALFLPKRLSIIHCPGHQKGNSAEARGNRMADQAAREVATRETPETSTLLAGKRTADGSEFEKRTADGSEFESPKKKAKVE

SEQ ID NO: 2247 - protein, 2096 aa, synthetic construct
MPAAKRVKLDGGDKKYSIGLDIGTNSVGWAVITDEYKVPSKKFKVLGNTDRHSIKKNLIGALLFDSGETAEATRLKRTARRRYTRRKNRICYLQEIFSNEMAKVDDSFFHRLEESFLVEEDKKHERHPIFGNIVDEVAYHEKYPTIYHLRKKLVDSTDKADLRLIYLALAHMIKFRGHFLIEGDLNPDNSDVDKLFIQLVQTYNQLFEENPINASGVDAKAILSARLSKSRRLENLIAQLPGEKKNGLFGNLIALSLGLTPNFKSNFDLAEDAKLQLSKDTYDDDLDNLLAQIGDQYADLFLAAKNLSDAILLSDILRVNTEITKAPLSASMIKRYDEHHQDLTLLKALVRQQLPEKYKEIFFDQSKNGYAGYIDGGASQEEFYKFIKPILEKMDGTEELLVKLNREDLLRKQRTFDNGSIPHQIHLGELHAILRRQEDFYPFLKDNREKIEKILTFRIPYYVGPLARGNSRFAWMTRKSEETITPWNFEEVVDKGASAQSFIERMTNFDKNLPNEKVLPKHSLLYEYFTVYNELTKVKYVTEGMRKPAFLSGEQKKAIVDLLFKTNRKVTVKQLKEDYFKKIECFDSVEISGVEDRFNASLGTYHDLLKIIKDKDFLDNEENEDILEDIVLTLTLFEDREMIEERLKTYAHLFDDKVMKQLKRRRYTGWGRLSRKLINGIRDKQSGKTILDFLKSDGFANRNFMQLIHDDSLTFKEDIQKAQVSGQGDSLHEHIANLAGSPAIKKGILQTVKVVDELVKVMGRHKPENIVIEMARENQTTQKGQKNSRERMKRIEEGIKELGSQILKEHPVENTQLQNEKLYLYYLQNGRDMYVDQELDINRLSDYDVDHIVPQSFLKDDSIDNKVLTRSDKARGKSDNVPSEEVVKKMKNYWRQLLNAKLITQRKFDNLTKAERGGLSELDKAGFIKRQLVETRQITKHVAQILDSRMNTKYDENDKLIREVKVITLKSKLVSDFRKDFQFYKVREINNYHHAHDAYLNAVVGTALIKKYPKLESEFVYGDYKVYDVRKMIAKSEQEIGKATAKYFFYSNIMNFFKTEITLANGEIRKRPLIETNGETGEIVWDKGRDFATVRKVLSMPQVNIVKKTEVQTGGFSKESILPKRNSDKLIARKKDWDPKKYGGFDSPTVAYSVLVVAKVEKGKSKKLKSVKELLGITIMERSSFEKNPIDFLEAKGYKEVKKDLIIKLPKYSLFELENGRKRMLASAGELQKGNELALPSKYVNFLYLASHYEKLKGSPEDNEQKQLFVEQHKHYLDEIIEQISEFSKRVILADANLDKVLSAYNKHRDKPIREQAENIIHLFTLTNLGAPAAFKYFDTTIDRKRYTSTKEVLDATLIHQSITGLYETRIDLSQLGGDGGPAPAPAPAPAPGGTLNIEDEYRLHETSKEPDVSLGSTWLSDFPQAWAETGGMGLAVRQAPLIIPLKATSTPVSIKQYPMSQEARLGIKPHIQRLLDQGILVPCQSPWNTPLLPVKKPGTNDYRPVQDLREVNKRVEDIHPTVPNPYNLLSGLPPSHQWYTVLDLKDAFFCLRLHPTSQPLFAFEWRDPEMGISGQLTWTRLPQGFKNSPTLFNEALHRDLAGFRIQHPDLILLQYVDDLLLAATSELDCQQGTRALLQTLGDLGYRASAKKAQICQKQVKYLGYLLKEGQRWLTEARKETVMGQPIPKTPRQLREFLGTAGFCRLWIPGFAEMAAPLYPLTKPGTLFNWGPDQQKAFQEIKQALLTAPALGLPDLTKPFELFVDEKQGYAKGVLTQKLGPWRRPVAYLSKKLDPVAAGWPPCLRMVAAIAVLTKDAGKLTMGQPLVILAPHAVEALVKQPPDRWLSNARMTHYQALLLDTDRVQFGPVVALNPATLLPLPEEGLQHDCLDILAEAHGTRSDLMDQPLPDADHTWYTDGSSFLQEGQRKAGAAVTTETEVIWARALPAGTSAQRAELIALTQALKMAEGKKLNVYTDSRYAFATAHIHGEIYRRRGWLTSEGKEIKNKDEILALLKALFLPKRLSIIHCPGHQKGNSAEARGNRMADQAAREVATRETPETSTLLAGKRTADGSEFEKRTADGSEFESPKKKAKVE

SEQ ID NO: 2248 - protein, 2096 aa, synthetic construct
MPAAKRVKLDGGDKKYSIGLDIGTNSVGWAVITDEYKVPSKKFKVLGNTDRHSIKKNLIGALLFDSGETAEATRLKRTARRRYTRRKNRICYLQEIFSNEMAKVDDSFFHRLEESFLVEEDKKHERHPIFGNIVDEVAYHEKYPTIYHLRKKLVDSTDKADLRLIYLALAHMIKFRGHFLIEGDLNPDNSDVDKLFIQLVQTYNQLFEENPINASGVDAKAILSARLSKSRRLENLIAQLPGEKKNGLFGNLIALSLGLTPNFKSNFDLAEDAKLQLSKDTYDDDLDNLLAQIGDQYADLFLAAKNLSDAILLSDILRVNTEITKAPLSASMIKRYDEHHQDLTLLKALVRQQLPEKYKEIFFDQSKNGYAGYIDGGASQEEFYKFIKPILEKMDGTEELLVKLNREDLLRKQRTFDNGSIPHQIHLGELHAILRRQEDFYPFLKDNREKIEKILTFRIPYYVGPLARGNSRFAWMTRKSEETITPWNFEEVVDKGASAQSFIERMTNFDKNLPNEKVLPKHSLLYEYFTVYNELTKVKYVTEGMRKPAFLSGEQKKAIVDLLFKTNRKVTVKQLKEDYFKKIECFDSVEISGVEDRFNASLGTYHDLLKIIKDKDFLDNEENEDILEDIVLTLTLFEDREMIEERLKTYAHLFDDKVMKQLKRRRYTGWGRLSRKLINGIRDKQSGKTILDFLKSDGFANRNFMQLIHDDSLTFKEDIQKAQVSGQGDSLHEHIANLAGSPAIKKGILQTVKVVDELVKVMGRHKPENIVIEMARENQTTQKGQKNSRERMKRIEEGIKELGSQILKEHPVENTQLQNEKLYLYYLQNGRDMYVDQELDINRLSDYDVDHIVPQSFLKDDSIDNKVLTRSDKARGKSDNVPSEEVVKKMKNYWRQLLNAKLITQRKFDNLTKAERGGLSELDKAGFIKRQLVETRQITKHVAQILDSRMNTKYDENDKLIREVKVITLKSKLVSDFRKDFQFYKVREINNYHHAHDAYLNAVVGTALIKKYPKLESEFVYGDYKVYDVRKMIAKSEQEIGKATAKYFFYSNIMNFFKTEITLANGEIRKRPLIETNGETGEIVWDKGRDFATVRKVLSMPQVNIVKKTEVQTGGFSKESILPKRNSDKLIARKKDWDPKKYGGFDSPTVAYSVLVVAKVEKGKSKKLKSVKELLGITIMERSSFEKNPIDFLEAKGYKEVKKDLIIKLPKYSLFELENGRKRMLASAGELQKGNELALPSKYVNFLYLASHYEKLKGSPEDNEQKQLFVEQHKHYLDEIIEQISEFSKRVILADANLDKVLSAYNKHRDKPIREQAENIIHLFTLTNLGAPAAFKYFDTTIDRKRYTSTKEVLDATLIHQSITGLYETRIDLSQLGGDGGPAPGGSEAAAKGGTLNIEDEYRLHETSKEPDVSLGSTWLSDFPQAWAETGGMGLAVRQAPLIIPLKATSTPVSIKQYPMSQEARLGIKPHIQRLLDQGILVPCQSPWNTPLLPVKKPGTNDYRPVQDLREVNKRVEDIHPTVPNPYNLLSGLPPSHQWYTVLDLKDAFFCLRLHPTSQPLFAFEWRDPEMGISGQLTWTRLPQGFKNSPTLFNEALHRDLAGFRIQHPDLILLQYVDDLLLAATSELDCQQGTRALLQTLGDLGYRASAKKAQICQKQVKYLGYLLKEGQRWLTEARKETVMGQPIPKTPRQLREFLGTAGFCRLWIPGFAEMAAPLYPLTKPGTLFNWGPDQQKAFQEIKQALLTAPALGLPDLTKPFELFVDEKQGYAKGVLTQKLGPWRRPVAYLSKKLDPVAAGWPPCLRMVAAIAVLTKDAGKLTMGQPLVILAPHAVEALVKQPPDRWLSNARMTHYQALLLDTDRVQFGPVVALNPATLLPLPEEGLQHDCLDILAEAHGTRSDLMDQPLPDADHTWYTDGSSFLQEGQRKAGAAVTTETEVIWARALPAGTSAQRAELIALTQALKMAEGKKLNVYTDSRYAFATAHIHGEIYRRRGWLTSEGKEIKNKDEILALLKALFLPKRLSIIHCPGHQKGNSAEARGNRMADQAAREVATRETPETSTLLAGKRTADGSEFEKRTADGSEFESPKKKAKVE

SEQ ID NO: 2249 - protein, 2115 aa, synthetic construct
MPAAKRVKLDGGDKKYSIGLDIGTNSVGWAVITDEYKVPSKKFKVLGNTDRHSIKKNLIGALLFDSGETAEATRLKRTARRRYTRRKNRICYLQEIFSNEMAKVDDSFFHRLEESFLVEEDKKHERHPIFGNIVDEVAYHEKYPTIYHLRKKLVDSTDKADLRLIYLALAHMIKFRGHFLIEGDLNPDNSDVDKLFIQLVQTYNQLFEENPINASGVDAKAILSARLSKSRRLENLIAQLPGEKKNGLFGNLIALSLGLTPNFKSNFDLAEDAKLQLSKDTYDDDLDNLLAQIGDQYADLFLAAKNLSDAILLSDILRVNTEITKAPLSASMIKRYDEHHQDLTLLKALVRQQLPEKYKEIFFDQSKNGYAGYIDGGASQEEFYKFIKPILEKMDGTEELLVKLNREDLLRKQRTFDNGSIPHQIHLGELHAILRRQEDFYPFLKDNREKIEKILTFRIPYYVGPLARGNSRFAWMTRKSEETITPWNFEEVVDKGASAQSFIERMTNFDKNLPNEKVLPKHSLLYEYFTVYNELTKVKYVTEGMRKPAFLSGEQKKAIVDLLFKTNRKVTVKQLKEDYFKKIECFDSVEISGVEDRFNASLGTYHDLLKIIKDKDFLDNEENEDILEDIVLTLTLFEDREMIEERLKTYAHLFDDKVMKQLKRRRYTGWGRLSRKLINGIRDKQSGKTILDFLKSDGFANRNFMQLIHDDSLTFKEDIQKAQVSGQGDSLHEHIANLAGSPAIKKGILQTVKVVDELVKVMGRHKPENIVIEMARENQTTQKGQKNSRERMKRIEEGIKELGSQILKEHPVENTQLQNEKLYLYYLQNGRDMYVDQELDINRLSDYDVDHIVPQSFLKDDSIDNKVLTRSDKARGKSDNVPSEEVVKKMKNYWRQLLNAKLITQRKFDNLTKAERGGLSELDKAGFIKRQLVETRQITKHVAQILDSRMNTKYDENDKLIREVKVITLKSKLVSDFRKDFQFYKVREINNYHHAHDAYLNAVVGTALIKKYPKLESEFVYGDYKVYDVRKMIAKSEQEIGKATAKYFFYSNIMNFFKTEITLANGEIRKRPLIETNGETGEIVWDKGRDFATVRKVLSMPQVNIVKKTEVQTGGFSKESILPKRNSDKLIARKKDWDPKKYGGFDSPTVAYSVLVVAKVEKGKSKKLKSVKELLGITIMERSSFEKNPIDFLEAKGYKEVKKDLIIKLPKYSLFELENGRKRMLASAGELQKGNELALPSKYVNFLYLASHYEKLKGSPEDNEQKQLFVEQHKHYLDEIIEQISEFSKRVILADANLDKVLSAYNKHRDKPIREQAENIIHLFTLTNLGAPAAFKYFDTTIDRKRYTSTKEVLDATLIHQSITGLYETRIDLSQLGGDGGEAAAKEAAAKEAAAKEAAAKEAAAKEAAAKGGTLNIEDEYRLHETSKEPDVSLGSTWLSDFPQAWAETGGMGLAVRQAPLIIPLKATSTPVSIKQYPMSQEARLGIKPHIQRLLDQGILVPCQSPWNTPLLPVKKPGTNDYRPVQDLREVNKRVEDIHPTVPNPYNLLSGLPPSHQWYTVLDLKDAFFCLRLHPTSQPLFAFEWRDPEMGISGQLTWTRLPQGFKNSPTLFNEALHRDLAGFRIQHPDLILLQYVDDLLLAATSELDCQQGTRALLQTLGDLGYRASAKKAQICQKQVKYLGYLLKEGQRWLTEARKETVMGQPIPKTPRQLREFLGTAGFCRLWIPGFAEMAAPLYPLTKPGTLFNWGPDQQKAFQEIKQALLTAPALGLPDLTKPFELFVDEKQGYAKGVLTQKLGPWRRPVAYLSKKLDPVAAGWPPCLRMVAAIAVLTKDAGKLTMGQPLVILAPHAVEALVKQPPDRWLSNARMTHYQALLLDTDRVQFGPVVALNPATLLPLPEEGLQHDCLDILAEAHGTRSDLMDQPLPDADHTWYTDGSSFLQEGQRKAGAAVTTETEVIWARALPAGTSAQRAELIALTQALKMAEGKKLNVYTDSRYAFATAHIHGEIYRRRGWLTSEGKEIKNKDEILALLKALFLPKRLSIIHCPGHQKGNSAEARGNRMADQAAREVATRETPETSTLLAGKRTADGSEFEKRTADGSEFESPKKKAKVE

SEQ ID NO: 2250 - protein, 2097 aa, synthetic construct
MPAAKRVKLDGGDKKYSIGLDIGTNSVGWAVITDEYKVPSKKFKVLGNTDRHSIKKNLIGALLFDSGETAEATRLKRTARRRYTRRKNRICYLQEIFSNEMAKVDDSFFHRLEESFLVEEDKKHERHPIFGNIVDEVAYHEKYPTIYHLRKKLVDSTDKADLRLIYLALAHMIKFRGHFLIEGDLNPDNSDVDKLFIQLVQTYNQLFEENPINASGVDAKAILSARLSKSRRLENLIAQLPGEKKNGLFGNLIALSLGLTPNFKSNFDLAEDAKLQLSKDTYDDDLDNLLAQIGDQYADLFLAAKNLSDAILLSDILRVNTEITKAPLSASMIKRYDEHHQDLTLLKALVRQQLPEKYKEIFFDQSKNGYAGYIDGGASQEEFYKFIKPILEKMDGTEELLVKLNREDLLRKQRTFDNGSIPHQIHLGELHAILRRQEDFYPFLKDNREKIEKILTFRIPYYVGPLARGNSRFAWMTRKSEETITPWNFEEVVDKGASAQSFIERMTNFDKNLPNEKVLPKHSLLYEYFTVYNELTKVKYVTEGMRKPAFLSGEQKKAIVDLLFKTNRKVTVKQLKEDYFKKIECFDSVEISGVEDRFNASLGTYHDLLKIIKDKDFLDNEENEDILEDIVLTLTLFEDREMIEERLKTYAHLFDDKVMKQLKRRRYTGWGRLSRKLINGIRDKQSGKTILDFLKSDGFANRNFMQLIHDDSLTFKEDIQKAQVSGQGDSLHEHIANLAGSPAIKKGILQTVKVVDELVKVMGRHKPENIVIEMARENQTTQKGQKNSRERMKRIEEGIKELGSQILKEHPVENTQLQNEKLYLYYLQNGRDMYVDQELDINRLSDYDVDHIVPQSFLKDDSIDNKVLTRSDKARGKSDNVPSEEVVKKMKNYWRQLLNAKLITQRKFDNLTKAERGGLSELDKAGFIKRQLVETRQITKHVAQILDSRMNTKYDENDKLIREVKVITLKSKLVSDFRKDFQFYKVREINNYHHAHDAYLNAVVGTALIKKYPKLESEFVYGDYKVYDVRKMIAKSEQEIGKATAKYFFYSNIMNFFKTEITLANGEIRKRPLIETNGETGEIVWDKGRDFATVRKVLSMPQVNIVKKTEVQTGGFSKESILPKRNSDKLIARKKDWDPKKYGGFDSPTVAYSVLVVAKVEKGKSKKLKSVKELLGITIMERSSFEKNPIDFLEAKGYKEVKKDLIIKLPKYSLFELENGRKRMLASAGELQKGNELALPSKYVNFLYLASHYEKLKGSPEDNEQKQLFVEQHKHYLDEIIEQISEFSKRVILADANLDKVLSAYNKHRDKPIREQAENIIHLFTLTNLGAPAAFKYFDTTIDRKRYTSTKEVLDATLIHQSITGLYETRIDLSQLGGDGGGGSGGSGGSGGSGGTLNIEDEYRLHETSKEPDVSLGSTWLSDFPQAWAETGGMGLAVRQAPLIIPLKATSTPVSIKQYPMSQEARLGIKPHIQRLLDQGILVPCQSPWNTPLLPVKKPGTNDYRPVQDLREVNKRVEDIHPTVPNPYNLLSGLPPSHQWYTVLDLKDAFFCLRLHPTSQPLFAFEWRDPEMGISGQLTWTRLPQGFKNSPTLFNEALHRDLAGFRIQHPDLILLQYVDDLLLAATSELDCQQGTRALLQTLGDLGYRASAKKAQICQKQVKYLGYLLKEGQRWLTEARKETVMGQPIPKTPRQLREFLGTAGFCRLWIPGFAEMAAPLYPLTKPGTLFNWGPDQQKAFQEIKQALLTAPALGLPDLTKPFELFVDEKQGYAKGVLTQKLGPWRRPVAYLSKKLDPVAAGWPPCLRMVAAIAVLTKDAGKLTMGQPLVILAPHAVEALVKQPPDRWLSNARMTHYQALLLDTDRVQFGPVVALNPATLLPLPEEGLQHDCLDILAEAHGTRSDLMDQPLPDADHTWYTDGSSFLQEGQRKAGAAVTTETEVIWARALPAGTSAQRAELIALTQALKMAEGKKLNVYTDSRYAFATAHIHGEIYRRRGWLTSEGKEIKNKDEILALLKALFLPKRLSIIHCPGHQKGNSAEARGNRMADQAAREVATRETPETSTLLAGKRTADGSEFEKRTADGSEFESPKKKAKVE

SEQ ID NO: 2251 - protein, 2096 aa, synthetic construct
MPAAKRVKLDGGDKKYSIGLDIGTNSVGWAVITDEYKVPSKKFKVLGNTDRHSIKKNLIGALLFDSGETAEATRLKRTARRRYTRRKNRICYLQEIFSNEMAKVDDSFFHRLEESFLVEEDKKHERHPIFGNIVDEVAYHEKYPTIYHLRKKLVDSTDKADLRLIYLALAHMIKFRGHFLIEGDLNPDNSDVDKLFIQLVQTYNQLFEENPINASGVDAKAILSARLSKSRRLENLIAQLPGEKKNGLFGNLIALSLGLTPNFKSNFDLAEDAKLQLSKDTYDDDLDNLLAQIGDQYADLFLAAKNLSDAILLSDILRVNTEITKAPLSASMIKRYDEHHQDLTLLKALVRQQLPEKYKEIFFDQSKNGYAGYIDGGASQEEFYKFIKPILEKMDGTEELLVKLNREDLLRKQRTFDNGSIPHQIHLGELHAILRRQEDFYPFLKDNREKIEKILTFRIPYYVGPLARGNSRFAWMTRKSEETITPWNFEEVVDKGASAQSFIERMTNFDKNLPNEKVLPKHSLLYEYFTVYNELTKVKYVTEGMRKPAFLSGEQKKAIVDLLFKTNRKVTVKQLKEDYFKKIECFDSVEISGVEDRFNASLGTYHDLLKIIKDKDFLDNEENEDILEDIVLTLTLFEDREMIEERLKTYAHLFDDKVMKQLKRRRYTGWGRLSRKLINGIRDKQSGKTILDFLKSDGFANRNFMQLIHDDSLTFKEDIQKAQVSGQGDSLHEHIANLAGSPAIKKGILQTVKVVDELVKVMGRHKPENIVIEMARENQTTQKGQKNSRERMKRIEEGIKELGSQILKEHPVENTQLQNEKLYLYYLQNGRDMYVDQELDINRLSDYDVDHIVPQSFLKDDSIDNKVLTRSDKARGKSDNVPSEEVVKKMKNYWRQLLNAKLITQRKFDNLTKAERGGLSELDKAGFIKRQLVETRQITKHVAQILDSRMNTKYDENDKLIREVKVITLKSKLVSDFRKDFQFYKVREINNYHHAHDAYLNAVVGTALIKKYPKLESEFVYGDYKVYDVRKMIAKSEQEIGKATAKYFFYSNIMNFFKTEITLANGEIRKRPLIETNGETGEIVWDKGRDFATVRKVLSMPQVNIVKKTEVQTGGFSKESILPKRNSDKLIARKKDWDPKKYGGFDSPTVAYSVLVVAKVEKGKSKKLKSVKELLGITIMERSSFEKNPIDFLEAKGYKEVKKDLIIKLPKYSLFELENGRKRMLASAGELQKGNELALPSKYVNFLYLASHYEKLKGSPEDNEQKQLFVEQHKHYLDEIIEQISEFSKRVILADANLDKVLSAYNKHRDKPIREQAENIIHLFTLTNLGAPAAFKYFDTTIDRKRYTSTKEVLDATLIHQSITGLYETRIDLSQLGGDGGGGSEAAAKPAPGGTLNIEDEYRLHETSKEPDVSLGSTWLSDFPQAWAETGGMGLAVRQAPLIIPLKATSTPVSIKQYPMSQEARLGIKPHIQRLLDQGILVPCQSPWNTPLLPVKKPGTNDYRPVQDLREVNKRVEDIHPTVPNPYNLLSGLPPSHQWYTVLDLKDAFFCLRLHPTSQPLFAFEWRDPEMGISGQLTWTRLPQGFKNSPTLFNEALHRDLAGFRIQHPDLILLQYVDDLLLAATSELDCQQGTRALLQTLGDLGYRASAKKAQICQKQVKYLGYLLKEGQRWLTEARKETVMGQPIPKTPRQLREFLGTAGFCRLWIPGFAEMAAPLYPLTKPGTLFNWGPDQQKAFQEIKQALLTAPALGLPDLTKPFELFVDEKQGYAKGVLTQKLGPWRRPVAYLSKKLDPVAAGWPPCLRMVAAIAVLTKDAGKLTMGQPLVILAPHAVEALVKQPPDRWLSNARMTHYQALLLDTDRVQFGPVVALNPATLLPLPEEGLQHDCLDILAEAHGTRSDLMDQPLPDADHTWYTDGSSFLQEGQRKAGAAVTTETEVIWARALPAGTSAQRAELIALTQALKMAEGKKLNVYTDSRYAFATAHIHGEIYRRRGWLTSEGKEIKNKDEILALLKALFLPKRLSIIHCPGHQKGNSAEARGNRMADQAAREVATRETPETSTLLAGKRTADGSEFEKRTADGSEFESPKKKAKVE

SEQ ID NO: 2252 - protein, 2100 aa, synthetic construct
MPAAKRVKLDGGDKKYSIGLDIGTNSVGWAVITDEYKVPSKKFKVLGNTDRHSIKKNLIGALLFDSGETAEATRLKRTARRRYTRRKNRICYLQEIFSNEMAKVDDSFFHRLEESFLVEEDKKHERHPIFGNIVDEVAYHEKYPTIYHLRKKLVDSTDKADLRLIYLALAHMIKFRGHFLIEGDLNPDNSDVDKLFIQLVQTYNQLFEENPINASGVDAKAILSARLSKSRRLENLIAQLPGEKKNGLFGNLIALSLGLTPNFKSNFDLAEDAKLQLSKDTYDDDLDNLLAQIGDQYADLFLAAKNLSDAILLSDILRVNTEITKAPLSASMIKRYDEHHQDLTLLKALVRQQLPEKYKEIFFDQSKNGYAGYIDGGASQEEFYKFIKPILEKMDGTEELLVKLNREDLLRKQRTFDNGSIPHQIHLGELHAILRRQEDFYPFLKDNREKIEKILTFRIPYYVGPLARGNSRFAWMTRKSEETITPWNFEEVVDKGASAQSFIERMTNFDKNLPNEKVLPKHSLLYEYFTVYNELTKVKYVTEGMRKPAFLSGEQKKAIVDLLFKTNRKVTVKQLKEDYFKKIECFDSVEISGVEDRFNASLGTYHDLLKIIKDKDFLDNEENEDILEDIVLTLTLFEDREMIEERLKTYAHLFDDKVMKQLKRRRYTGWGRLSRKLINGIRDKQSGKTILDFLKSDGFANRNFMQLIHDDSLTFKEDIQKAQVSGQGDSLHEHIANLAGSPAIKKGILQTVKVVDELVKVMGRHKPENIVIEMARENQTTQKGQKNSRERMKRIEEGIKELGSQILKEHPVENTQLQNEKLYLYYLQNGRDMYVDQELDINRLSDYDVDHIVPQSFLKDDSIDNKVLTRSDKARGKSDNVPSEEVVKKMKNYWRQLLNAKLITQRKFDNLTKAERGGLSELDKAGFIKRQLVETRQITKHVAQILDSRMNTKYDENDKLIREVKVITLKSKLVSDFRKDFQFYKVREINNYHHAHDAYLNAVVGTALIKKYPKLESEFVYGDYKVYDVRKMIAKSEQEIGKATAKYFFYSNIMNFFKTEITLANGEIRKRPLIETNGETGEIVWDKGRDFATVRKVLSMPQVNIVKKTEVQTGGFSKESILPKRNSDKLIARKKDWDPKKYGGFDSPTVAYSVLVVAKVEKGKSKKLKSVKELLGITIMERSSFEKNPIDFLEAKGYKEVKKDLIIKLPKYSLFELENGRKRMLASAGELQKGNELALPSKYVNFLYLASHYEKLKGSPEDNEQKQLFVEQHKHYLDEIIEQISEFSKRVILADANLDKVLSAYNKHRDKPIREQAENIIHLFTLTNLGAPAAFKYFDTTIDRKRYTSTKEVLDATLIHQSITGLYETRIDLSQLGGDGGEAAAKEAAAKEAAAKGGTLNIEDEYRLHETSKEPDVSLGSTWLSDFPQAWAETGGMGLAVRQAPLIIPLKATSTPVSIKQYPMSQEARLGIKPHIQRLLDQGILVPCQSPWNTPLLPVKKPGTNDYRPVQDLREVNKRVEDIHPTVPNPYNLLSGLPPSHQWYTVLDLKDAFFCLRLHPTSQPLFAFEWRDPEMGISGQLTWTRLPQGFKNSPTLFNEALHRDLAGFRIQHPDLILLQYVDDLLLAATSELDCQQGTRALLQTLGDLGYRASAKKAQICQKQVKYLGYLLKEGQRWLTEARKETVMGQPIPKTPRQLREFLGTAGFCRLWIPGFAEMAAPLYPLTKPGTLFNWGPDQQKAFQEIKQALLTAPALGLPDLTKPFELFVDEKQGYAKGVLTQKLGPWRRPVAYLSKKLDPVAAGWPPCLRMVAAIAVLTKDAGKLTMGQPLVILAPHAVEALVKQPPDRWLSNARMTHYQALLLDTDRVQFGPVVALNPATLLPLPEEGLQHDCLDILAEAHGTRSDLMDQPLPDADHTWYTDGSSFLQEGQRKAGAAVTTETEVIWARALPAGTSAQRAELIALTQALKMAEGKKLNVYTDSRYAFATAHIHGEIYRRRGWLTSEGKEIKNKDEILALLKALFLPKRLSIIHCPGHQKGNSAEARGNRMADQAAREVATRETPETSTLLAGKRTADGSEFEKRTADGSEFESPKKKAKVE

SEQ ID NO: 2253 - protein, 2096 aa, synthetic construct
MPAAKRVKLDGGDKKYSIGLDIGTNSVGWAVITDEYKVPSKKFKVLGNTDRHSIKKNLIGALLFDSGETAEATRLKRTARRRYTRRKNRICYLQEIFSNEMAKVDDSFFHRLEESFLVEEDKKHERHPIFGNIVDEVAYHEKYPTIYHLRKKLVDSTDKADLRLIYLALAHMIKFRGHFLIEGDLNPDNSDVDKLFIQLVQTYNQLFEENPINASGVDAKAILSARLSKSRRLENLIAQLPGEKKNGLFGNLIALSLGLTPNFKSNFDLAEDAKLQLSKDTYDDDLDNLLAQIGDQYADLFLAAKNLSDAILLSDILRVNTEITKAPLSASMIKRYDEHHQDLTLLKALVRQQLPEKYKEIFFDQSKNGYAGYIDGGASQEEFYKFIKPILEKMDGTEELLVKLNREDLLRKQRTFDNGSIPHQIHLGELHAILRRQEDFYPFLKDNREKIEKILTFRIPYYVGPLARGNSRFAWMTRKSEETITPWNFEEVVDKGASAQSFIERMTNFDKNLPNEKVLPKHSLLYEYFTVYNELTKVKYVTEGMRKPAFLSGEQKKAIVDLLFKTNRKVTVKQLKEDYFKKIECFDSVEISGVEDRFNASLGTYHDLLKIIKDKDFLDNEENEDILEDIVLTLTLFEDREMIEERLKTYAHLFDDKVMKQLKRRRYTGWGRLSRKLINGIRDKQSGKTILDFLKSDGFANRNFMQLIHDDSLTFKEDIQKAQVSGQGDSLHEHIANLAGSPAIKKGILQTVKVVDELVKVMGRHKPENIVIEMARENQTTQKGQKNSRERMKRIEEGIKELGSQILKEHPVENTQLQNEKLYLYYLQNGRDMYVDQELDINRLSDYDVDHIVPQSFLKDDSIDNKVLTRSDKARGKSDNVPSEEVVKKMKNYWRQLLNAKLITQRKFDNLTKAERGGLSELDKAGFIKRQLVETRQITKHVAQILDSRMNTKYDENDKLIREVKVITLKSKLVSDFRKDFQFYKVREINNYHHAHDAYLNAVVGTALIKKYPKLESEFVYGDYKVYDVRKMIAKSEQEIGKATAKYFFYSNIMNFFKTEITLANGEIRKRPLIETNGETGEIVWDKGRDFATVRKVLSMPQVNIVKKTEVQTGGFSKESILPKRNSDKLIARKKDWDPKKYGGFDSPTVAYSVLVVAKVEKGKSKKLKSVKELLGITIMERSSFEKNPIDFLEAKGYKEVKKDLIIKLPKYSLFELENGRKRMLASAGELQKGNELALPSKYVNFLYLASHYEKLKGSPEDNEQKQLFVEQHKHYLDEIIEQISEFSKRVILADANLDKVLSAYNKHRDKPIREQAENIIHLFTLTNLGAPAAFKYFDTTIDRKRYTSTKEVLDATLIHQSITGLYETRIDLSQLGGDGGPAPEAAAKGSSGGTLNIEDEYRLHETSKEPDVSLGSTWLSDFPQAWAETGGMGLAVRQAPLIIPLKATSTPVSIKQYPMSQEARLGIKPHIQRLLDQGILVPCQSPWNTPLLPVKKPGTNDYRPVQDLREVNKRVEDIHPTVPNPYNLLSGLPPSHQWYTVLDLKDAFFCLRLHPTSQPLFAFEWRDPEMGISGQLTWTRLPQGFKNSPTLFNEALHRDLAGFRIQHPDLILLQYVDDLLLAATSELDCQQGTRALLQTLGDLGYRASAKKAQICQKQVKYLGYLLKEGQRWLTEARKETVMGQPIPKTPRQLREFLGTAGFCRLWIPGFAEMAAPLYPLTKPGTLFNWGPDQQKAFQEIKQALLTAPALGLPDLTKPFELFVDEKQGYAKGVLTQKLGPWRRPVAYLSKKLDPVAAGWPPCLRMVAAIAVLTKDAGKLTMGQPLVILAPHAVEALVKQPPDRWLSNARMTHYQALLLDTDRVQFGPVVALNPATLLPLPEEGLQHDCLDILAEAHGTRSDLMDQPLPDADHTWYTDGSSFLQEGQRKAGAAVTTETEVIWARALPAGTSAQRAELIALTQALKMAEGKKLNVYTDSRYAFATAHIHGEIYRRRGWLTSEGKEIKNKDEILALLKALFLPKRLSIIHCPGHQKGNSAEARGNRMADQAAREVATRETPETSTLLAGKRTADGSEFEKRTADGSEFESPKKKAKVE

SEQ ID NO: 2254 - protein, 2090 aa, synthetic construct
MPAAKRVKLDGGDKKYSIGLDIGTNSVGWAVITDEYKVPSKKFKVLGNTDRHSIKKNLIGALLFDSGETAEATRLKRTARRRYTRRKNRICYLQEIFSNEMAKVDDSFFHRLEESFLVEEDKKHERHPIFGNIVDEVAYHEKYPTIYHLRKKLVDSTDKADLRLIYLALAHMIKFRGHFLIEGDLNPDNSDVDKLFIQLVQTYNQLFEENPINASGVDAKAILSARLSKSRRLENLIAQLPGEKKNGLFGNLIALSLGLTPNFKSNFDLAEDAKLQLSKDTYDDDLDNLLAQIGDQYADLFLAAKNLSDAILLSDILRVNTEITKAPLSASMIKRYDEHHQDLTLLKALVRQQLPEKYKEIFFDQSKNGYAGYIDGGASQEEFYKFIKPILEKMDGTEELLVKLNREDLLRKQRTFDNGSIPHQIHLGELHAILRRQEDFYPFLKDNREKIEKILTFRIPYYVGPLARGNSRFAWMTRKSEETITPWNFEEVVDKGASAQSFIERMTNFDKNLPNEKVLPKHSLLYEYFTVYNELTKVKYVTEGMRKPAFLSGEQKKAIVDLLFKTNRKVTVKQLKEDYFKKIECFDSVEISGVEDRFNASLGTYHDLLKIIKDKDFLDNEENEDILEDIVLTLTLFEDREMIEERLKTYAHLFDDKVMKQLKRRRYTGWGRLSRKLINGIRDKQSGKTILDFLKSDGFANRNFMQLIHDDSLTFKEDIQKAQVSGQGDSLHEHIANLAGSPAIKKGILQTVKVVDELVKVMGRHKPENIVIEMARENQTTQKGQKNSRERMKRIEEGIKELGSQILKEHPVENTQLQNEKLYLYYLQNGRDMYVDQELDINRLSDYDVDHIVPQSFLKDDSIDNKVLTRSDKARGKSDNVPSEEVVKKMKNYWRQLLNAKLITQRKFDNLTKAERGGLSELDKAGFIKRQLVETRQITKHVAQILDSRMNTKYDENDKLIREVKVITLKSKLVSDFRKDFQFYKVREINNYHHAHDAYLNAVVGTALIKKYPKLESEFVYGDYKVYDVRKMIAKSEQEIGKATAKYFFYSNIMNFFKTEITLANGEIRKRPLIETNGETGEIVWDKGRDFATVRKVLSMPQVNIVKKTEVQTGGFSKESILPKRNSDKLIARKKDWDPKKYGGFDSPTVAYSVLVVAKVEKGKSKKLKSVKELLGITIMERSSFEKNPIDFLEAKGYKEVKKDLIIKLPKYSLFELENGRKRMLASAGELQKGNELALPSKYVNFLYLASHYEKLKGSPEDNEQKQLFVEQHKHYLDEIIEQISEFSKRVILADANLDKVLSAYNKHRDKPIREQAENIIHLFTLTNLGAPAAFKYFDTTIDRKRYTSTKEVLDATLIHQSITGLYETRIDLSQLGGDGGGGGGGGGTLNIEDEYRLHETSKEPDVSLGSTWLSDFPQAWAETGGMGLAVRQAPLIIPLKATSTPVSIKQYPMSQEARLGIKPHIQRLLDQGILVPCQSPWNTPLLPVKKPGTNDYRPVQDLREVNKRVEDIHPTVPNPYNLLSGLPPSHQWYTVLDLKDAFFCLRLHPTSQPLFAFEWRDPEMGISGQLTWTRLPQGFKNSPTLFNEALHRDLAGFRIQHPDLILLQYVDDLLLAATSELDCQQGTRALLQTLGDLGYRASAKKAQICQKQVKYLGYLLKEGQRWLTEARKETVMGQPIPKTPRQLREFLGTAGFCRLWIPGFAEMAAPLYPLTKPGTLFNWGPDQQKAFQEIKQALLTAPALGLPDLTKPFELFVDEKQGYAKGVLTQKLGPWRRPVAYLSKKLDPVAAGWPPCLRMVAAIAVLTKDAGKLTMGQPLVILAPHAVEALVKQPPDRWLSNARMTHYQALLLDTDRVQFGPVVALNPATLLPLPEEGLQHDCLDILAEAHGTRSDLMDQPLPDADHTWYTDGSSFLQEGQRKAGAAVTTETEVIWARALPAGTSAQRAELIALTQALKMAEGKKLNVYTDSRYAFATAHIHGEIYRRRGWLTSEGKEIKNKDEILALLKALFLPKRLSIIHCPGHQKGNSAEARGNRMADQAAREVATRETPETSTLLAGKRTADGSEFEKRTADGSEFESPKKKAKVE

SEQ ID NO: 2255 - protein, 2096 aa, synthetic construct
MPAAKRVKLDGGDKKYSIGLDIGTNSVGWAVITDEYKVPSKKFKVLGNTDRHSIKKNLIGALLFDSGETAEATRLKRTARRRYTRRKNRICYLQEIFSNEMAKVDDSFFHRLEESFLVEEDKKHERHPIFGNIVDEVAYHEKYPTIYHLRKKLVDSTDKADLRLIYLALAHMIKFRGHFLIEGDLNPDNSDVDKLFIQLVQTYNQLFEENPINASGVDAKAILSARLSKSRRLENLIAQLPGEKKNGLFGNLIALSLGLTPNFKSNFDLAEDAKLQLSKDTYDDDLDNLLAQIGDQYADLFLAAKNLSDAILLSDILRVNTEITKAPLSASMIKRYDEHHQDLTLLKALVRQQLPEKYKEIFFDQSKNGYAGYIDGGASQEEFYKFIKPILEKMDGTEELLVKLNREDLLRKQRTFDNGSIPHQIHLGELHAILRRQEDFYPFLKDNREKIEKILTFRIPYYVGPLARGNSRFAWMTRKSEETITPWNFEEVVDKGASAQSFIERMTNFDKNLPNEKVLPKHSLLYEYFTVYNELTKVKYVTEGMRKPAFLSGEQKKAIVDLLFKTNRKVTVKQLKEDYFKKIECFDSVEISGVEDRFNASLGTYHDLLKIIKDKDFLDNEENEDILEDIVLTLTLFEDREMIEERLKTYAHLFDDKVMKQLKRRRYTGWGRLSRKLINGIRDKQSGKTILDFLKSDGFANRNFMQLIHDDSLTFKEDIQKAQVSGQGDSLHEHIANLAGSPAIKKGILQTVKVVDELVKVMGRHKPENIVIEMARENQTTQKGQKNSRERMKRIEEGIKELGSQILKEHPVENTQLQNEKLYLYYLQNGRDMYVDQELDINRLSDYDVDHIVPQSFLKDDSIDNKVLTRSDKARGKSDNVPSEEVVKKMKNYWRQLLNAKLITQRKFDNLTKAERGGLSELDKAGFIKRQLVETRQITKHVAQILDSRMNTKYDENDKLIREVKVITLKSKLVSDFRKDFQFYKVREINNYHHAHDAYLNAVVGTALIKKYPKLESEFVYGDYKVYDVRKMIAKSEQEIGKATAKYFFYSNIMNFFKTEITLANGEIRKRPLIETNGETGEIVWDKGRDFATVRKVLSMPQVNIVKKTEVQTGGFSKESILPKRNSDKLIARKKDWDPKKYGGFDSPTVAYSVLVVAKVEKGKSKKLKSVKELLGITIMERSSFEKNPIDFLEAKGYKEVKKDLIIKLPKYSLFELENGRKRMLASAGELQKGNELALPSKYVNFLYLASHYEKLKGSPEDNEQKQLFVEQHKHYLDEIIEQISEFSKRVILADANLDKVLSAYNKHRDKPIREQAENIIHLFTLTNLGAPAAFKYFDTTIDRKRYTSTKEVLDATLIHQSITGLYETRIDLSQLGGDGGEAAAKPAPGSSGGTLNIEDEYRLHETSKEPDVSLGSTWLSDFPQAWAETGGMGLAVRQAPLIIPLKATSTPVSIKQYPMSQEARLGIKPHIQRLLDQGILVPCQSPWNTPLLPVKKPGTNDYRPVQDLREVNKRVEDIHPTVPNPYNLLSGLPPSHQWYTVLDLKDAFFCLRLHPTSQPLFAFEWRDPEMGISGQLTWTRLPQGFKNSPTLFNEALHRDLAGFRIQHPDLILLQYVDDLLLAATSELDCQQGTRALLQTLGDLGYRASAKKAQICQKQVKYLGYLLKEGQRWLTEARKETVMGQPIPKTPRQLREFLGTAGFCRLWIPGFAEMAAPLYPLTKPGTLFNWGPDQQKAFQEIKQALLTAPALGLPDLTKPFELFVDEKQGYAKGVLTQKLGPWRRPVAYLSKKLDPVAAGWPPCLRMVAAIAVLTKDAGKLTMGQPLVILAPHAVEALVKQPPDRWLSNARMTHYQALLLDTDRVQFGPVVALNPATLLPLPEEGLQHDCLDILAEAHGTRSDLMDQPLPDADHTWYTDGSSFLQEGQRKAGAAVTTETEVIWARALPAGTSAQRAELIALTQALKMAEGKKLNVYTDSRYAFATAHIHGEIYRRRGWLTSEGKEIKNKDEILALLKALFLPKRLSIIHCPGHQKGNSAEARGNRMADQAAREVATRETPETSTLLAGKRTADGSEFEKRTADGSEFESPKKKAKVE

SEQ ID NO: 2256 - protein, 2096 aa, synthetic construct
MPAAKRVKLDGGDKKYSIGLDIGTNSVGWAVITDEYKVPSKKFKVLGNTDRHSIKKNLIGALLFDSGETAEATRLKRTARRRYTRRKNRICYLQEIFSNEMAKVDDSFFHRLEESFLVEEDKKHERHPIFGNIVDEVAYHEKYPTIYHLRKKLVDSTDKADLRLIYLALAHMIKFRGHFLIEGDLNPDNSDVDKLFIQLVQTYNQLFEENPINASGVDAKAILSARLSKSRRLENLIAQLPGEKKNGLFGNLIALSLGLTPNFKSNFDLAEDAKLQLSKDTYDDDLDNLLAQIGDQYADLFLAAKNLSDAILLSDILRVNTEITKAPLSASMIKRYDEHHQDLTLLKALVRQQLPEKYKEIFFDQSKNGYAGYIDGGASQEEFYKFIKPILEKMDGTEELLVKLNREDLLRKQRTFDNGSIPHQIHLGELHAILRRQEDFYPFLKDNREKIEKILTFRIPYYVGPLARGNSRFAWMTRKSEETITPWNFEEVVDKGASAQSFIERMTNFDKNLPNEKVLPKHSLLYEYFTVYNELTKVKYVTEGMRKPAFLSGEQKKAIVDLLFKTNRKVTVKQLKEDYFKKIECFDSVEISGVEDRFNASLGTYHDLLKIIKDKDFLDNEENEDILEDIVLTLTLFEDREMIEERLKTYAHLFDDKVMKQLKRRRYTGWGRLSRKLINGIRDKQSGKTILDFLKSDGFANRNFMQLIHDDSLTFKEDIQKAQVSGQGDSLHEHIANLAGSPAIKKGILQTVKVVDELVKVMGRHKPENIVIEMARENQTTQKGQKNSRERMKRIEEGIKELGSQILKEHPVENTQLQNEKLYLYYLQNGRDMYVDQELDINRLSDYDVDHIVPQSFLKDDSIDNKVLTRSDKARGKSDNVPSEEVVKKMKNYWRQLLNAKLITQRKFDNLTKAERGGLSELDKAGFIKRQLVETRQITKHVAQILDSRMNTKYDENDKLIREVKVITLKSKLVSDFRKDFQFYKVREINNYHHAHDAYLNAVVGTALIKKYPKLESEFVYGDYKVYDVRKMIAKSEQEIGKATAKYFFYSNIMNFFKTEITLANGEIRKRPLIETNGETGEIVWDKGRDFATVRKVLSMPQVNIVKKTEVQTGGFSKESILPKRNSDKLIARKKDWDPKKYGGFDSPTVAYSVLVVAKVEKGKSKKLKSVKELLGITIMERSSFEKNPIDFLEAKGYKEVKKDLIIKLPKYSLFELENGRKRMLASAGELQKGNELALPSKYVNFLYLASHYEKLKGSPEDNEQKQLFVEQHKHYLDEIIEQISEFSKRVILADANLDKVLSAYNKHRDKPIREQAENIIHLFTLTNLGAPAAFKYFDTTIDRKRYTSTKEVLDATLIHQSITGLYETRIDLSQLGGDGGEAAAKGGGGGSGGTLNIEDEYRLHETSKEPDVSLGSTWLSDFPQAWAETGGMGLAVRQAPLIIPLKATSTPVSIKQYPMSQEARLGIKPHIQRLLDQGILVPCQSPWNTPLLPVKKPGTNDYRPVQDLREVNKRVEDIHPTVPNPYNLLSGLPPSHQWYTVLDLKDAFFCLRLHPTSQPLFAFEWRDPEMGISGQLTWTRLPQGFKNSPTLFNEALHRDLAGFRIQHPDLILLQYVDDLLLAATSELDCQQGTRALLQTLGDLGYRASAKKAQICQKQVKYLGYLLKEGQRWLTEARKETVMGQPIPKTPRQLREFLGTAGFCRLWIPGFAEMAAPLYPLTKPGTLFNWGPDQQKAFQEIKQALLTAPALGLPDLTKPFELFVDEKQGYAKGVLTQKLGPWRRPVAYLSKKLDPVAAGWPPCLRMVAAIAVLTKDAGKLTMGQPLVILAPHAVEALVKQPPDRWLSNARMTHYQALLLDTDRVQFGPVVALNPATLLPLPEEGLQHDCLDILAEAHGTRSDLMDQPLPDADHTWYTDGSSFLQEGQRKAGAAVTTETEVIWARALPAGTSAQRAELIALTQALKMAEGKKLNVYTDSRYAFATAHIHGEIYRRRGWLTSEGKEIKNKDEILALLKALFLPKRLSIIHCPGHQKGNSAEARGNRMADQAAREVATRETPETSTLLAGKRTADGSEFEKRTADGSEFESPKKKAKVE

SEQ ID NO: 2257 - protein, 2096 aa, synthetic construct
MPAAKRVKLDGGDKKYSIGLDIGTNSVGWAVITDEYKVPSKKFKVLGNTDRHSIKKNLIGALLFDSGETAEATRLKRTARRRYTRRKNRICYLQEIFSNEMAKVDDSFFHRLEESFLVEEDKKHERHPIFGNIVDEVAYHEKYPTIYHLRKKLVDSTDKADLRLIYLALAHMIKFRGHFLIEGDLNPDNSDVDKLFIQLVQTYNQLFEENPINASGVDAKAILSARLSKSRRLENLIAQLPGEKKNGLFGNLIALSLGLTPNFKSNFDLAEDAKLQLSKDTYDDDLDNLLAQIGDQYADLFLAAKNLSDAILLSDILRVNTEITKAPLSASMIKRYDEHHQDLTLLKALVRQQLPEKYKEIFFDQSKNGYAGYIDGGASQEEFYKFIKPILEKMDGTEELLVKLNREDLLRKQRTFDNGSIPHQIHLGELHAILRRQEDFYPFLKDNREKIEKILTFRIPYYVGPLARGNSRFAWMTRKSEETITPWNFEEVVDKGASAQSFIERMTNFDKNLPNEKVLPKHSLLYEYFTVYNELTKVKYVTEGMRKPAFLSGEQKKAIVDLLFKTNRKVTVKQLKEDYFKKIECFDSVEISGVEDRFNASLGTYHDLLKIIKDKDFLDNEENEDILEDIVLTLTLFEDREMIEERLKTYAHLFDDKVMKQLKRRRYTGWGRLSRKLINGIRDKQSGKTILDFLKSDGFANRNFMQLIHDDSLTFKEDIQKAQVSGQGDSLHEHIANLAGSPAIKKGILQTVKVVDELVKVMGRHKPENIVIEMARENQTTQKGQKNSRERMKRIEEGIKELGSQILKEHPVENTQLQNEKLYLYYLQNGRDMYVDQELDINRLSDYDVDHIVPQSFLKDDSIDNKVLTRSDKARGKSDNVPSEEVVKKMKNYWRQLLNAKLITQRKFDNLTKAERGGLSELDKAGFIKRQLVETRQITKHVAQILDSRMNTKYDENDKLIREVKVITLKSKLVSDFRKDFQFYKVREINNYHHAHDAYLNAVVGTALIKKYPKLESEFVYGDYKVYDVRKMIAKSEQEIGKATAKYFFYSNIMNFFKTEITLANGEIRKRPLIETNGETGEIVWDKGRDFATVRKVLSMPQVNIVKKTEVQTGGFSKESILPKRNSDKLIARKKDWDPKKYGGFDSPTVAYSVLVVAKVEKGKSKKLKSVKELLGITIMERSSFEKNPIDFLEAKGYKEVKKDLIIKLPKYSLFELENGRKRMLASAGELQKGNELALPSKYVNFLYLASHYEKLKGSPEDNEQKQLFVEQHKHYLDEIIEQISEFSKRVILADANLDKVLSAYNKHRDKPIREQAENIIHLFTLTNLGAPAAFKYFDTTIDRKRYTSTKEVLDATLIHQSITGLYETRIDLSQLGGDGGEAAAKGGSPAPGGTLNIEDEYRLHETSKEPDVSLGSTWLSDFPQAWAETGGMGLAVRQAPLIIPLKATSTPVSIKQYPMSQEARLGIKPHIQRLLDQGILVPCQSPWNTPLLPVKKPGTNDYRPVQDLREVNKRVEDIHPTVPNPYNLLSGLPPSHQWYTVLDLKDAFFCLRLHPTSQPLFAFEWRDPEMGISGQLTWTRLPQGFKNSPTLFNEALHRDLAGFRIQHPDLILLQYVDDLLLAATSELDCQQGTRALLQTLGDLGYRASAKKAQICQKQVKYLGYLLKEGQRWLTEARKETVMGQPIPKTPRQLREFLGTAGFCRLWIPGFAEMAAPLYPLTKPGTLFNWGPDQQKAFQEIKQALLTAPALGLPDLTKPFELFVDEKQGYAKGVLTQKLGPWRRPVAYLSKKLDPVAAGWPPCLRMVAAIAVLTKDAGKLTMGQPLVILAPHAVEALVKQPPDRWLSNARMTHYQALLLDTDRVQFGPVVALNPATLLPLPEEGLQHDCLDILAEAHGTRSDLMDQPLPDADHTWYTDGSSFLQEGQRKAGAAVTTETEVIWARALPAGTSAQRAELIALTQALKMAEGKKLNVYTDSRYAFATAHIHGEIYRRRGWLTSEGKEIKNKDEILALLKALFLPKRLSIIHCPGHQKGNSAEARGNRMADQAAREVATRETPETSTLLAGKRTADGSEFEKRTADGSEFESPKKKAKVE

SEQ ID NO: 2258 - protein, 2088 aa, synthetic construct
MPAAKRVKLDGGDKKYSIGLDIGTNSVGWAVITDEYKVPSKKFKVLGNTDRHSIKKNLIGALLFDSGETAEATRLKRTARRRYTRRKNRICYLQEIFSNEMAKVDDSFFHRLEESFLVEEDKKHERHPIFGNIVDEVAYHEKYPTIYHLRKKLVDSTDKADLRLIYLALAHMIKFRGHFLIEGDLNPDNSDVDKLFIQLVQTYNQLFEENPINASGVDAKAILSARLSKSRRLENLIAQLPGEKKNGLFGNLIALSLGLTPNFKSNFDLAEDAKLQLSKDTYDDDLDNLLAQIGDQYADLFLAAKNLSDAILLSDILRVNTEITKAPLSASMIKRYDEHHQDLTLLKALVRQQLPEKYKEIFFDQSKNGYAGYIDGGASQEEFYKFIKPILEKMDGTEELLVKLNREDLLRKQRTFDNGSIPHQIHLGELHAILRRQEDFYPFLKDNREKIEKILTFRIPYYVGPLARGNSRFAWMTRKSEETITPWNFEEVVDKGASAQSFIERMTNFDKNLPNEKVLPKHSLLYEYFTVYNELTKVKYVTEGMRKPAFLSGEQKKAIVDLLFKTNRKVTVKQLKEDYFKKIECFDSVEISGVEDRFNASLGTYHDLLKIIKDKDFLDNEENEDILEDIVLTLTLFEDREMIEERLKTYAHLFDDKVMKQLKRRRYTGWGRLSRKLINGIRDKQSGKTILDFLKSDGFANRNFMQLIHDDSLTFKEDIQKAQVSGQGDSLHEHIANLAGSPAIKKGILQTVKVVDELVKVMGRHKPENIVIEMARENQTTQKGQKNSRERMKRIEEGIKELGSQILKEHPVENTQLQNEKLYLYYLQNGRDMYVDQELDINRLSDYDVDHIVPQSFLKDDSIDNKVLTRSDKARGKSDNVPSEEVVKKMKNYWRQLLNAKLITQRKFDNLTKAERGGLSELDKAGFIKRQLVETRQITKHVAQILDSRMNTKYDENDKLIREVKVITLKSKLVSDFRKDFQFYKVREINNYHHAHDAYLNAVVGTALIKKYPKLESEFVYGDYKVYDVRKMIAKSEQEIGKATAKYFFYSNIMNFFKTEITLANGEIRKRPLIETNGETGEIVWDKGRDFATVRKVLSMPQVNIVKKTEVQTGGFSKESILPKRNSDKLIARKKDWDPKKYGGFDSPTVAYSVLVVAKVEKGKSKKLKSVKELLGITIMERSSFEKNPIDFLEAKGYKEVKKDLIIKLPKYSLFELENGRKRMLASAGELQKGNELALPSKYVNFLYLASHYEKLKGSPEDNEQKQLFVEQHKHYLDEIIEQISEFSKRVILADANLDKVLSAYNKHRDKPIREQAENIIHLFTLTNLGAPAAFKYFDTTIDRKRYTSTKEVLDATLIHQSITGLYETRIDLSQLGGDGGPAPGGTLNIEDEYRLHETSKEPDVSLGSTWLSDFPQAWAETGGMGLAVRQAPLIIPLKATSTPVSIKQYPMSQEARLGIKPHIQRLLDQGILVPCQSPWNTPLLPVKKPGTNDYRPVQDLREVNKRVEDIHPTVPNPYNLLSGLPPSHQWYTVLDLKDAFFCLRLHPTSQPLFAFEWRDPEMGISGQLTWTRLPQGFKNSPTLFNEALHRDLAGFRIQHPDLILLQYVDDLLLAATSELDCQQGTRALLQTLGDLGYRASAKKAQICQKQVKYLGYLLKEGQRWLTEARKETVMGQPIPKTPRQLREFLGTAGFCRLWIPGFAEMAAPLYPLTKPGTLFNWGPDQQKAFQEIKQALLTAPALGLPDLTKPFELFVDEKQGYAKGVLTQKLGPWRRPVAYLSKKLDPVAAGWPPCLRMVAAIAVLTKDAGKLTMGQPLVILAPHAVEALVKQPPDRWLSNARMTHYQALLLDTDRVQFGPVVALNPATLLPLPEEGLQHDCLDILAEAHGTRSDLMDQPLPDADHTWYTDGSSFLQEGQRKAGAAVTTETEVIWARALPAGTSAQRAELIALTQALKMAEGKKLNVYTDSRYAFATAHIHGEIYRRRGWLTSEGKEIKNKDEILALLKALFLPKRLSIIHCPGHQKGNSAEARGNRMADQAAREVATRETPETSTLLAGKRTADGSEFEKRTADGSEFESPKKKAKVE

SEQ ID NO: 2259 - protein, 2094 aa, synthetic construct
MPAAKRVKLDGGDKKYSIGLDIGTNSVGWAVITDEYKVPSKKFKVLGNTDRHSIKKNLIGALLFDSGETAEATRLKRTARRRYTRRKNRICYLQEIFSNEMAKVDDSFFHRLEESFLVEEDKKHERHPIFGNIVDEVAYHEKYPTIYHLRKKLVDSTDKADLRLIYLALAHMIKFRGHFLIEGDLNPDNSDVDKLFIQLVQTYNQLFEENPINASGVDAKAILSARLSKSRRLENLIAQLPGEKKNGLFGNLIALSLGLTPNFKSNFDLAEDAKLQLSKDTYDDDLDNLLAQIGDQYADLFLAAKNLSDAILLSDILRVNTEITKAPLSASMIKRYDEHHQDLTLLKALVRQQLPEKYKEIFFDQSKNGYAGYIDGGASQEEFYKFIKPILEKMDGTEELLVKLNREDLLRKQRTFDNGSIPHQIHLGELHAILRRQEDFYPFLKDNREKIEKILTFRIPYYVGPLARGNSRFAWMTRKSEETITPWNFEEVVDKGASAQSFIERMTNFDKNLPNEKVLPKHSLLYEYFTVYNELTKVKYVTEGMRKPAFLSGEQKKAIVDLLFKTNRKVTVKQLKEDYFKKIECFDSVEISGVEDRFNASLGTYHDLLKIIKDKDFLDNEENEDILEDIVLTLTLFEDREMIEERLKTYAHLFDDKVMKQLKRRRYTGWGRLSRKLINGIRDKQSGKTILDFLKSDGFANRNFMQLIHDDSLTFKEDIQKAQVSGQGDSLHEHIANLAGSPAIKKGILQTVKVVDELVKVMGRHKPENIVIEMARENQTTQKGQKNSRERMKRIEEGIKELGSQILKEHPVENTQLQNEKLYLYYLQNGRDMYVDQELDINRLSDYDVDHIVPQSFLKDDSIDNKVLTRSDKARGKSDNVPSEEVVKKMKNYWRQLLNAKLITQRKFDNLTKAERGGLSELDKAGFIKRQLVETRQITKHVAQILDSRMNTKYDENDKLIREVKVITLKSKLVSDFRKDFQFYKVREINNYHHAHDAYLNAVVGTALIKKYPKLESEFVYGDYKVYDVRKMIAKSEQEIGKATAKYFFYSNIMNFFKTEITLANGEIRKRPLIETNGETGEIVWDKGRDFATVRKVLSMPQVNIVKKTEVQTGGFSKESILPKRNSDKLIARKKDWDPKKYGGFDSPTVAYSVLVVAKVEKGKSKKLKSVKELLGITIMERSSFEKNPIDFLEAKGYKEVKKDLIIKLPKYSLFELENGRKRMLASAGELQKGNELALPSKYVNFLYLASHYEKLKGSPEDNEQKQLFVEQHKHYLDEIIEQISEFSKRVILADANLDKVLSAYNKHRDKPIREQAENIIHLFTLTNLGAPAAFKYFDTTIDRKRYTSTKEVLDATLIHQSITGLYETRIDLSQLGGDGGGGSGGGPAPGGTLNIEDEYRLHETSKEPDVSLGSTWLSDFPQAWAETGGMGLAVRQAPLIIPLKATSTPVSIKQYPMSQEARLGIKPHIQRLLDQGILVPCQSPWNTPLLPVKKPGTNDYRPVQDLREVNKRVEDIHPTVPNPYNLLSGLPPSHQWYTVLDLKDAFFCLRLHPTSQPLFAFEWRDPEMGISGQLTWTRLPQGFKNSPTLFNEALHRDLAGFRIQHPDLILLQYVDDLLLAATSELDCQQGTRALLQTLGDLGYRASAKKAQICQKQVKYLGYLLKEGQRWLTEARKETVMGQPIPKTPRQLREFLGTAGFCRLWIPGFAEMAAPLYPLTKPGTLFNWGPDQQKAFQEIKQALLTAPALGLPDLTKPFELFVDEKQGYAKGVLTQKLGPWRRPVAYLSKKLDPVAAGWPPCLRMVAAIAVLTKDAGKLTMGQPLVILAPHAVEALVKQPPDRWLSNARMTHYQALLLDTDRVQFGPVVALNPATLLPLPEEGLQHDCLDILAEAHGTRSDLMDQPLPDADHTWYTDGSSFLQEGQRKAGAAVTTETEVIWARALPAGTSAQRAELIALTQALKMAEGKKLNVYTDSRYAFATAHIHGEIYRRRGWLTSEGKEIKNKDEILALLKALFLPKRLSIIHCPGHQKGNSAEARGNRMADQAAREVATRETPETSTLLAGKRTADGSEFEKRTADGSEFESPKKKAKVE

SEQ ID NO: 2260 - protein, 2094 aa, synthetic construct
MPAAKRVKLDGGDKKYSIGLDIGTNSVGWAVITDEYKVPSKKFKVLGNTDRHSIKKNLIGALLFDSGETAEATRLKRTARRRYTRRKNRICYLQEIFSNEMAKVDDSFFHRLEESFLVEEDKKHERHPIFGNIVDEVAYHEKYPTIYHLRKKLVDSTDKADLRLIYLALAHMIKFRGHFLIEGDLNPDNSDVDKLFIQLVQTYNQLFEENPINASGVDAKAILSARLSKSRRLENLIAQLPGEKKNGLFGNLIALSLGLTPNFKSNFDLAEDAKLQLSKDTYDDDLDNLLAQIGDQYADLFLAAKNLSDAILLSDILRVNTEITKAPLSASMIKRYDEHHQDLTLLKALVRQQLPEKYKEIFFDQSKNGYAGYIDGGASQEEFYKFIKPILEKMDGTEELLVKLNREDLLRKQRTFDNGSIPHQIHLGELHAILRRQEDFYPFLKDNREKIEKILTFRIPYYVGPLARGNSRFAWMTRKSEETITPWNFEEVVDKGASAQSFIERMTNFDKNLPNEKVLPKHSLLYEYFTVYNELTKVKYVTEGMRKPAFLSGEQKKAIVDLLFKTNRKVTVKQLKEDYFKKIECFDSVEISGVEDRFNASLGTYHDLLKIIKDKDFLDNEENEDILEDIVLTLTLFEDREMIEERLKTYAHLFDDKVMKQLKRRRYTGWGRLSRKLINGIRDKQSGKTILDFLKSDGFANRNFMQLIHDDSLTFKEDIQKAQVSGQGDSLHEHIANLAGSPAIKKGILQTVKVVDELVKVMGRHKPENIVIEMARENQTTQKGQKNSRERMKRIEEGIKELGSQILKEHPVENTQLQNEKLYLYYLQNGRDMYVDQELDINRLSDYDVDHIVPQSFLKDDSIDNKVLTRSDKARGKSDNVPSEEVVKKMKNYWRQLLNAKLITQRKFDNLTKAERGGLSELDKAGFIKRQLVETRQITKHVAQILDSRMNTKYDENDKLIREVKVITLKSKLVSDFRKDFQFYKVREINNYHHAHDAYLNAVVGTALIKKYPKLESEFVYGDYKVYDVRKMIAKSEQEIGKATAKYFFYSNIMNFFKTEITLANGEIRKRPLIETNGETGEIVWDKGRDFATVRKVLSMPQVNIVKKTEVQTGGFSKESILPKRNSDKLIARKKDWDPKKYGGFDSPTVAYSVLVVAKVEKGKSKKLKSVKELLGITIMERSSFEKNPIDFLEAKGYKEVKKDLIIKLPKYSLFELENGRKRMLASAGELQKGNELALPSKYVNFLYLASHYEKLKGSPEDNEQKQLFVEQHKHYLDEIIEQISEFSKRVILADANLDKVLSAYNKHRDKPIREQAENIIHLFTLTNLGAPAAFKYFDTTIDRKRYTSTKEVLDATLIHQSITGLYETRIDLSQLGGDGGGGSPAPGSSGGTLNIEDEYRLHETSKEPDVSLGSTWLSDFPQAWAETGGMGLAVRQAPLIIPLKATSTPVSIKQYPMSQEARLGIKPHIQRLLDQGILVPCQSPWNTPLLPVKKPGTNDYRPVQDLREVNKRVEDIHPTVPNPYNLLSGLPPSHQWYTVLDLKDAFFCLRLHPTSQPLFAFEWRDPEMGISGQLTWTRLPQGFKNSPTLFNEALHRDLAGFRIQHPDLILLQYVDDLLLAATSELDCQQGTRALLQTLGDLGYRASAKKAQICQKQVKYLGYLLKEGQRWLTEARKETVMGQPIPKTPRQLREFLGTAGFCRLWIPGFAEMAAPLYPLTKPGTLFNWGPDQQKAFQEIKQALLTAPALGLPDLTKPFELFVDEKQGYAKGVLTQKLGPWRRPVAYLSKKLDPVAAGWPPCLRMVAAIAVLTKDAGKLTMGQPLVILAPHAVEALVKQPPDRWLSNARMTHYQALLLDTDRVQFGPVVALNPATLLPLPEEGLQHDCLDILAEAHGTRSDLMDQPLPDADHTWYTDGSSFLQEGQRKAGAAVTTETEVIWARALPAGTSAQRAELIALTQALKMAEGKKLNVYTDSRYAFATAHIHGEIYRRRGWLTSEGKEIKNKDEILALLKALFLPKRLSIIHCPGHQKGNSAEARGNRMADQAAREVATRETPETSTLLAGKRTADGSEFEKRTADGSEFESPKKKAKVE

SEQ ID NO: 2261 - protein, 2096 aa, synthetic construct
MPAAKRVKLDGGDKKYSIGLDIGTNSVGWAVITDEYKVPSKKFKVLGNTDRHSIKKNLIGALLFDSGETAEATRLKRTARRRYTRRKNRICYLQEIFSNEMAKVDDSFFHRLEESFLVEEDKKHERHPIFGNIVDEVAYHEKYPTIYHLRKKLVDSTDKADLRLIYLALAHMIKFRGHFLIEGDLNPDNSDVDKLFIQLVQTYNQLFEENPINASGVDAKAILSARLSKSRRLENLIAQLPGEKKNGLFGNLIALSLGLTPNFKSNFDLAEDAKLQLSKDTYDDDLDNLLAQIGDQYADLFLAAKNLSDAILLSDILRVNTEITKAPLSASMIKRYDEHHQDLTLLKALVRQQLPEKYKEIFFDQSKNGYAGYIDGGASQEEFYKFIKPILEKMDGTEELLVKLNREDLLRKQRTFDNGSIPHQIHLGELHAILRRQEDFYPFLKDNREKIEKILTFRIPYYVGPLARGNSRFAWMTRKSEETITPWNFEEVVDKGASAQSFIERMTNFDKNLPNEKVLPKHSLLYEYFTVYNELTKVKYVTEGMRKPAFLSGEQKKAIVDLLFKTNRKVTVKQLKEDYFKKIECFDSVEISGVEDRFNASLGTYHDLLKIIKDKDFLDNEENEDILEDIVLTLTLFEDREMIEERLKTYAHLFDDKVMKQLKRRRYTGWGRLSRKLINGIRDKQSGKTILDFLKSDGFANRNFMQLIHDDSLTFKEDIQKAQVSGQGDSLHEHIANLAGSPAIKKGILQTVKVVDELVKVMGRHKPENIVIEMARENQTTQKGQKNSRERMKRIEEGIKELGSQILKEHPVENTQLQNEKLYLYYLQNGRDMYVDQELDINRLSDYDVDHIVPQSFLKDDSIDNKVLTRSDKARGKSDNVPSEEVVKKMKNYWRQLLNAKLITQRKFDNLTKAERGGLSELDKAGFIKRQLVETRQITKHVAQILDSRMNTKYDENDKLIREVKVITLKSKLVSDFRKDFQFYKVREINNYHHAHDAYLNAVVGTALIKKYPKLESEFVYGDYKVYDVRKMIAKSEQEIGKATAKYFFYSNIMNFFKTEITLANGEIRKRPLIETNGETGEIVWDKGRDFATVRKVLSMPQVNIVKKTEVQTGGFSKESILPKRNSDKLIARKKDWDPKKYGGFDSPTVAYSVLVVAKVEKGKSKKLKSVKELLGITIMERSSFEKNPIDFLEAKGYKEVKKDLIIKLPKYSLFELENGRKRMLASAGELQKGNELALPSKYVNFLYLASHYEKLKGSPEDNEQKQLFVEQHKHYLDEIIEQISEFSKRVILADANLDKVLSAYNKHRDKPIREQAENIIHLFTLTNLGAPAAFKYFDTTIDRKRYTSTKEVLDATLIHQSITGLYETRIDLSQLGGDGGEAAAKGGGGSSGGTLNIEDEYRLHETSKEPDVSLGSTWLSDFPQAWAETGGMGLAVRQAPLIIPLKATSTPVSIKQYPMSQEARLGIKPHIQRLLDQGILVPCQSPWNTPLLPVKKPGTNDYRPVQDLREVNKRVEDIHPTVPNPYNLLSGLPPSHQWYTVLDLKDAFFCLRLHPTSQPLFAFEWRDPEMGISGQLTWTRLPQGFKNSPTLFNEALHRDLAGFRIQHPDLILLQYVDDLLLAATSELDCQQGTRALLQTLGDLGYRASAKKAQICQKQVKYLGYLLKEGQRWLTEARKETVMGQPIPKTPRQLREFLGTAGFCRLWIPGFAEMAAPLYPLTKPGTLFNWGPDQQKAFQEIKQALLTAPALGLPDLTKPFELFVDEKQGYAKGVLTQKLGPWRRPVAYLSKKLDPVAAGWPPCLRMVAAIAVLTKDAGKLTMGQPLVILAPHAVEALVKQPPDRWLSNARMTHYQALLLDTDRVQFGPVVALNPATLLPLPEEGLQHDCLDILAEAHGTRSDLMDQPLPDADHTWYTDGSSFLQEGQRKAGAAVTTETEVIWARALPAGTSAQRAELIALTQALKMAEGKKLNVYTDSRYAFATAHIHGEIYRRRGWLTSEGKEIKNKDEILALLKALFLPKRLSIIHCPGHQKGNSAEARGNRMADQAAREVATRETPETSTLLAGKRTADGSEFEKRTADGSEFESPKKKAKVE

SEQ ID NO: 2262 - protein, 2094 aa, synthetic construct
MPAAKRVKLDGGDKKYSIGLDIGTNSVGWAVITDEYKVPSKKFKVLGNTDRHSIKKNLIGALLFDSGETAEATRLKRTARRRYTRRKNRICYLQEIFSNEMAKVDDSFFHRLEESFLVEEDKKHERHPIFGNIVDEVAYHEKYPTIYHLRKKLVDSTDKADLRLIYLALAHMIKFRGHFLIEGDLNPDNSDVDKLFIQLVQTYNQLFEENPINASGVDAKAILSARLSKSRRLENLIAQLPGEKKNGLFGNLIALSLGLTPNFKSNFDLAEDAKLQLSKDTYDDDLDNLLAQIGDQYADLFLAAKNLSDAILLSDILRVNTEITKAPLSASMIKRYDEHHQDLTLLKALVRQQLPEKYKEIFFDQSKNGYAGYIDGGASQEEFYKFIKPILEKMDGTEELLVKLNREDLLRKQRTFDNGSIPHQIHLGELHAILRRQEDFYPFLKDNREKIEKILTFRIPYYVGPLARGNSRFAWMTRKSEETITPWNFEEVVDKGASAQSFIERMTNFDKNLPNEKVLPKHSLLYEYFTVYNELTKVKYVTEGMRKPAFLSGEQKKAIVDLLFKTNRKVTVKQLKEDYFKKIECFDSVEISGVEDRFNASLGTYHDLLKIIKDKDFLDNEENEDILEDIVLTLTLFEDREMIEERLKTYAHLFDDKVMKQLKRRRYTGWGRLSRKLINGIRDKQSGKTILDFLKSDGFANRNFMQLIHDDSLTFKEDIQKAQVSGQGDSLHEHIANLAGSPAIKKGILQTVKVVDELVKVMGRHKPENIVIEMARENQTTQKGQKNSRERMKRIEEGIKELGSQILKEHPVENTQLQNEKLYLYYLQNGRDMYVDQELDINRLSDYDVDHIVPQSFLKDDSIDNKVLTRSDKARGKSDNVPSEEVVKKMKNYWRQLLNAKLITQRKFDNLTKAERGGLSELDKAGFIKRQLVETRQITKHVAQILDSRMNTKYDENDKLIREVKVITLKSKLVSDFRKDFQFYKVREINNYHHAHDAYLNAVVGTALIKKYPKLESEFVYGDYKVYDVRKMIAKSEQEIGKATAKYFFYSNIMNFFKTEITLANGEIRKRPLIETNGETGEIVWDKGRDFATVRKVLSMPQVNIVKKTEVQTGGFSKESILPKRNSDKLIARKKDWDPKKYGGFDSPTVAYSVLVVAKVEKGKSKKLKSVKELLGITIMERSSFEKNPIDFLEAKGYKEVKKDLIIKLPKYSLFELENGRKRMLASAGELQKGNELALPSKYVNFLYLASHYEKLKGSPEDNEQKQLFVEQHKHYLDEIIEQISEFSKRVILADANLDKVLSAYNKHRDKPIREQAENIIHLFTLTNLGAPAAFKYFDTTIDRKRYTSTKEVLDATLIHQSITGLYETRIDLSQLGGDGGPAPGSSGGGGGTLNIEDEYRLHETSKEPDVSLGSTWLSDFPQAWAETGGMGLAVRQAPLIIPLKATSTPVSIKQYPMSQEARLGIKPHIQRLLDQGILVPCQSPWNTPLLPVKKPGTNDYRPVQDLREVNKRVEDIHPTVPNPYNLLSGLPPSHQWYTVLDLKDAFFCLRLHPTSQPLFAFEWRDPEMGISGQLTWTRLPQGFKNSPTLFNEALHRDLAGFRIQHPDLILLQYVDDLLLAATSELDCQQGTRALLQTLGDLGYRASAKKAQICQKQVKYLGYLLKEGQRWLTEARKETVMGQPIPKTPRQLREFLGTAGFCRLWIPGFAEMAAPLYPLTKPGTLFNWGPDQQKAFQEIKQALLTAPALGLPDLTKPFELFVDEKQGYAKGVLTQKLGPWRRPVAYLSKKLDPVAAGWPPCLRMVAAIAVLTKDAGKLTMGQPLVILAPHAVEALVKQPPDRWLSNARMTHYQALLLDTDRVQFGPVVALNPATLLPLPEEGLQHDCLDILAEAHGTRSDLMDQPLPDADHTWYTDGSSFLQEGQRKAGAAVTTETEVIWARALPAGTSAQRAELIALTQALKMAEGKKLNVYTDSRYAFATAHIHGEIYRRRGWLTSEGKEIKNKDEILALLKALFLPKRLSIIHCPGHQKGNSAEARGNRMADQAAREVATRETPETSTLLAGKRTADGSEFEKRTADGSEFESPKKKAKVE

SEQ ID NO: 2263 - protein, 2096 aa, synthetic construct
MPAAKRVKLDGGDKKYSIGLDIGTNSVGWAVITDEYKVPSKKFKVLGNTDRHSIKKNLIGALLFDSGETAEATRLKRTARRRYTRRKNRICYLQEIFSNEMAKVDDSFFHRLEESFLVEEDKKHERHPIFGNIVDEVAYHEKYPTIYHLRKKLVDSTDKADLRLIYLALAHMIKFRGHFLIEGDLNPDNSDVDKLFIQLVQTYNQLFEENPINASGVDAKAILSARLSKSRRLENLIAQLPGEKKNGLFGNLIALSLGLTPNFKSNFDLAEDAKLQLSKDTYDDDLDNLLAQIGDQYADLFLAAKNLSDAILLSDILRVNTEITKAPLSASMIKRYDEHHQDLTLLKALVRQQLPEKYKEIFFDQSKNGYAGYIDGGASQEEFYKFIKPILEKMDGTEELLVKLNREDLLRKQRTFDNGSIPHQIHLGELHAILRRQEDFYPFLKDNREKIEKILTFRIPYYVGPLARGNSRFAWMTRKSEETITPWNFEEVVDKGASAQSFIERMTNFDKNLPNEKVLPKHSLLYEYFTVYNELTKVKYVTEGMRKPAFLSGEQKKAIVDLLFKTNRKVTVKQLKEDYFKKIECFDSVEISGVEDRFNASLGTYHDLLKIIKDKDFLDNEENEDILEDIVLTLTLFEDREMIEERLKTYAHLFDDKVMKQLKRRRYTGWGRLSRKLINGIRDKQSGKTILDFLKSDGFANRNFMQLIHDDSLTFKEDIQKAQVSGQGDSLHEHIANLAGSPAIKKGILQTVKVVDELVKVMGRHKPENIVIEMARENQTTQKGQKNSRERMKRIEEGIKELGSQILKEHPVENTQLQNEKLYLYYLQNGRDMYVDQELDINRLSDYDVDHIVPQSFLKDDSIDNKVLTRSDKARGKSDNVPSEEVVKKMKNYWRQLLNAKLITQRKFDNLTKAERGGLSELDKAGFIKRQLVETRQITKHVAQILDSRMNTKYDENDKLIREVKVITLKSKLVSDFRKDFQFYKVREINNYHHAHDAYLNAVVGTALIKKYPKLESEFVYGDYKVYDVRKMIAKSEQEIGKATAKYFFYSNIMNFFKTEITLANGEIRKRPLIETNGETGEIVWDKGRDFATVRKVLSMPQVNIVKKTEVQTGGFSKESILPKRNSDKLIARKKDWDPKKYGGFDSPTVAYSVLVVAKVEKGKSKKLKSVKELLGITIMERSSFEKNPIDFLEAKGYKEVKKDLIIKLPKYSLFELENGRKRMLASAGELQKGNELALPSKYVNFLYLASHYEKLKGSPEDNEQKQLFVEQHKHYLDEIIEQISEFSKRVILADANLDKVLSAYNKHRDKPIREQAENIIHLFTLTNLGAPAAFKYFDTTIDRKRYTSTKEVLDATLIHQSITGLYETRIDLSQLGGDGGGGSGSSEAAAKGGTLNIEDEYRLHETSKEPDVSLGSTWLSDFPQAWAETGGMGLAVRQAPLIIPLKATSTPVSIKQYPMSQEARLGIKPHIQRLLDQGILVPCQSPWNTPLLPVKKPGTNDYRPVQDLREVNKRVEDIHPTVPNPYNLLSGLPPSHQWYTVLDLKDAFFCLRLHPTSQPLFAFEWRDPEMGISGQLTWTRLPQGFKNSPTLFNEALHRDLAGFRIQHPDLILLQYVDDLLLAATSELDCQQGTRALLQTLGDLGYRASAKKAQICQKQVKYLGYLLKEGQRWLTEARKETVMGQPIPKTPRQLREFLGTAGFCRLWIPGFAEMAAPLYPLTKPGTLFNWGPDQQKAFQEIKQALLTAPALGLPDLTKPFELFVDEKQGYAKGVLTQKLGPWRRPVAYLSKKLDPVAAGWPPCLRMVAAIAVLTKDAGKLTMGQPLVILAPHAVEALVKQPPDRWLSNARMTHYQALLLDTDRVQFGPVVALNPATLLPLPEEGLQHDCLDILAEAHGTRSDLMDQPLPDADHTWYTDGSSFLQEGQRKAGAAVTTETEVIWARALPAGTSAQRAELIALTQALKMAEGKKLNVYTDSRYAFATAHIHGEIYRRRGWLTSEGKEIKNKDEILALLKALFLPKRLSIIHCPGHQKGNSAEARGNRMADQAAREVATRETPETSTLLAGKRTADGSEFEKRTADGSEFESPKKKAKVE

SEQ ID NO: 2264 - protein, 2091 aa, synthetic construct
MPAAKRVKLDGGDKKYSIGLDIGTNSVGWAVITDEYKVPSKKFKVLGNTDRHSIKKNLIGALLFDSGETAEATRLKRTARRRYTRRKNRICYLQEIFSNEMAKVDDSFFHRLEESFLVEEDKKHERHPIFGNIVDEVAYHEKYPTIYHLRKKLVDSTDKADLRLIYLALAHMIKFRGHFLIEGDLNPDNSDVDKLFIQLVQTYNQLFEENPINASGVDAKAILSARLSKSRRLENLIAQLPGEKKNGLFGNLIALSLGLTPNFKSNFDLAEDAKLQLSKDTYDDDLDNLLAQIGDQYADLFLAAKNLSDAILLSDILRVNTEITKAPLSASMIKRYDEHHQDLTLLKALVRQQLPEKYKEIFFDQSKNGYAGYIDGGASQEEFYKFIKPILEKMDGTEELLVKLNREDLLRKQRTFDNGSIPHQIHLGELHAILRRQEDFYPFLKDNREKIEKILTFRIPYYVGPLARGNSRFAWMTRKSEETITPWNFEEVVDKGASAQSFIERMTNFDKNLPNEKVLPKHSLLYEYFTVYNELTKVKYVTEGMRKPAFLSGEQKKAIVDLLFKTNRKVTVKQLKEDYFKKIECFDSVEISGVEDRFNASLGTYHDLLKIIKDKDFLDNEENEDILEDIVLTLTLFEDREMIEERLKTYAHLFDDKVMKQLKRRRYTGWGRLSRKLINGIRDKQSGKTILDFLKSDGFANRNFMQLIHDDSLTFKEDIQKAQVSGQGDSLHEHIANLAGSPAIKKGILQTVKVVDELVKVMGRHKPENIVIEMARENQTTQKGQKNSRERMKRIEEGIKELGSQILKEHPVENTQLQNEKLYLYYLQNGRDMYVDQELDINRLSDYDVDHIVPQSFLKDDSIDNKVLTRSDKARGKSDNVPSEEVVKKMKNYWRQLLNAKLITQRKFDNLTKAERGGLSELDKAGFIKRQLVETRQITKHVAQILDSRMNTKYDENDKLIREVKVITLKSKLVSDFRKDFQFYKVREINNYHHAHDAYLNAVVGTALIKKYPKLESEFVYGDYKVYDVRKMIAKSEQEIGKATAKYFFYSNIMNFFKTEITLANGEIRKRPLIETNGETGEIVWDKGRDFATVRKVLSMPQVNIVKKTEVQTGGFSKESILPKRNSDKLIARKKDWDPKKYGGFDSPTVAYSVLVVAKVEKGKSKKLKSVKELLGITIMERSSFEKNPIDFLEAKGYKEVKKDLIIKLPKYSLFELENGRKRMLASAGELQKGNELALPSKYVNFLYLASHYEKLKGSPEDNEQKQLFVEQHKHYLDEIIEQISEFSKRVILADANLDKVLSAYNKHRDKPIREQAENIIHLFTLTNLGAPAAFKYFDTTIDRKRYTSTKEVLDATLIHQSITGLYETRIDLSQLGGDGGGSSGGGGGTLNIEDEYRLHETSKEPDVSLGSTWLSDFPQAWAETGGMGLAVRQAPLIIPLKATSTPVSIKQYPMSQEARLGIKPHIQRLLDQGILVPCQSPWNTPLLPVKKPGTNDYRPVQDLREVNKRVEDIHPTVPNPYNLLSGLPPSHQWYTVLDLKDAFFCLRLHPTSQPLFAFEWRDPEMGISGQLTWTRLPQGFKNSPTLFNEALHRDLAGFRIQHPDLILLQYVDDLLLAATSELDCQQGTRALLQTLGDLGYRASAKKAQICQKQVKYLGYLLKEGQRWLTEARKETVMGQPIPKTPRQLREFLGTAGFCRLWIPGFAEMAAPLYPLTKPGTLFNWGPDQQKAFQEIKQALLTAPALGLPDLTKPFELFVDEKQGYAKGVLTQKLGPWRRPVAYLSKKLDPVAAGWPPCLRMVAAIAVLTKDAGKLTMGQPLVILAPHAVEALVKQPPDRWLSNARMTHYQALLLDTDRVQFGPVVALNPATLLPLPEEGLQHDCLDILAEAHGTRSDLMDQPLPDADHTWYTDGSSFLQEGQRKAGAAVTTETEVIWARALPAGTSAQRAELIALTQALKMAEGKKLNVYTDSRYAFATAHIHGEIYRRRGWLTSEGKEIKNKDEILALLKALFLPKRLSIIHCPGHQKGNSAEARGNRMADQAAREVATRETPETSTLLAGKRTADGSEFEKRTADGSEFESPKKKAKVE

SEQ ID NO: 2265 - protein, 2094 aa, synthetic construct
MPAAKRVKLDGGDKKYSIGLDIGTNSVGWAVITDEYKVPSKKFKVLGNTDRHSIKKNLIGALLFDSGETAEATRLKRTARRRYTRRKNRICYLQEIFSNEMAKVDDSFFHRLEESFLVEEDKKHERHPIFGNIVDEVAYHEKYPTIYHLRKKLVDSTDKADLRLIYLALAHMIKFRGHFLIEGDLNPDNSDVDKLFIQLVQTYNQLFEENPINASGVDAKAILSARLSKSRRLENLIAQLPGEKKNGLFGNLIALSLGLTPNFKSNFDLAEDAKLQLSKDTYDDDLDNLLAQIGDQYADLFLAAKNLSDAILLSDILRVNTEITKAPLSASMIKRYDEHHQDLTLLKALVRQQLPEKYKEIFFDQSKNGYAGYIDGGASQEEFYKFIKPILEKMDGTEELLVKLNREDLLRKQRTFDNGSIPHQIHLGELHAILRRQEDFYPFLKDNREKIEKILTFRIPYYVGPLARGNSRFAWMTRKSEETITPWNFEEVVDKGASAQSFIERMTNFDKNLPNEKVLPKHSLLYEYFTVYNELTKVKYVTEGMRKPAFLSGEQKKAIVDLLFKTNRKVTVKQLKEDYFKKIECFDSVEISGVEDRFNASLGTYHDLLKIIKDKDFLDNEENEDILEDIVLTLTLFEDREMIEERLKTYAHLFDDKVMKQLKRRRYTGWGRLSRKLINGIRDKQSGKTILDFLKSDGFANRNFMQLIHDDSLTFKEDIQKAQVSGQGDSLHEHIANLAGSPAIKKGILQTVKVVDELVKVMGRHKPENIVIEMARENQTTQKGQKNSRERMKRIEEGIKELGSQILKEHPVENTQLQNEKLYLYYLQNGRDMYVDQELDINRLSDYDVDHIVPQSFLKDDSIDNKVLTRSDKARGKSDNVPSEEVVKKMKNYWRQLLNAKLITQRKFDNLTKAERGGLSELDKAGFIKRQLVETRQITKHVAQILDSRMNTKYDENDKLIREVKVITLKSKLVSDFRKDFQFYKVREINNYHHAHDAYLNAVVGTALIKKYPKLESEFVYGDYKVYDVRKMIAKSEQEIGKATAKYFFYSNIMNFFKTEITLANGEIRKRPLIETNGETGEIVWDKGRDFATVRKVLSMPQVNIVKKTEVQTGGFSKESILPKRNSDKLIARKKDWDPKKYGGFDSPTVAYSVLVVAKVEKGKSKKLKSVKELLGITIMERSSFEKNPIDFLEAKGYKEVKKDLIIKLPKYSLFELENGRKRMLASAGELQKGNELALPSKYVNFLYLASHYEKLKGSPEDNEQKQLFVEQHKHYLDEIIEQISEFSKRVILADANLDKVLSAYNKHRDKPIREQAENIIHLFTLTNLGAPAAFKYFDTTIDRKRYTSTKEVLDATLIHQSITGLYETRIDLSQLGGDGGGGSGSSPAPGGTLNIEDEYRLHETSKEPDVSLGSTWLSDFPQAWAETGGMGLAVRQAPLIIPLKATSTPVSIKQYPMSQEARLGIKPHIQRLLDQGILVPCQSPWNTPLLPVKKPGTNDYRPVQDLREVNKRVEDIHPTVPNPYNLLSGLPPSHQWYTVLDLKDAFFCLRLHPTSQPLFAFEWRDPEMGISGQLTWTRLPQGFKNSPTLFNEALHRDLAGFRIQHPDLILLQYVDDLLLAATSELDCQQGTRALLQTLGDLGYRASAKKAQICQKQVKYLGYLLKEGQRWLTEARKETVMGQPIPKTPRQLREFLGTAGFCRLWIPGFAEMAAPLYPLTKPGTLFNWGPDQQKAFQEIKQALLTAPALGLPDLTKPFELFVDEKQGYAKGVLTQKLGPWRRPVAYLSKKLDPVAAGWPPCLRMVAAIAVLTKDAGKLTMGQPLVILAPHAVEALVKQPPDRWLSNARMTHYQALLLDTDRVQFGPVVALNPATLLPLPEEGLQHDCLDILAEAHGTRSDLMDQPLPDADHTWYTDGSSFLQEGQRKAGAAVTTETEVIWARALPAGTSAQRAELIALTQALKMAEGKKLNVYTDSRYAFATAHIHGEIYRRRGWLTSEGKEIKNKDEILALLKALFLPKRLSIIHCPGHQKGNSAEARGNRMADQAAREVATRETPETSTLLAGKRTADGSEFEKRTADGSEFESPKKKAKVE

SEQ ID NO: 2266 - protein, 2096 aa, synthetic construct
MPAAKRVKLDGGDKKYSIGLDIGTNSVGWAVITDEYKVPSKKFKVLGNTDRHSIKKNLIGALLFDSGETAEATRLKRTARRRYTRRKNRICYLQEIFSNEMAKVDDSFFHRLEESFLVEEDKKHERHPIFGNIVDEVAYHEKYPTIYHLRKKLVDSTDKADLRLIYLALAHMIKFRGHFLIEGDLNPDNSDVDKLFIQLVQTYNQLFEENPINASGVDAKAILSARLSKSRRLENLIAQLPGEKKNGLFGNLIALSLGLTPNFKSNFDLAEDAKLQLSKDTYDDDLDNLLAQIGDQYADLFLAAKNLSDAILLSDILRVNTEITKAPLSASMIKRYDEHHQDLTLLKALVRQQLPEKYKEIFFDQSKNGYAGYIDGGASQEEFYKFIKPILEKMDGTEELLVKLNREDLLRKQRTFDNGSIPHQIHLGELHAILRRQEDFYPFLKDNREKIEKILTFRIPYYVGPLARGNSRFAWMTRKSEETITPWNFEEVVDKGASAQSFIERMTNFDKNLPNEKVLPKHSLLYEYFTVYNELTKVKYVTEGMRKPAFLSGEQKKAIVDLLFKTNRKVTVKQLKEDYFKKIECFDSVEISGVEDRFNASLGTYHDLLKIIKDKDFLDNEENEDILEDIVLTLTLFEDREMIEERLKTYAHLFDDKVMKQLKRRRYTGWGRLSRKLINGIRDKQSGKTILDFLKSDGFANRNFMQLIHDDSLTFKEDIQKAQVSGQGDSLHEHIANLAGSPAIKKGILQTVKVVDELVKVMGRHKPENIVIEMARENQTTQKGQKNSRERMKRIEEGIKELGSQILKEHPVENTQLQNEKLYLYYLQNGRDMYVDQELDINRLSDYDVDHIVPQSFLKDDSIDNKVLTRSDKARGKSDNVPSEEVVKKMKNYWRQLLNAKLITQRKFDNLTKAERGGLSELDKAGFIKRQLVETRQITKHVAQILDSRMNTKYDENDKLIREVKVITLKSKLVSDFRKDFQFYKVREINNYHHAHDAYLNAVVGTALIKKYPKLESEFVYGDYKVYDVRKMIAKSEQEIGKATAKYFFYSNIMNFFKTEITLANGEIRKRPLIETNGETGEIVWDKGRDFATVRKVLSMPQVNIVKKTEVQTGGFSKESILPKRNSDKLIARKKDWDPKKYGGFDSPTVAYSVLVVAKVEKGKSKKLKSVKELLGITIMERSSFEKNPIDFLEAKGYKEVKKDLIIKLPKYSLFELENGRKRMLASAGELQKGNELALPSKYVNFLYLASHYEKLKGSPEDNEQKQLFVEQHKHYLDEIIEQISEFSKRVILADANLDKVLSAYNKHRDKPIREQAENIIHLFTLTNLGAPAAFKYFDTTIDRKRYTSTKEVLDATLIHQSITGLYETRIDLSQLGGDGGGGSGGGEAAAKGGTLNIEDEYRLHETSKEPDVSLGSTWLSDFPQAWAETGGMGLAVRQAPLIIPLKATSTPVSIKQYPMSQEARLGIKPHIQRLLDQGILVPCQSPWNTPLLPVKKPGTNDYRPVQDLREVNKRVEDIHPTVPNPYNLLSGLPPSHQWYTVLDLKDAFFCLRLHPTSQPLFAFEWRDPEMGISGQLTWTRLPQGFKNSPTLFNEALHRDLAGFRIQHPDLILLQYVDDLLLAATSELDCQQGTRALLQTLGDLGYRASAKKAQICQKQVKYLGYLLKEGQRWLTEARKETVMGQPIPKTPRQLREFLGTAGFCRLWIPGFAEMAAPLYPLTKPGTLFNWGPDQQKAFQEIKQALLTAPALGLPDLTKPFELFVDEKQGYAKGVLTQKLGPWRRPVAYLSKKLDPVAAGWPPCLRMVAAIAVLTKDAGKLTMGQPLVILAPHAVEALVKQPPDRWLSNARMTHYQALLLDTDRVQFGPVVALNPATLLPLPEEGLQHDCLDILAEAHGTRSDLMDQPLPDADHTWYTDGSSFLQEGQRKAGAAVTTETEVIWARALPAGTSAQRAELIALTQALKMAEGKKLNVYTDSRYAFATAHIHGEIYRRRGWLTSEGKEIKNKDEILALLKALFLPKRLSIIHCPGHQKGNSAEARGNRMADQAAREVATRETPETSTLLAGKRTADGSEFEKRTADGSEFESPKKKAKVE

SEQ ID NO: 2267 - protein, 2092 aa, synthetic construct
MPAAKRVKLDGGDKKYSIGLDIGTNSVGWAVITDEYKVPSKKFKVLGNTDRHSIKKNLIGALLFDSGETAEATRLKRTARRRYTRRKNRICYLQEIFSNEMAKVDDSFFHRLEESFLVEEDKKHERHPIFGNIVDEVAYHEKYPTIYHLRKKLVDSTDKADLRLIYLALAHMIKFRGHFLIEGDLNPDNSDVDKLFIQLVQTYNQLFEENPINASGVDAKAILSARLSKSRRLENLIAQLPGEKKNGLFGNLIALSLGLTPNFKSNFDLAEDAKLQLSKDTYDDDLDNLLAQIGDQYADLFLAAKNLSDAILLSDILRVNTEITKAPLSASMIKRYDEHHQDLTLLKALVRQQLPEKYKEIFFDQSKNGYAGYIDGGASQEEFYKFIKPILEKMDGTEELLVKLNREDLLRKQRTFDNGSIPHQIHLGELHAILRRQEDFYPFLKDNREKIEKILTFRIPYYVGPLARGNSRFAWMTRKSEETITPWNFEEVVDKGASAQSFIERMTNFDKNLPNEKVLPKHSLLYEYFTVYNELTKVKYVTEGMRKPAFLSGEQKKAIVDLLFKTNRKVTVKQLKEDYFKKIECFDSVEISGVEDRFNASLGTYHDLLKIIKDKDFLDNEENEDILEDIVLTLTLFEDREMIEERLKTYAHLFDDKVMKQLKRRRYTGWGRLSRKLINGIRDKQSGKTILDFLKSDGFANRNFMQLIHDDSLTFKEDIQKAQVSGQGDSLHEHIANLAGSPAIKKGILQTVKVVDELVKVMGRHKPENIVIEMARENQTTQKGQKNSRERMKRIEEGIKELGSQILKEHPVENTQLQNEKLYLYYLQNGRDMYVDQELDINRLSDYDVDHIVPQSFLKDDSIDNKVLTRSDKARGKSDNVPSEEVVKKMKNYWRQLLNAKLITQRKFDNLTKAERGGLSELDKAGFIKRQLVETRQITKHVAQILDSRMNTKYDENDKLIREVKVITLKSKLVSDFRKDFQFYKVREINNYHHAHDAYLNAVVGTALIKKYPKLESEFVYGDYKVYDVRKMIAKSEQEIGKATAKYFFYSNIMNFFKTEITLANGEIRKRPLIETNGETGEIVWDKGRDFATVRKVLSMPQVNIVKKTEVQTGGFSKESILPKRNSDKLIARKKDWDPKKYGGFDSPTVAYSVLVVAKVEKGKSKKLKSVKELLGITIMERSSFEKNPIDFLEAKGYKEVKKDLIIKLPKYSLFELENGRKRMLASAGELQKGNELALPSKYVNFLYLASHYEKLKGSPEDNEQKQLFVEQHKHYLDEIIEQISEFSKRVILADANLDKVLSAYNKHRDKPIREQAENIIHLFTLTNLGAPAAFKYFDTTIDRKRYTSTKEVLDATLIHQSITGLYETRIDLSQLGGDGGGGGGGGGGGTLNIEDEYRLHETSKEPDVSLGSTWLSDFPQAWAETGGMGLAVRQAPLIIPLKATSTPVSIKQYPMSQEARLGIKPHIQRLLDQGILVPCQSPWNTPLLPVKKPGTNDYRPVQDLREVNKRVEDIHPTVPNPYNLLSGLPPSHQWYTVLDLKDAFFCLRLHPTSQPLFAFEWRDPEMGISGQLTWTRLPQGFKNSPTLFNEALHRDLAGFRIQHPDLILLQYVDDLLLAATSELDCQQGTRALLQTLGDLGYRASAKKAQICQKQVKYLGYLLKEGQRWLTEARKETVMGQPIPKTPRQLREFLGTAGFCRLWIPGFAEMAAPLYPLTKPGTLFNWGPDQQKAFQEIKQALLTAPALGLPDLTKPFELFVDEKQGYAKGVLTQKLGPWRRPVAYLSKKLDPVAAGWPPCLRMVAAIAVLTKDAGKLTMGQPLVILAPHAVEALVKQPPDRWLSNARMTHYQALLLDTDRVQFGPVVALNPATLLPLPEEGLQHDCLDILAEAHGTRSDLMDQPLPDADHTWYTDGSSFLQEGQRKAGAAVTTETEVIWARALPAGTSAQRAELIALTQALKMAEGKKLNVYTDSRYAFATAHIHGEIYRRRGWLTSEGKEIKNKDEILALLKALFLPKRLSIIHCPGHQKGNSAEARGNRMADQAAREVATRETPETSTLLAGKRTADGSEFEKRTADGSEFESPKKKAKVE

SEQ ID NO: 2268 - protein, 2089 aa, synthetic construct
MPAAKRVKLDGGDKKYSIGLDIGTNSVGWAVITDEYKVPSKKFKVLGNTDRHSIKKNLIGALLFDSGETAEATRLKRTARRRYTRRKNRICYLQEIFSNEMAKVDDSFFHRLEESFLVEEDKKHERHPIFGNIVDEVAYHEKYPTIYHLRKKLVDSTDKADLRLIYLALAHMIKFRGHFLIEGDLNPDNSDVDKLFIQLVQTYNQLFEENPINASGVDAKAILSARLSKSRRLENLIAQLPGEKKNGLFGNLIALSLGLTPNFKSNFDLAEDAKLQLSKDTYDDDLDNLLAQIGDQYADLFLAAKNLSDAILLSDILRVNTEITKAPLSASMIKRYDEHHQDLTLLKALVRQQLPEKYKEIFFDQSKNGYAGYIDGGASQEEFYKFIKPILEKMDGTEELLVKLNREDLLRKQRTFDNGSIPHQIHLGELHAILRRQEDFYPFLKDNREKIEKILTFRIPYYVGPLARGNSRFAWMTRKSEETITPWNFEEVVDKGASAQSFIERMTNFDKNLPNEKVLPKHSLLYEYFTVYNELTKVKYVTEGMRKPAFLSGEQKKAIVDLLFKTNRKVTVKQLKEDYFKKIECFDSVEISGVEDRFNASLGTYHDLLKIIKDKDFLDNEENEDILEDIVLTLTLFEDREMIEERLKTYAHLFDDKVMKQLKRRRYTGWGRLSRKLINGIRDKQSGKTILDFLKSDGFANRNFMQLIHDDSLTFKEDIQKAQVSGQGDSLHEHIANLAGSPAIKKGILQTVKVVDELVKVMGRHKPENIVIEMARENQTTQKGQKNSRERMKRIEEGIKELGSQILKEHPVENTQLQNEKLYLYYLQNGRDMYVDQELDINRLSDYDVDHIVPQSFLKDDSIDNKVLTRSDKARGKSDNVPSEEVVKKMKNYWRQLLNAKLITQRKFDNLTKAERGGLSELDKAGFIKRQLVETRQITKHVAQILDSRMNTKYDENDKLIREVKVITLKSKLVSDFRKDFQFYKVREINNYHHAHDAYLNAVVGTALIKKYPKLESEFVYGDYKVYDVRKMIAKSEQEIGKATAKYFFYSNIMNFFKTEITLANGEIRKRPLIETNGETGEIVWDKGRDFATVRKVLSMPQVNIVKKTEVQTGGFSKESILPKRNSDKLIARKKDWDPKKYGGFDSPTVAYSVLVVAKVEKGKSKKLKSVKELLGITIMERSSFEKNPIDFLEAKGYKEVKKDLIIKLPKYSLFELENGRKRMLASAGELQKGNELALPSKYVNFLYLASHYEKLKGSPEDNEQKQLFVEQHKHYLDEIIEQISEFSKRVILADANLDKVLSAYNKHRDKPIREQAENIIHLFTLTNLGAPAAFKYFDTTIDRKRYTSTKEVLDATLIHQSITGLYETRIDLSQLGGDGGGGGGGGTLNIEDEYRLHETSKEPDVSLGSTWLSDFPQAWAETGGMGLAVRQAPLIIPLKATSTPVSIKQYPMSQEARLGIKPHIQRLLDQGILVPCQSPWNTPLLPVKKPGTNDYRPVQDLREVNKRVEDIHPTVPNPYNLLSGLPPSHQWYTVLDLKDAFFCLRLHPTSQPLFAFEWRDPEMGISGQLTWTRLPQGFKNSPTLFNEALHRDLAGFRIQHPDLILLQYVDDLLLAATSELDCQQGTRALLQTLGDLGYRASAKKAQICQKQVKYLGYLLKEGQRWLTEARKETVMGQPIPKTPRQLREFLGTAGFCRLWIPGFAEMAAPLYPLTKPGTLFNWGPDQQKAFQEIKQALLTAPALGLPDLTKPFELFVDEKQGYAKGVLTQKLGPWRRPVAYLSKKLDPVAAGWPPCLRMVAAIAVLTKDAGKLTMGQPLVILAPHAVEALVKQPPDRWLSNARMTHYQALLLDTDRVQFGPVVALNPATLLPLPEEGLQHDCLDILAEAHGTRSDLMDQPLPDADHTWYTDGSSFLQEGQRKAGAAVTTETEVIWARALPAGTSAQRAELIALTQALKMAEGKKLNVYTDSRYAFATAHIHGEIYRRRGWLTSEGKEIKNKDEILALLKALFLPKRLSIIHCPGHQKGNSAEARGNRMADQAAREVATRETPETSTLLAGKRTADGSEFEKRTADGSEFESPKKKAKVE

SEQ ID NO: 2269 - protein, 2096 aa, synthetic construct
MPAAKRVKLDGGDKKYSIGLDIGTNSVGWAVITDEYKVPSKKFKVLGNTDRHSIKKNLIGALLFDSGETAEATRLKRTARRRYTRRKNRICYLQEIFSNEMAKVDDSFFHRLEESFLVEEDKKHERHPIFGNIVDEVAYHEKYPTIYHLRKKLVDSTDKADLRLIYLALAHMIKFRGHFLIEGDLNPDNSDVDKLFIQLVQTYNQLFEENPINASGVDAKAILSARLSKSRRLENLIAQLPGEKKNGLFGNLIALSLGLTPNFKSNFDLAEDAKLQLSKDTYDDDLDNLLAQIGDQYADLFLAAKNLSDAILLSDILRVNTEITKAPLSASMIKRYDEHHQDLTLLKALVRQQLPEKYKEIFFDQSKNGYAGYIDGGASQEEFYKFIKPILEKMDGTEELLVKLNREDLLRKQRTFDNGSIPHQIHLGELHAILRRQEDFYPFLKDNREKIEKILTFRIPYYVGPLARGNSRFAWMTRKSEETITPWNFEEVVDKGASAQSFIERMTNFDKNLPNEKVLPKHSLLYEYFTVYNELTKVKYVTEGMRKPAFLSGEQKKAIVDLLFKTNRKVTVKQLKEDYFKKIECFDSVEISGVEDRFNASLGTYHDLLKIIKDKDFLDNEENEDILEDIVLTLTLFEDREMIEERLKTYAHLFDDKVMKQLKRRRYTGWGRLSRKLINGIRDKQSGKTILDFLKSDGFANRNFMQLIHDDSLTFKEDIQKAQVSGQGDSLHEHIANLAGSPAIKKGILQTVKVVDELVKVMGRHKPENIVIEMARENQTTQKGQKNSRERMKRIEEGIKELGSQILKEHPVENTQLQNEKLYLYYLQNGRDMYVDQELDINRLSDYDVDHIVPQSFLKDDSIDNKVLTRSDKARGKSDNVPSEEVVKKMKNYWRQLLNAKLITQRKFDNLTKAERGGLSELDKAGFIKRQLVETRQITKHVAQILDSRMNTKYDENDKLIREVKVITLKSKLVSDFRKDFQFYKVREINNYHHAHDAYLNAVVGTALIKKYPKLESEFVYGDYKVYDVRKMIAKSEQEIGKATAKYFFYSNIMNFFKTEITLANGEIRKRPLIETNGETGEIVWDKGRDFATVRKVLSMPQVNIVKKTEVQTGGFSKESILPKRNSDKLIARKKDWDPKKYGGFDSPTVAYSVLVVAKVEKGKSKKLKSVKELLGITIMERSSFEKNPIDFLEAKGYKEVKKDLIIKLPKYSLFELENGRKRMLASAGELQKGNELALPSKYVNFLYLASHYEKLKGSPEDNEQKQLFVEQHKHYLDEIIEQISEFSKRVILADANLDKVLSAYNKHRDKPIREQAENIIHLFTLTNLGAPAAFKYFDTTIDRKRYTSTKEVLDATLIHQSITGLYETRIDLSQLGGDGGPAPEAAAKGGGGGTLNIEDEYRLHETSKEPDVSLGSTWLSDFPQAWAETGGMGLAVRQAPLIIPLKATSTPVSIKQYPMSQEARLGIKPHIQRLLDQGILVPCQSPWNTPLLPVKKPGTNDYRPVQDLREVNKRVEDIHPTVPNPYNLLSGLPPSHQWYTVLDLKDAFFCLRLHPTSQPLFAFEWRDPEMGISGQLTWTRLPQGFKNSPTLFNEALHRDLAGFRIQHPDLILLQYVDDLLLAATSELDCQQGTRALLQTLGDLGYRASAKKAQICQKQVKYLGYLLKEGQRWLTEARKETVMGQPIPKTPRQLREFLGTAGFCRLWIPGFAEMAAPLYPLTKPGTLFNWGPDQQKAFQEIKQALLTAPALGLPDLTKPFELFVDEKQGYAKGVLTQKLGPWRRPVAYLSKKLDPVAAGWPPCLRMVAAIAVLTKDAGKLTMGQPLVILAPHAVEALVKQPPDRWLSNARMTHYQALLLDTDRVQFGPVVALNPATLLPLPEEGLQHDCLDILAEAHGTRSDLMDQPLPDADHTWYTDGSSFLQEGQRKAGAAVTTETEVIWARALPAGTSAQRAELIALTQALKMAEGKKLNVYTDSRYAFATAHIHGEIYRRRGWLTSEGKEIKNKDEILALLKALFLPKRLSIIHCPGHQKGNSAEARGNRMADQAAREVATRETPETSTLLAGKRTADGSEFEKRTADGSEFESPKKKAKVE

SEQ ID NO: 2270 - protein, 2091 aa, synthetic construct
MPAAKRVKLDGGDKKYSIGLDIGTNSVGWAVITDEYKVPSKKFKVLGNTDRHSIKKNLIGALLFDSGETAEATRLKRTARRRYTRRKNRICYLQEIFSNEMAKVDDSFFHRLEESFLVEEDKKHERHPIFGNIVDEVAYHEKYPTIYHLRKKLVDSTDKADLRLIYLALAHMIKFRGHFLIEGDLNPDNSDVDKLFIQLVQTYNQLFEENPINASGVDAKAILSARLSKSRRLENLIAQLPGEKKNGLFGNLIALSLGLTPNFKSNFDLAEDAKLQLSKDTYDDDLDNLLAQIGDQYADLFLAAKNLSDAILLSDILRVNTEITKAPLSASMIKRYDEHHQDLTLLKALVRQQLPEKYKEIFFDQSKNGYAGYIDGGASQEEFYKFIKPILEKMDGTEELLVKLNREDLLRKQRTFDNGSIPHQIHLGELHAILRRQEDFYPFLKDNREKIEKILTFRIPYYVGPLARGNSRFAWMTRKSEETITPWNFEEVVDKGASAQSFIERMTNFDKNLPNEKVLPKHSLLYEYFTVYNELTKVKYVTEGMRKPAFLSGEQKKAIVDLLFKTNRKVTVKQLKEDYFKKIECFDSVEISGVEDRFNASLGTYHDLLKIIKDKDFLDNEENEDILEDIVLTLTLFEDREMIEERLKTYAHLFDDKVMKQLKRRRYTGWGRLSRKLINGIRDKQSGKTILDFLKSDGFANRNFMQLIHDDSLTFKEDIQKAQVSGQGDSLHEHIANLAGSPAIKKGILQTVKVVDELVKVMGRHKPENIVIEMARENQTTQKGQKNSRERMKRIEEGIKELGSQILKEHPVENTQLQNEKLYLYYLQNGRDMYVDQELDINRLSDYDVDHIVPQSFLKDDSIDNKVLTRSDKARGKSDNVPSEEVVKKMKNYWRQLLNAKLITQRKFDNLTKAERGGLSELDKAGFIKRQLVETRQITKHVAQILDSRMNTKYDENDKLIREVKVITLKSKLVSDFRKDFQFYKVREINNYHHAHDAYLNAVVGTALIKKYPKLESEFVYGDYKVYDVRKMIAKSEQEIGKATAKYFFYSNIMNFFKTEITLANGEIRKRPLIETNGETGEIVWDKGRDFATVRKVLSMPQVNIVKKTEVQTGGFSKESILPKRNSDKLIARKKDWDPKKYGGFDSPTVAYSVLVVAKVEKGKSKKLKSVKELLGITIMERSSFEKNPIDFLEAKGYKEVKKDLIIKLPKYSLFELENGRKRMLASAGELQKGNELALPSKYVNFLYLASHYEKLKGSPEDNEQKQLFVEQHKHYLDEIIEQISEFSKRVILADANLDKVLSAYNKHRDKPIREQAENIIHLFTLTNLGAPAAFKYFDTTIDRKRYTSTKEVLDATLIHQSITGLYETRIDLSQLGGDGGGGSGSSGGTLNIEDEYRLHETSKEPDVSLGSTWLSDFPQAWAETGGMGLAVRQAPLIIPLKATSTPVSIKQYPMSQEARLGIKPHIQRLLDQGILVPCQSPWNTPLLPVKKPGTNDYRPVQDLREVNKRVEDIHPTVPNPYNLLSGLPPSHQWYTVLDLKDAFFCLRLHPTSQPLFAFEWRDPEMGISGQLTWTRLPQGFKNSPTLFNEALHRDLAGFRIQHPDLILLQYVDDLLLAATSELDCQQGTRALLQTLGDLGYRASAKKAQICQKQVKYLGYLLKEGQRWLTEARKETVMGQPIPKTPRQLREFLGTAGFCRLWIPGFAEMAAPLYPLTKPGTLFNWGPDQQKAFQEIKQALLTAPALGLPDLTKPFELFVDEKQGYAKGVLTQKLGPWRRPVAYLSKKLDPVAAGWPPCLRMVAAIAVLTKDAGKLTMGQPLVILAPHAVEALVKQPPDRWLSNARMTHYQALLLDTDRVQFGPVVALNPATLLPLPEEGLQHDCLDILAEAHGTRSDLMDQPLPDADHTWYTDGSSFLQEGQRKAGAAVTTETEVIWARALPAGTSAQRAELIALTQALKMAEGKKLNVYTDSRYAFATAHIHGEIYRRRGWLTSEGKEIKNKDEILALLKALFLPKRLSIIHCPGHQKGNSAEARGNRMADQAAREVATRETPETSTLLAGKRTADGSEFEKRTADGSEFESPKKKAKVE

SEQ ID NO: 2271 - protein, 2091 aa, synthetic construct
MPAAKRVKLDGGDKKYSIGLDIGTNSVGWAVITDEYKVPSKKFKVLGNTDRHSIKKNLIGALLFDSGETAEATRLKRTARRRYTRRKNRICYLQEIFSNEMAKVDDSFFHRLEESFLVEEDKKHERHPIFGNIVDEVAYHEKYPTIYHLRKKLVDSTDKADLRLIYLALAHMIKFRGHFLIEGDLNPDNSDVDKLFIQLVQTYNQLFEENPINASGVDAKAILSARLSKSRRLENLIAQLPGEKKNGLFGNLIALSLGLTPNFKSNFDLAEDAKLQLSKDTYDDDLDNLLAQIGDQYADLFLAAKNLSDAILLSDILRVNTEITKAPLSASMIKRYDEHHQDLTLLKALVRQQLPEKYKEIFFDQSKNGYAGYIDGGASQEEFYKFIKPILEKMDGTEELLVKLNREDLLRKQRTFDNGSIPHQIHLGELHAILRRQEDFYPFLKDNREKIEKILTFRIPYYVGPLARGNSRFAWMTRKSEETITPWNFEEVVDKGASAQSFIERMTNFDKNLPNEKVLPKHSLLYEYFTVYNELTKVKYVTEGMRKPAFLSGEQKKAIVDLLFKTNRKVTVKQLKEDYFKKIECFDSVEISGVEDRFNASLGTYHDLLKIIKDKDFLDNEENEDILEDIVLTLTLFEDREMIEERLKTYAHLFDDKVMKQLKRRRYTGWGRLSRKLINGIRDKQSGKTILDFLKSDGFANRNFMQLIHDDSLTFKEDIQKAQVSGQGDSLHEHIANLAGSPAIKKGILQTVKVVDELVKVMGRHKPENIVIEMARENQTTQKGQKNSRERMKRIEEGIKELGSQILKEHPVENTQLQNEKLYLYYLQNGRDMYVDQELDINRLSDYDVDHIVPQSFLKDDSIDNKVLTRSDKARGKSDNVPSEEVVKKMKNYWRQLLNAKLITQRKFDNLTKAERGGLSELDKAGFIKRQLVETRQITKHVAQILDSRMNTKYDENDKLIREVKVITLKSKLVSDFRKDFQFYKVREINNYHHAHDAYLNAVVGTALIKKYPKLESEFVYGDYKVYDVRKMIAKSEQEIGKATAKYFFYSNIMNFFKTEITLANGEIRKRPLIETNGETGEIVWDKGRDFATVRKVLSMPQVNIVKKTEVQTGGFSKESILPKRNSDKLIARKKDWDPKKYGGFDSPTVAYSVLVVAKVEKGKSKKLKSVKELLGITIMERSSFEKNPIDFLEAKGYKEVKKDLIIKLPKYSLFELENGRKRMLASAGELQKGNELALPSKYVNFLYLASHYEKLKGSPEDNEQKQLFVEQHKHYLDEIIEQISEFSKRVILADANLDKVLSAYNKHRDKPIREQAENIIHLFTLTNLGAPAAFKYFDTTIDRKRYTSTKEVLDATLIHQSITGLYETRIDLSQLGGDGGPAPGSSGGTLNIEDEYRLHETSKEPDVSLGSTWLSDFPQAWAETGGMGLAVRQAPLIIPLKATSTPVSIKQYPMSQEARLGIKPHIQRLLDQGILVPCQSPWNTPLLPVKKPGTNDYRPVQDLREVNKRVEDIHPTVPNPYNLLSGLPPSHQWYTVLDLKDAFFCLRLHPTSQPLFAFEWRDPEMGISGQLTWTRLPQGFKNSPTLFNEALHRDLAGFRIQHPDLILLQYVDDLLLAATSELDCQQGTRALLQTLGDLGYRASAKKAQICQKQVKYLGYLLKEGQRWLTEARKETVMGQPIPKTPRQLREFLGTAGFCRLWIPGFAEMAAPLYPLTKPGTLFNWGPDQQKAFQEIKQALLTAPALGLPDLTKPFELFVDEKQGYAKGVLTQKLGPWRRPVAYLSKKLDPVAAGWPPCLRMVAAIAVLTKDAGKLTMGQPLVILAPHAVEALVKQPPDRWLSNARMTHYQALLLDTDRVQFGPVVALNPATLLPLPEEGLQHDCLDILAEAHGTRSDLMDQPLPDADHTWYTDGSSFLQEGQRKAGAAVTTETEVIWARALPAGTSAQRAELIALTQALKMAEGKKLNVYTDSRYAFATAHIHGEIYRRRGWLTSEGKEIKNKDEILALLKALFLPKRLSIIHCPGHQKGNSAEARGNRMADQAAREVATRETPETSTLLAGKRTADGSEFEKRTADGSEFESPKKKAKVE

SEQ ID NO: 2272 - protein, 2094 aa, synthetic construct
MPAAKRVKLDGGDKKYSIGLDIGTNSVGWAVITDEYKVPSKKFKVLGNTDRHSIKKNLIGALLFDSGETAEATRLKRTARRRYTRRKNRICYLQEIFSNEMAKVDDSFFHRLEESFLVEEDKKHERHPIFGNIVDEVAYHEKYPTIYHLRKKLVDSTDKADLRLIYLALAHMIKFRGHFLIEGDLNPDNSDVDKLFIQLVQTYNQLFEENPINASGVDAKAILSARLSKSRRLENLIAQLPGEKKNGLFGNLIALSLGLTPNFKSNFDLAEDAKLQLSKDTYDDDLDNLLAQIGDQYADLFLAAKNLSDAILLSDILRVNTEITKAPLSASMIKRYDEHHQDLTLLKALVRQQLPEKYKEIFFDQSKNGYAGYIDGGASQEEFYKFIKPILEKMDGTEELLVKLNREDLLRKQRTFDNGSIPHQIHLGELHAILRRQEDFYPFLKDNREKIEKILTFRIPYYVGPLARGNSRFAWMTRKSEETITPWNFEEVVDKGASAQSFIERMTNFDKNLPNEKVLPKHSLLYEYFTVYNELTKVKYVTEGMRKPAFLSGEQKKAIVDLLFKTNRKVTVKQLKEDYFKKIECFDSVEISGVEDRFNASLGTYHDLLKIIKDKDFLDNEENEDILEDIVLTLTLFEDREMIEERLKTYAHLFDDKVMKQLKRRRYTGWGRLSRKLINGIRDKQSGKTILDFLKSDGFANRNFMQLIHDDSLTFKEDIQKAQVSGQGDSLHEHIANLAGSPAIKKGILQTVKVVDELVKVMGRHKPENIVIEMARENQTTQKGQKNSRERMKRIEEGIKELGSQILKEHPVENTQLQNEKLYLYYLQNGRDMYVDQELDINRLSDYDVDHIVPQSFLKDDSIDNKVLTRSDKARGKSDNVPSEEVVKKMKNYWRQLLNAKLITQRKFDNLTKAERGGLSELDKAGFIKRQLVETRQITKHVAQILDSRMNTKYDENDKLIREVKVITLKSKLVSDFRKDFQFYKVREINNYHHAHDAYLNAVVGTALIKKYPKLESEFVYGDYKVYDVRKMIAKSEQEIGKATAKYFFYSNIMNFFKTEITLANGEIRKRPLIETNGETGEIVWDKGRDFATVRKVLSMPQVNIVKKTEVQTGGFSKESILPKRNSDKLIARKKDWDPKKYGGFDSPTVAYSVLVVAKVEKGKSKKLKSVKELLGITIMERSSFEKNPIDFLEAKGYKEVKKDLIIKLPKYSLFELENGRKRMLASAGELQKGNELALPSKYVNFLYLASHYEKLKGSPEDNEQKQLFVEQHKHYLDEIIEQISEFSKRVILADANLDKVLSAYNKHRDKPIREQAENIIHLFTLTNLGAPAAFKYFDTTIDRKRYTSTKEVLDATLIHQSITGLYETRIDLSQLGGDGGGGSPAPGGGGGTLNIEDEYRLHETSKEPDVSLGSTWLSDFPQAWAETGGMGLAVRQAPLIIPLKATSTPVSIKQYPMSQEARLGIKPHIQRLLDQGILVPCQSPWNTPLLPVKKPGTNDYRPVQDLREVNKRVEDIHPTVPNPYNLLSGLPPSHQWYTVLDLKDAFFCLRLHPTSQPLFAFEWRDPEMGISGQLTWTRLPQGFKNSPTLFNEALHRDLAGFRIQHPDLILLQYVDDLLLAATSELDCQQGTRALLQTLGDLGYRASAKKAQICQKQVKYLGYLLKEGQRWLTEARKETVMGQPIPKTPRQLREFLGTAGFCRLWIPGFAEMAAPLYPLTKPGTLFNWGPDQQKAFQEIKQALLTAPALGLPDLTKPFELFVDEKQGYAKGVLTQKLGPWRRPVAYLSKKLDPVAAGWPPCLRMVAAIAVLTKDAGKLTMGQPLVILAPHAVEALVKQPPDRWLSNARMTHYQALLLDTDRVQFGPVVALNPATLLPLPEEGLQHDCLDILAEAHGTRSDLMDQPLPDADHTWYTDGSSFLQEGQRKAGAAVTTETEVIWARALPAGTSAQRAELIALTQALKMAEGKKLNVYTDSRYAFATAHIHGEIYRRRGWLTSEGKEIKNKDEILALLKALFLPKRLSIIHCPGHQKGNSAEARGNRMADQAAREVATRETPETSTLLAGKRTADGSEFEKRTADGSEFESPKKKAKVE

SEQ ID NO: 2273 - protein, 2096 aa, synthetic construct
MPAAKRVKLDGGDKKYSIGLDIGTNSVGWAVITDEYKVPSKKFKVLGNTDRHSIKKNLIGALLFDSGETAEATRLKRTARRRYTRRKNRICYLQEIFSNEMAKVDDSFFHRLEESFLVEEDKKHERHPIFGNIVDEVAYHEKYPTIYHLRKKLVDSTDKADLRLIYLALAHMIKFRGHFLIEGDLNPDNSDVDKLFIQLVQTYNQLFEENPINASGVDAKAILSARLSKSRRLENLIAQLPGEKKNGLFGNLIALSLGLTPNFKSNFDLAEDAKLQLSKDTYDDDLDNLLAQIGDQYADLFLAAKNLSDAILLSDILRVNTEITKAPLSASMIKRYDEHHQDLTLLKALVRQQLPEKYKEIFFDQSKNGYAGYIDGGASQEEFYKFIKPILEKMDGTEELLVKLNREDLLRKQRTFDNGSIPHQIHLGELHAILRRQEDFYPFLKDNREKIEKILTFRIPYYVGPLARGNSRFAWMTRKSEETITPWNFEEVVDKGASAQSFIERMTNFDKNLPNEKVLPKHSLLYEYFTVYNELTKVKYVTEGMRKPAFLSGEQKKAIVDLLFKTNRKVTVKQLKEDYFKKIECFDSVEISGVEDRFNASLGTYHDLLKIIKDKDFLDNEENEDILEDIVLTLTLFEDREMIEERLKTYAHLFDDKVMKQLKRRRYTGWGRLSRKLINGIRDKQSGKTILDFLKSDGFANRNFMQLIHDDSLTFKEDIQKAQVSGQGDSLHEHIANLAGSPAIKKGILQTVKVVDELVKVMGRHKPENIVIEMARENQTTQKGQKNSRERMKRIEEGIKELGSQILKEHPVENTQLQNEKLYLYYLQNGRDMYVDQELDINRLSDYDVDHIVPQSFLKDDSIDNKVLTRSDKARGKSDNVPSEEVVKKMKNYWRQLLNAKLITQRKFDNLTKAERGGLSELDKAGFIKRQLVETRQITKHVAQILDSRMNTKYDENDKLIREVKVITLKSKLVSDFRKDFQFYKVREINNYHHAHDAYLNAVVGTALIKKYPKLESEFVYGDYKVYDVRKMIAKSEQEIGKATAKYFFYSNIMNFFKTEITLANGEIRKRPLIETNGETGEIVWDKGRDFATVRKVLSMPQVNIVKKTEVQTGGFSKESILPKRNSDKLIARKKDWDPKKYGGFDSPTVAYSVLVVAKVEKGKSKKLKSVKELLGITIMERSSFEKNPIDFLEAKGYKEVKKDLIIKLPKYSLFELENGRKRMLASAGELQKGNELALPSKYVNFLYLASHYEKLKGSPEDNEQKQLFVEQHKHYLDEIIEQISEFSKRVILADANLDKVLSAYNKHRDKPIREQAENIIHLFTLTNLGAPAAFKYFDTTIDRKRYTSTKEVLDATLIHQSITGLYETRIDLSQLGGDGGGSSGGSEAAAKGGTLNIEDEYRLHETSKEPDVSLGSTWLSDFPQAWAETGGMGLAVRQAPLIIPLKATSTPVSIKQYPMSQEARLGIKPHIQRLLDQGILVPCQSPWNTPLLPVKKPGTNDYRPVQDLREVNKRVEDIHPTVPNPYNLLSGLPPSHQWYTVLDLKDAFFCLRLHPTSQPLFAFEWRDPEMGISGQLTWTRLPQGFKNSPTLFNEALHRDLAGFRIQHPDLILLQYVDDLLLAATSELDCQQGTRALLQTLGDLGYRASAKKAQICQKQVKYLGYLLKEGQRWLTEARKETVMGQPIPKTPRQLREFLGTAGFCRLWIPGFAEMAAPLYPLTKPGTLFNWGPDQQKAFQEIKQALLTAPALGLPDLTKPFELFVDEKQGYAKGVLTQKLGPWRRPVAYLSKKLDPVAAGWPPCLRMVAAIAVLTKDAGKLTMGQPLVILAPHAVEALVKQPPDRWLSNARMTHYQALLLDTDRVQFGPVVALNPATLLPLPEEGLQHDCLDILAEAHGTRSDLMDQPLPDADHTWYTDGSSFLQEGQRKAGAAVTTETEVIWARALPAGTSAQRAELIALTQALKMAEGKKLNVYTDSRYAFATAHIHGEIYRRRGWLTSEGKEIKNKDEILALLKALFLPKRLSIIHCPGHQKGNSAEARGNRMADQAAREVATRETPETSTLLAGKRTADGSEFEKRTADGSEFESPKKKAKVE

SEQ ID NO: 2274 - protein, 2094 aa, synthetic construct
MPAAKRVKLDGGDKKYSIGLDIGTNSVGWAVITDEYKVPSKKFKVLGNTDRHSIKKNLIGALLFDSGETAEATRLKRTARRRYTRRKNRICYLQEIFSNEMAKVDDSFFHRLEESFLVEEDKKHERHPIFGNIVDEVAYHEKYPTIYHLRKKLVDSTDKADLRLIYLALAHMIKFRGHFLIEGDLNPDNSDVDKLFIQLVQTYNQLFEENPINASGVDAKAILSARLSKSRRLENLIAQLPGEKKNGLFGNLIALSLGLTPNFKSNFDLAEDAKLQLSKDTYDDDLDNLLAQIGDQYADLFLAAKNLSDAILLSDILRVNTEITKAPLSASMIKRYDEHHQDLTLLKALVRQQLPEKYKEIFFDQSKNGYAGYIDGGASQEEFYKFIKPILEKMDGTEELLVKLNREDLLRKQRTFDNGSIPHQIHLGELHAILRRQEDFYPFLKDNREKIEKILTFRIPYYVGPLARGNSRFAWMTRKSEETITPWNFEEVVDKGASAQSFIERMTNFDKNLPNEKVLPKHSLLYEYFTVYNELTKVKYVTEGMRKPAFLSGEQKKAIVDLLFKTNRKVTVKQLKEDYFKKIECFDSVEISGVEDRFNASLGTYHDLLKIIKDKDFLDNEENEDILEDIVLTLTLFEDREMIEERLKTYAHLFDDKVMKQLKRRRYTGWGRLSRKLINGIRDKQSGKTILDFLKSDGFANRNFMQLIHDDSLTFKEDIQKAQVSGQGDSLHEHIANLAGSPAIKKGILQTVKVVDELVKVMGRHKPENIVIEMARENQTTQKGQKNSRERMKRIEEGIKELGSQILKEHPVENTQLQNEKLYLYYLQNGRDMYVDQELDINRLSDYDVDHIVPQSFLKDDSIDNKVLTRSDKARGKSDNVPSEEVVKKMKNYWRQLLNAKLITQRKFDNLTKAERGGLSELDKAGFIKRQLVETRQITKHVAQILDSRMNTKYDENDKLIREVKVITLKSKLVSDFRKDFQFYKVREINNYHHAHDAYLNAVVGTALIKKYPKLESEFVYGDYKVYDVRKMIAKSEQEIGKATAKYFFYSNIMNFFKTEITLANGEIRKRPLIETNGETGEIVWDKGRDFATVRKVLSMPQVNIVKKTEVQTGGFSKESILPKRNSDKLIARKKDWDPKKYGGFDSPTVAYSVLVVAKVEKGKSKKLKSVKELLGITIMERSSFEKNPIDFLEAKGYKEVKKDLIIKLPKYSLFELENGRKRMLASAGELQKGNELALPSKYVNFLYLASHYEKLKGSPEDNEQKQLFVEQHKHYLDEIIEQISEFSKRVILADANLDKVLSAYNKHRDKPIREQAENIIHLFTLTNLGAPAAFKYFDTTIDRKRYTSTKEVLDATLIHQSITGLYETRIDLSQLGGDGGGGSGGSGGSGGTLNIEDEYRLHETSKEPDVSLGSTWLSDFPQAWAETGGMGLAVRQAPLIIPLKATSTPVSIKQYPMSQEARLGIKPHIQRLLDQGILVPCQSPWNTPLLPVKKPGTNDYRPVQDLREVNKRVEDIHPTVPNPYNLLSGLPPSHQWYTVLDLKDAFFCLRLHPTSQPLFAFEWRDPEMGISGQLTWTRLPQGFKNSPTLFNEALHRDLAGFRIQHPDLILLQYVDDLLLAATSELDCQQGTRALLQTLGDLGYRASAKKAQICQKQVKYLGYLLKEGQRWLTEARKETVMGQPIPKTPRQLREFLGTAGFCRLWIPGFAEMAAPLYPLTKPGTLFNWGPDQQKAFQEIKQALLTAPALGLPDLTKPFELFVDEKQGYAKGVLTQKLGPWRRPVAYLSKKLDPVAAGWPPCLRMVAAIAVLTKDAGKLTMGQPLVILAPHAVEALVKQPPDRWLSNARMTHYQALLLDTDRVQFGPVVALNPATLLPLPEEGLQHDCLDILAEAHGTRSDLMDQPLPDADHTWYTDGSSFLQEGQRKAGAAVTTETEVIWARALPAGTSAQRAELIALTQALKMAEGKKLNVYTDSRYAFATAHIHGEIYRRRGWLTSEGKEIKNKDEILALLKALFLPKRLSIIHCPGHQKGNSAEARGNRMADQAAREVATRETPETSTLLAGKRTADGSEFEKRTADGSEFESPKKKAKVE

SEQ ID NO: 2275 - protein, 2096 aa, synthetic construct
MPAAKRVKLDGGDKKYSIGLDIGTNSVGWAVITDEYKVPSKKFKVLGNTDRHSIKKNLIGALLFDSGETAEATRLKRTARRRYTRRKNRICYLQEIFSNEMAKVDDSFFHRLEESFLVEEDKKHERHPIFGNIVDEVAYHEKYPTIYHLRKKLVDSTDKADLRLIYLALAHMIKFRGHFLIEGDLNPDNSDVDKLFIQLVQTYNQLFEENPINASGVDAKAILSARLSKSRRLENLIAQLPGEKKNGLFGNLIALSLGLTPNFKSNFDLAEDAKLQLSKDTYDDDLDNLLAQIGDQYADLFLAAKNLSDAILLSDILRVNTEITKAPLSASMIKRYDEHHQDLTLLKALVRQQLPEKYKEIFFDQSKNGYAGYIDGGASQEEFYKFIKPILEKMDGTEELLVKLNREDLLRKQRTFDNGSIPHQIHLGELHAILRRQEDFYPFLKDNREKIEKILTFRIPYYVGPLARGNSRFAWMTRKSEETITPWNFEEVVDKGASAQSFIERMTNFDKNLPNEKVLPKHSLLYEYFTVYNELTKVKYVTEGMRKPAFLSGEQKKAIVDLLFKTNRKVTVKQLKEDYFKKIECFDSVEISGVEDRFNASLGTYHDLLKIIKDKDFLDNEENEDILEDIVLTLTLFEDREMIEERLKTYAHLFDDKVMKQLKRRRYTGWGRLSRKLINGIRDKQSGKTILDFLKSDGFANRNFMQLIHDDSLTFKEDIQKAQVSGQGDSLHEHIANLAGSPAIKKGILQTVKVVDELVKVMGRHKPENIVIEMARENQTTQKGQKNSRERMKRIEEGIKELGSQILKEHPVENTQLQNEKLYLYYLQNGRDMYVDQELDINRLSDYDVDHIVPQSFLKDDSIDNKVLTRSDKARGKSDNVPSEEVVKKMKNYWRQLLNAKLITQRKFDNLTKAERGGLSELDKAGFIKRQLVETRQITKHVAQILDSRMNTKYDENDKLIREVKVITLKSKLVSDFRKDFQFYKVREINNYHHAHDAYLNAVVGTALIKKYPKLESEFVYGDYKVYDVRKMIAKSEQEIGKATAKYFFYSNIMNFFKTEITLANGEIRKRPLIETNGETGEIVWDKGRDFATVRKVLSMPQVNIVKKTEVQTGGFSKESILPKRNSDKLIARKKDWDPKKYGGFDSPTVAYSVLVVAKVEKGKSKKLKSVKELLGITIMERSSFEKNPIDFLEAKGYKEVKKDLIIKLPKYSLFELENGRKRMLASAGELQKGNELALPSKYVNFLYLASHYEKLKGSPEDNEQKQLFVEQHKHYLDEIIEQISEFSKRVILADANLDKVLSAYNKHRDKPIREQAENIIHLFTLTNLGAPAAFKYFDTTIDRKRYTSTKEVLDATLIHQSITGLYETRIDLSQLGGDGGGGGEAAAKGGSGGTLNIEDEYRLHETSKEPDVSLGSTWLSDFPQAWAETGGMGLAVRQAPLIIPLKATSTPVSIKQYPMSQEARLGIKPHIQRLLDQGILVPCQSPWNTPLLPVKKPGTNDYRPVQDLREVNKRVEDIHPTVPNPYNLLSGLPPSHQWYTVLDLKDAFFCLRLHPTSQPLFAFEWRDPEMGISGQLTWTRLPQGFKNSPTLFNEALHRDLAGFRIQHPDLILLQYVDDLLLAATSELDCQQGTRALLQTLGDLGYRASAKKAQICQKQVKYLGYLLKEGQRWLTEARKETVMGQPIPKTPRQLREFLGTAGFCRLWIPGFAEMAAPLYPLTKPGTLFNWGPDQQKAFQEIKQALLTAPALGLPDLTKPFELFVDEKQGYAKGVLTQKLGPWRRPVAYLSKKLDPVAAGWPPCLRMVAAIAVLTKDAGKLTMGQPLVILAPHAVEALVKQPPDRWLSNARMTHYQALLLDTDRVQFGPVVALNPATLLPLPEEGLQHDCLDILAEAHGTRSDLMDQPLPDADHTWYTDGSSFLQEGQRKAGAAVTTETEVIWARALPAGTSAQRAELIALTQALKMAEGKKLNVYTDSRYAFATAHIHGEIYRRRGWLTSEGKEIKNKDEILALLKALFLPKRLSIIHCPGHQKGNSAEARGNRMADQAAREVATRETPETSTLLAGKRTADGSEFEKRTADGSEFESPKKKAKVE

SEQ ID NO: 2276 - protein, 2095 aa, synthetic construct
MPAAKRVKLDGGDKKYSIGLDIGTNSVGWAVITDEYKVPSKKFKVLGNTDRHSIKKNLIGALLFDSGETAEATRLKRTARRRYTRRKNRICYLQEIFSNEMAKVDDSFFHRLEESFLVEEDKKHERHPIFGNIVDEVAYHEKYPTIYHLRKKLVDSTDKADLRLIYLALAHMIKFRGHFLIEGDLNPDNSDVDKLFIQLVQTYNQLFEENPINASGVDAKAILSARLSKSRRLENLIAQLPGEKKNGLFGNLIALSLGLTPNFKSNFDLAEDAKLQLSKDTYDDDLDNLLAQIGDQYADLFLAAKNLSDAILLSDILRVNTEITKAPLSASMIKRYDEHHQDLTLLKALVRQQLPEKYKEIFFDQSKNGYAGYIDGGASQEEFYKFIKPILEKMDGTEELLVKLNREDLLRKQRTFDNGSIPHQIHLGELHAILRRQEDFYPFLKDNREKIEKILTFRIPYYVGPLARGNSRFAWMTRKSEETITPWNFEEVVDKGASAQSFIERMTNFDKNLPNEKVLPKHSLLYEYFTVYNELTKVKYVTEGMRKPAFLSGEQKKAIVDLLFKTNRKVTVKQLKEDYFKKIECFDSVEISGVEDRFNASLGTYHDLLKIIKDKDFLDNEENEDILEDIVLTLTLFEDREMIEERLKTYAHLFDDKVMKQLKRRRYTGWGRLSRKLINGIRDKQSGKTILDFLKSDGFANRNFMQLIHDDSLTFKEDIQKAQVSGQGDSLHEHIANLAGSPAIKKGILQTVKVVDELVKVMGRHKPENIVIEMARENQTTQKGQKNSRERMKRIEEGIKELGSQILKEHPVENTQLQNEKLYLYYLQNGRDMYVDQELDINRLSDYDVDHIVPQSFLKDDSIDNKVLTRSDKARGKSDNVPSEEVVKKMKNYWRQLLNAKLITQRKFDNLTKAERGGLSELDKAGFIKRQLVETRQITKHVAQILDSRMNTKYDENDKLIREVKVITLKSKLVSDFRKDFQFYKVREINNYHHAHDAYLNAVVGTALIKKYPKLESEFVYGDYKVYDVRKMIAKSEQEIGKATAKYFFYSNIMNFFKTEITLANGEIRKRPLIETNGETGEIVWDKGRDFATVRKVLSMPQVNIVKKTEVQTGGFSKESILPKRNSDKLIARKKDWDPKKYGGFDSPTVAYSVLVVAKVEKGKSKKLKSVKELLGITIMERSSFEKNPIDFLEAKGYKEVKKDLIIKLPKYSLFELENGRKRMLASAGELQKGNELALPSKYVNFLYLASHYEKLKGSPEDNEQKQLFVEQHKHYLDEIIEQISEFSKRVILADANLDKVLSAYNKHRDKPIREQAENIIHLFTLTNLGAPAAFKYFDTTIDRKRYTSTKEVLDATLIHQSITGLYETRIDLSQLGGDGGGGGGSGGGGSGGTLNIEDEYRLHETSKEPDVSLGSTWLSDFPQAWAETGGMGLAVRQAPLIIPLKATSTPVSIKQYPMSQEARLGIKPHIQRLLDQGILVPCQSPWNTPLLPVKKPGTNDYRPVQDLREVNKRVEDIHPTVPNPYNLLSGLPPSHQWYTVLDLKDAFFCLRLHPTSQPLFAFEWRDPEMGISGQLTWTRLPQGFKNSPTLFNEALHRDLAGFRIQHPDLILLQYVDDLLLAATSELDCQQGTRALLQTLGDLGYRASAKKAQICQKQVKYLGYLLKEGQRWLTEARKETVMGQPIPKTPRQLREFLGTAGFCRLWIPGFAEMAAPLYPLTKPGTLFNWGPDQQKAFQEIKQALLTAPALGLPDLTKPFELFVDEKQGYAKGVLTQKLGPWRRPVAYLSKKLDPVAAGWPPCLRMVAAIAVLTKDAGKLTMGQPLVILAPHAVEALVKQPPDRWLSNARMTHYQALLLDTDRVQFGPVVALNPATLLPLPEEGLQHDCLDILAEAHGTRSDLMDQPLPDADHTWYTDGSSFLQEGQRKAGAAVTTETEVIWARALPAGTSAQRAELIALTQALKMAEGKKLNVYTDSRYAFATAHIHGEIYRRRGWLTSEGKEIKNKDEILALLKALFLPKRLSIIHCPGHQKGNSAEARGNRMADQAAREVATRETPETSTLLAGKRTADGSEFEKRTADGSEFESPKKKAKVE

SEQ ID NO: 2277 - protein, 2096 aa, synthetic construct
MPAAKRVKLDGGDKKYSIGLDIGTNSVGWAVITDEYKVPSKKFKVLGNTDRHSIKKNLIGALLFDSGETAEATRLKRTARRRYTRRKNRICYLQEIFSNEMAKVDDSFFHRLEESFLVEEDKKHERHPIFGNIVDEVAYHEKYPTIYHLRKKLVDSTDKADLRLIYLALAHMIKFRGHFLIEGDLNPDNSDVDKLFIQLVQTYNQLFEENPINASGVDAKAILSARLSKSRRLENLIAQLPGEKKNGLFGNLIALSLGLTPNFKSNFDLAEDAKLQLSKDTYDDDLDNLLAQIGDQYADLFLAAKNLSDAILLSDILRVNTEITKAPLSASMIKRYDEHHQDLTLLKALVRQQLPEKYKEIFFDQSKNGYAGYIDGGASQEEFYKFIKPILEKMDGTEELLVKLNREDLLRKQRTFDNGSIPHQIHLGELHAILRRQEDFYPFLKDNREKIEKILTFRIPYYVGPLARGNSRFAWMTRKSEETITPWNFEEVVDKGASAQSFIERMTNFDKNLPNEKVLPKHSLLYEYFTVYNELTKVKYVTEGMRKPAFLSGEQKKAIVDLLFKTNRKVTVKQLKEDYFKKIECFDSVEISGVEDRFNASLGTYHDLLKIIKDKDFLDNEENEDILEDIVLTLTLFEDREMIEERLKTYAHLFDDKVMKQLKRRRYTGWGRLSRKLINGIRDKQSGKTILDFLKSDGFANRNFMQLIHDDSLTFKEDIQKAQVSGQGDSLHEHIANLAGSPAIKKGILQTVKVVDELVKVMGRHKPENIVIEMARENQTTQKGQKNSRERMKRIEEGIKELGSQILKEHPVENTQLQNEKLYLYYLQNGRDMYVDQELDINRLSDYDVDHIVPQSFLKDDSIDNKVLTRSDKARGKSDNVPSEEVVKKMKNYWRQLLNAKLITQRKFDNLTKAERGGLSELDKAGFIKRQLVETRQITKHVAQILDSRMNTKYDENDKLIREVKVITLKSKLVSDFRKDFQFYKVREINNYHHAHDAYLNAVVGTALIKKYPKLESEFVYGDYKVYDVRKMIAKSEQEIGKATAKYFFYSNIMNFFKTEITLANGEIRKRPLIETNGETGEIVWDKGRDFATVRKVLSMPQVNIVKKTEVQTGGFSKESILPKRNSDKLIARKKDWDPKKYGGFDSPTVAYSVLVVAKVEKGKSKKLKSVKELLGITIMERSSFEKNPIDFLEAKGYKEVKKDLIIKLPKYSLFELENGRKRMLASAGELQKGNELALPSKYVNFLYLASHYEKLKGSPEDNEQKQLFVEQHKHYLDEIIEQISEFSKRVILADANLDKVLSAYNKHRDKPIREQAENIIHLFTLTNLGAPAAFKYFDTTIDRKRYTSTKEVLDATLIHQSITGLYETRIDLSQLGGDGGEAAAKPAPGGSGGTLNIEDEYRLHETSKEPDVSLGSTWLSDFPQAWAETGGMGLAVRQAPLIIPLKATSTPVSIKQYPMSQEARLGIKPHIQRLLDQGILVPCQSPWNTPLLPVKKPGTNDYRPVQDLREVNKRVEDIHPTVPNPYNLLSGLPPSHQWYTVLDLKDAFFCLRLHPTSQPLFAFEWRDPEMGISGQLTWTRLPQGFKNSPTLFNEALHRDLAGFRIQHPDLILLQYVDDLLLAATSELDCQQGTRALLQTLGDLGYRASAKKAQICQKQVKYLGYLLKEGQRWLTEARKETVMGQPIPKTPRQLREFLGTAGFCRLWIPGFAEMAAPLYPLTKPGTLFNWGPDQQKAFQEIKQALLTAPALGLPDLTKPFELFVDEKQGYAKGVLTQKLGPWRRPVAYLSKKLDPVAAGWPPCLRMVAAIAVLTKDAGKLTMGQPLVILAPHAVEALVKQPPDRWLSNARMTHYQALLLDTDRVQFGPVVALNPATLLPLPEEGLQHDCLDILAEAHGTRSDLMDQPLPDADHTWYTDGSSFLQEGQRKAGAAVTTETEVIWARALPAGTSAQRAELIALTQALKMAEGKKLNVYTDSRYAFATAHIHGEIYRRRGWLTSEGKEIKNKDEILALLKALFLPKRLSIIHCPGHQKGNSAEARGNRMADQAAREVATRETPETSTLLAGKRTADGSEFEKRTADGSEFESPKKKAKVE

SEQ ID NO: 2278 - protein, 2096 aa, synthetic construct
MPAAKRVKLDGGDKKYSIGLDIGTNSVGWAVITDEYKVPSKKFKVLGNTDRHSIKKNLIGALLFDSGETAEATRLKRTARRRYTRRKNRICYLQEIFSNEMAKVDDSFFHRLEESFLVEEDKKHERHPIFGNIVDEVAYHEKYPTIYHLRKKLVDSTDKADLRLIYLALAHMIKFRGHFLIEGDLNPDNSDVDKLFIQLVQTYNQLFEENPINASGVDAKAILSARLSKSRRLENLIAQLPGEKKNGLFGNLIALSLGLTPNFKSNFDLAEDAKLQLSKDTYDDDLDNLLAQIGDQYADLFLAAKNLSDAILLSDILRVNTEITKAPLSASMIKRYDEHHQDLTLLKALVRQQLPEKYKEIFFDQSKNGYAGYIDGGASQEEFYKFIKPILEKMDGTEELLVKLNREDLLRKQRTFDNGSIPHQIHLGELHAILRRQEDFYPFLKDNREKIEKILTFRIPYYVGPLARGNSRFAWMTRKSEETITPWNFEEVVDKGASAQSFIERMTNFDKNLPNEKVLPKHSLLYEYFTVYNELTKVKYVTEGMRKPAFLSGEQKKAIVDLLFKTNRKVTVKQLKEDYFKKIECFDSVEISGVEDRFNASLGTYHDLLKIIKDKDFLDNEENEDILEDIVLTLTLFEDREMIEERLKTYAHLFDDKVMKQLKRRRYTGWGRLSRKLINGIRDKQSGKTILDFLKSDGFANRNFMQLIHDDSLTFKEDIQKAQVSGQGDSLHEHIANLAGSPAIKKGILQTVKVVDELVKVMGRHKPENIVIEMARENQTTQKGQKNSRERMKRIEEGIKELGSQILKEHPVENTQLQNEKLYLYYLQNGRDMYVDQELDINRLSDYDVDHIVPQSFLKDDSIDNKVLTRSDKARGKSDNVPSEEVVKKMKNYWRQLLNAKLITQRKFDNLTKAERGGLSELDKAGFIKRQLVETRQITKHVAQILDSRMNTKYDENDKLIREVKVITLKSKLVSDFRKDFQFYKVREINNYHHAHDAYLNAVVGTALIKKYPKLESEFVYGDYKVYDVRKMIAKSEQEIGKATAKYFFYSNIMNFFKTEITLANGEIRKRPLIETNGETGEIVWDKGRDFATVRKVLSMPQVNIVKKTEVQTGGFSKESILPKRNSDKLIARKKDWDPKKYGGFDSPTVAYSVLVVAKVEKGKSKKLKSVKELLGITIMERSSFEKNPIDFLEAKGYKEVKKDLIIKLPKYSLFELENGRKRMLASAGELQKGNELALPSKYVNFLYLASHYEKLKGSPEDNEQKQLFVEQHKHYLDEIIEQISEFSKRVILADANLDKVLSAYNKHRDKPIREQAENIIHLFTLTNLGAPAAFKYFDTTIDRKRYTSTKEVLDATLIHQSITGLYETRIDLSQLGGDGGEAAAKGGGPAPGGTLNIEDEYRLHETSKEPDVSLGSTWLSDFPQAWAETGGMGLAVRQAPLIIPLKATSTPVSIKQYPMSQEARLGIKPHIQRLLDQGILVPCQSPWNTPLLPVKKPGTNDYRPVQDLREVNKRVEDIHPTVPNPYNLLSGLPPSHQWYTVLDLKDAFFCLRLHPTSQPLFAFEWRDPEMGISGQLTWTRLPQGFKNSPTLFNEALHRDLAGFRIQHPDLILLQYVDDLLLAATSELDCQQGTRALLQTLGDLGYRASAKKAQICQKQVKYLGYLLKEGQRWLTEARKETVMGQPIPKTPRQLREFLGTAGFCRLWIPGFAEMAAPLYPLTKPGTLFNWGPDQQKAFQEIKQALLTAPALGLPDLTKPFELFVDEKQGYAKGVLTQKLGPWRRPVAYLSKKLDPVAAGWPPCLRMVAAIAVLTKDAGKLTMGQPLVILAPHAVEALVKQPPDRWLSNARMTHYQALLLDTDRVQFGPVVALNPATLLPLPEEGLQHDCLDILAEAHGTRSDLMDQPLPDADHTWYTDGSSFLQEGQRKAGAAVTTETEVIWARALPAGTSAQRAELIALTQALKMAEGKKLNVYTDSRYAFATAHIHGEIYRRRGWLTSEGKEIKNKDEILALLKALFLPKRLSIIHCPGHQKGNSAEARGNRMADQAAREVATRETPETSTLLAGKRTADGSEFEKRTADGSEFESPKKKAKVE

SEQ ID NO: 2279 - protein, 2096 aa, synthetic construct
MPAAKRVKLDGGDKKYSIGLDIGTNSVGWAVITDEYKVPSKKFKVLGNTDRHSIKKNLIGALLFDSGETAEATRLKRTARRRYTRRKNRICYLQEIFSNEMAKVDDSFFHRLEESFLVEEDKKHERHPIFGNIVDEVAYHEKYPTIYHLRKKLVDSTDKADLRLIYLALAHMIKFRGHFLIEGDLNPDNSDVDKLFIQLVQTYNQLFEENPINASGVDAKAILSARLSKSRRLENLIAQLPGEKKNGLFGNLIALSLGLTPNFKSNFDLAEDAKLQLSKDTYDDDLDNLLAQIGDQYADLFLAAKNLSDAILLSDILRVNTEITKAPLSASMIKRYDEHHQDLTLLKALVRQQLPEKYKEIFFDQSKNGYAGYIDGGASQEEFYKFIKPILEKMDGTEELLVKLNREDLLRKQRTFDNGSIPHQIHLGELHAILRRQEDFYPFLKDNREKIEKILTFRIPYYVGPLARGNSRFAWMTRKSEETITPWNFEEVVDKGASAQSFIERMTNFDKNLPNEKVLPKHSLLYEYFTVYNELTKVKYVTEGMRKPAFLSGEQKKAIVDLLFKTNRKVTVKQLKEDYFKKIECFDSVEISGVEDRFNASLGTYHDLLKIIKDKDFLDNEENEDILEDIVLTLTLFEDREMIEERLKTYAHLFDDKVMKQLKRRRYTGWGRLSRKLINGIRDKQSGKTILDFLKSDGFANRNFMQLIHDDSLTFKEDIQKAQVSGQGDSLHEHIANLAGSPAIKKGILQTVKVVDELVKVMGRHKPENIVIEMARENQTTQKGQKNSRERMKRIEEGIKELGSQILKEHPVENTQLQNEKLYLYYLQNGRDMYVDQELDINRLSDYDVDHIVPQSFLKDDSIDNKVLTRSDKARGKSDNVPSEEVVKKMKNYWRQLLNAKLITQRKFDNLTKAERGGLSELDKAGFIKRQLVETRQITKHVAQILDSRMNTKYDENDKLIREVKVITLKSKLVSDFRKDFQFYKVREINNYHHAHDAYLNAVVGTALIKKYPKLESEFVYGDYKVYDVRKMIAKSEQEIGKATAKYFFYSNIMNFFKTEITLANGEIRKRPLIETNGETGEIVWDKGRDFATVRKVLSMPQVNIVKKTEVQTGGFSKESILPKRNSDKLIARKKDWDPKKYGGFDSPTVAYSVLVVAKVEKGKSKKLKSVKELLGITIMERSSFEKNPIDFLEAKGYKEVKKDLIIKLPKYSLFELENGRKRMLASAGELQKGNELALPSKYVNFLYLASHYEKLKGSPEDNEQKQLFVEQHKHYLDEIIEQISEFSKRVILADANLDKVLSAYNKHRDKPIREQAENIIHLFTLTNLGAPAAFKYFDTTIDRKRYTSTKEVLDATLIHQSITGLYETRIDLSQLGGDGGGGGEAAAKPAPGGTLNIEDEYRLHETSKEPDVSLGSTWLSDFPQAWAETGGMGLAVRQAPLIIPLKATSTPVSIKQYPMSQEARLGIKPHIQRLLDQGILVPCQSPWNTPLLPVKKPGTNDYRPVQDLREVNKRVEDIHPTVPNPYNLLSGLPPSHQWYTVLDLKDAFFCLRLHPTSQPLFAFEWRDPEMGISGQLTWTRLPQGFKNSPTLFNEALHRDLAGFRIQHPDLILLQYVDDLLLAATSELDCQQGTRALLQTLGDLGYRASAKKAQICQKQVKYLGYLLKEGQRWLTEARKETVMGQPIPKTPRQLREFLGTAGFCRLWIPGFAEMAAPLYPLTKPGTLFNWGPDQQKAFQEIKQALLTAPALGLPDLTKPFELFVDEKQGYAKGVLTQKLGPWRRPVAYLSKKLDPVAAGWPPCLRMVAAIAVLTKDAGKLTMGQPLVILAPHAVEALVKQPPDRWLSNARMTHYQALLLDTDRVQFGPVVALNPATLLPLPEEGLQHDCLDILAEAHGTRSDLMDQPLPDADHTWYTDGSSFLQEGQRKAGAAVTTETEVIWARALPAGTSAQRAELIALTQALKMAEGKKLNVYTDSRYAFATAHIHGEIYRRRGWLTSEGKEIKNKDEILALLKALFLPKRLSIIHCPGHQKGNSAEARGNRMADQAAREVATRETPETSTLLAGKRTADGSEFEKRTADGSEFESPKKKAKVE

SEQ ID NO: 2280 - protein, 2100 aa, synthetic construct
MPAAKRVKLDGGDKKYSIGLDIGTNSVGWAVITDEYKVPSKKFKVLGNTDRHSIKKNLIGALLFDSGETAEATRLKRTARRRYTRRKNRICYLQEIFSNEMAKVDDSFFHRLEESFLVEEDKKHERHPIFGNIVDEVAYHEKYPTIYHLRKKLVDSTDKADLRLIYLALAHMIKFRGHFLIEGDLNPDNSDVDKLFIQLVQTYNQLFEENPINASGVDAKAILSARLSKSRRLENLIAQLPGEKKNGLFGNLIALSLGLTPNFKSNFDLAEDAKLQLSKDTYDDDLDNLLAQIGDQYADLFLAAKNLSDAILLSDILRVNTEITKAPLSASMIKRYDEHHQDLTLLKALVRQQLPEKYKEIFFDQSKNGYAGYIDGGASQEEFYKFIKPILEKMDGTEELLVKLNREDLLRKQRTFDNGSIPHQIHLGELHAILRRQEDFYPFLKDNREKIEKILTFRIPYYVGPLARGNSRFAWMTRKSEETITPWNFEEVVDKGASAQSFIERMTNFDKNLPNEKVLPKHSLLYEYFTVYNELTKVKYVTEGMRKPAFLSGEQKKAIVDLLFKTNRKVTVKQLKEDYFKKIECFDSVEISGVEDRFNASLGTYHDLLKIIKDKDFLDNEENEDILEDIVLTLTLFEDREMIEERLKTYAHLFDDKVMKQLKRRRYTGWGRLSRKLINGIRDKQSGKTILDFLKSDGFANRNFMQLIHDDSLTFKEDIQKAQVSGQGDSLHEHIANLAGSPAIKKGILQTVKVVDELVKVMGRHKPENIVIEMARENQTTQKGQKNSRERMKRIEEGIKELGSQILKEHPVENTQLQNEKLYLYYLQNGRDMYVDQELDINRLSDYDVDHIVPQSFLKDDSIDNKVLTRSDKARGKSDNVPSEEVVKKMKNYWRQLLNAKLITQRKFDNLTKAERGGLSELDKAGFIKRQLVETRQITKHVAQILDSRMNTKYDENDKLIREVKVITLKSKLVSDFRKDFQFYKVREINNYHHAHDAYLNAVVGTALIKKYPKLESEFVYGDYKVYDVRKMIAKSEQEIGKATAKYFFYSNIMNFFKTEITLANGEIRKRPLIETNGETGEIVWDKGRDFATVRKVLSMPQVNIVKKTEVQTGGFSKESILPKRNSDKLIARKKDWDPKKYGGFDSPTVAYSVLVVAKVEKGKSKKLKSVKELLGITIMERSSFEKNPIDFLEAKGYKEVKKDLIIKLPKYSLFELENGRKRMLASAGELQKGNELALPSKYVNFLYLASHYEKLKGSPEDNEQKQLFVEQHKHYLDEIIEQISEFSKRVILADANLDKVLSAYNKHRDKPIREQAENIIHLFTLTNLGAPAAFKYFDTTIDRKRYTSTKEVLDATLIHQSITGLYETRIDLSQLGGDGGGSSGSSGSSGSSGSSGGTLNIEDEYRLHETSKEPDVSLGSTWLSDFPQAWAETGGMGLAVRQAPLIIPLKATSTPVSIKQYPMSQEARLGIKPHIQRLLDQGILVPCQSPWNTPLLPVKKPGTNDYRPVQDLREVNKRVEDIHPTVPNPYNLLSGLPPSHQWYTVLDLKDAFFCLRLHPTSQPLFAFEWRDPEMGISGQLTWTRLPQGFKNSPTLFNEALHRDLAGFRIQHPDLILLQYVDDLLLAATSELDCQQGTRALLQTLGDLGYRASAKKAQICQKQVKYLGYLLKEGQRWLTEARKETVMGQPIPKTPRQLREFLGTAGFCRLWIPGFAEMAAPLYPLTKPGTLFNWGPDQQKAFQEIKQALLTAPALGLPDLTKPFELFVDEKQGYAKGVLTQKLGPWRRPVAYLSKKLDPVAAGWPPCLRMVAAIAVLTKDAGKLTMGQPLVILAPHAVEALVKQPPDRWLSNARMTHYQALLLDTDRVQFGPVVALNPATLLPLPEEGLQHDCLDILAEAHGTRSDLMDQPLPDADHTWYTDGSSFLQEGQRKAGAAVTTETEVIWARALPAGTSAQRAELIALTQALKMAEGKKLNVYTDSRYAFATAHIHGEIYRRRGWLTSEGKEIKNKDEILALLKALFLPKRLSIIHCPGHQKGNSAEARGNRMADQAAREVATRETPETSTLLAGKRTADGSEFEKRTADGSEFESPKKKAKVE

SEQ ID NO: 2281 - protein, 2093 aa, synthetic construct
MPAAKRVKLDGGDKKYSIGLDIGTNSVGWAVITDEYKVPSKKFKVLGNTDRHSIKKNLIGALLFDSGETAEATRLKRTARRRYTRRKNRICYLQEIFSNEMAKVDDSFFHRLEESFLVEEDKKHERHPIFGNIVDEVAYHEKYPTIYHLRKKLVDSTDKADLRLIYLALAHMIKFRGHFLIEGDLNPDNSDVDKLFIQLVQTYNQLFEENPINASGVDAKAILSARLSKSRRLENLIAQLPGEKKNGLFGNLIALSLGLTPNFKSNFDLAEDAKLQLSKDTYDDDLDNLLAQIGDQYADLFLAAKNLSDAILLSDILRVNTEITKAPLSASMIKRYDEHHQDLTLLKALVRQQLPEKYKEIFFDQSKNGYAGYIDGGASQEEFYKFIKPILEKMDGTEELLVKLNREDLLRKQRTFDNGSIPHQIHLGELHAILRRQEDFYPFLKDNREKIEKILTFRIPYYVGPLARGNSRFAWMTRKSEETITPWNFEEVVDKGASAQSFIERMTNFDKNLPNEKVLPKHSLLYEYFTVYNELTKVKYVTEGMRKPAFLSGEQKKAIVDLLFKTNRKVTVKQLKEDYFKKIECFDSVEISGVEDRFNASLGTYHDLLKIIKDKDFLDNEENEDILEDIVLTLTLFEDREMIEERLKTYAHLFDDKVMKQLKRRRYTGWGRLSRKLINGIRDKQSGKTILDFLKSDGFANRNFMQLIHDDSLTFKEDIQKAQVSGQGDSLHEHIANLAGSPAIKKGILQTVKVVDELVKVMGRHKPENIVIEMARENQTTQKGQKNSRERMKRIEEGIKELGSQILKEHPVENTQLQNEKLYLYYLQNGRDMYVDQELDINRLSDYDVDHIVPQSFLKDDSIDNKVLTRSDKARGKSDNVPSEEVVKKMKNYWRQLLNAKLITQRKFDNLTKAERGGLSELDKAGFIKRQLVETRQITKHVAQILDSRMNTKYDENDKLIREVKVITLKSKLVSDFRKDFQFYKVREINNYHHAHDAYLNAVVGTALIKKYPKLESEFVYGDYKVYDVRKMIAKSEQEIGKATAKYFFYSNIMNFFKTEITLANGEIRKRPLIETNGETGEIVWDKGRDFATVRKVLSMPQVNIVKKTEVQTGGFSKESILPKRNSDKLIARKKDWDPKKYGGFDSPTVAYSVLVVAKVEKGKSKKLKSVKELLGITIMERSSFEKNPIDFLEAKGYKEVKKDLIIKLPKYSLFELENGRKRMLASAGELQKGNELALPSKYVNFLYLASHYEKLKGSPEDNEQKQLFVEQHKHYLDEIIEQISEFSKRVILADANLDKVLSAYNKHRDKPIREQAENIIHLFTLTNLGAPAAFKYFDTTIDRKRYTSTKEVLDATLIHQSITGLYETRIDLSQLGGDGGEAAAKGGGGGTLNIEDEYRLHETSKEPDVSLGSTWLSDFPQAWAETGGMGLAVRQAPLIIPLKATSTPVSIKQYPMSQEARLGIKPHIQRLLDQGILVPCQSPWNTPLLPVKKPGTNDYRPVQDLREVNKRVEDIHPTVPNPYNLLSGLPPSHQWYTVLDLKDAFFCLRLHPTSQPLFAFEWRDPEMGISGQLTWTRLPQGFKNSPTLFNEALHRDLAGFRIQHPDLILLQYVDDLLLAATSELDCQQGTRALLQTLGDLGYRASAKKAQICQKQVKYLGYLLKEGQRWLTEARKETVMGQPIPKTPRQLREFLGTAGFCRLWIPGFAEMAAPLYPLTKPGTLFNWGPDQQKAFQEIKQALLTAPALGLPDLTKPFELFVDEKQGYAKGVLTQKLGPWRRPVAYLSKKLDPVAAGWPPCLRMVAAIAVLTKDAGKLTMGQPLVILAPHAVEALVKQPPDRWLSNARMTHYQALLLDTDRVQFGPVVALNPATLLPLPEEGLQHDCLDILAEAHGTRSDLMDQPLPDADHTWYTDGSSFLQEGQRKAGAAVTTETEVIWARALPAGTSAQRAELIALTQALKMAEGKKLNVYTDSRYAFATAHIHGEIYRRRGWLTSEGKEIKNKDEILALLKALFLPKRLSIIHCPGHQKGNSAEARGNRMADQAAREVATRETPETSTLLAGKRTADGSEFEKRTADGSEFESPKKKAKVE

SEQ ID NO: 2282 - protein, 2096 aa, synthetic construct
MPAAKRVKLDGGDKKYSIGLDIGTNSVGWAVITDEYKVPSKKFKVLGNTDRHSIKKNLIGALLFDSGETAEATRLKRTARRRYTRRKNRICYLQEIFSNEMAKVDDSFFHRLEESFLVEEDKKHERHPIFGNIVDEVAYHEKYPTIYHLRKKLVDSTDKADLRLIYLALAHMIKFRGHFLIEGDLNPDNSDVDKLFIQLVQTYNQLFEENPINASGVDAKAILSARLSKSRRLENLIAQLPGEKKNGLFGNLIALSLGLTPNFKSNFDLAEDAKLQLSKDTYDDDLDNLLAQIGDQYADLFLAAKNLSDAILLSDILRVNTEITKAPLSASMIKRYDEHHQDLTLLKALVRQQLPEKYKEIFFDQSKNGYAGYIDGGASQEEFYKFIKPILEKMDGTEELLVKLNREDLLRKQRTFDNGSIPHQIHLGELHAILRRQEDFYPFLKDNREKIEKILTFRIPYYVGPLARGNSRFAWMTRKSEETITPWNFEEVVDKGASAQSFIERMTNFDKNLPNEKVLPKHSLLYEYFTVYNELTKVKYVTEGMRKPAFLSGEQKKAIVDLLFKTNRKVTVKQLKEDYFKKIECFDSVEISGVEDRFNASLGTYHDLLKIIKDKDFLDNEENEDILEDIVLTLTLFEDREMIEERLKTYAHLFDDKVMKQLKRRRYTGWGRLSRKLINGIRDKQSGKTILDFLKSDGFANRNFMQLIHDDSLTFKEDIQKAQVSGQGDSLHEHIANLAGSPAIKKGILQTVKVVDELVKVMGRHKPENIVIEMARENQTTQKGQKNSRERMKRIEEGIKELGSQILKEHPVENTQLQNEKLYLYYLQNGRDMYVDQELDINRLSDYDVDHIVPQSFLKDDSIDNKVLTRSDKARGKSDNVPSEEVVKKMKNYWRQLLNAKLITQRKFDNLTKAERGGLSELDKAGFIKRQLVETRQITKHVAQILDSRMNTKYDENDKLIREVKVITLKSKLVSDFRKDFQFYKVREINNYHHAHDAYLNAVVGTALIKKYPKLESEFVYGDYKVYDVRKMIAKSEQEIGKATAKYFFYSNIMNFFKTEITLANGEIRKRPLIETNGETGEIVWDKGRDFATVRKVLSMPQVNIVKKTEVQTGGFSKESILPKRNSDKLIARKKDWDPKKYGGFDSPTVAYSVLVVAKVEKGKSKKLKSVKELLGITIMERSSFEKNPIDFLEAKGYKEVKKDLIIKLPKYSLFELENGRKRMLASAGELQKGNELALPSKYVNFLYLASHYEKLKGSPEDNEQKQLFVEQHKHYLDEIIEQISEFSKRVILADANLDKVLSAYNKHRDKPIREQAENIIHLFTLTNLGAPAAFKYFDTTIDRKRYTSTKEVLDATLIHQSITGLYETRIDLSQLGGDGGGSSPAPEAAAKGGTLNIEDEYRLHETSKEPDVSLGSTWLSDFPQAWAETGGMGLAVRQAPLIIPLKATSTPVSIKQYPMSQEARLGIKPHIQRLLDQGILVPCQSPWNTPLLPVKKPGTNDYRPVQDLREVNKRVEDIHPTVPNPYNLLSGLPPSHQWYTVLDLKDAFFCLRLHPTSQPLFAFEWRDPEMGISGQLTWTRLPQGFKNSPTLFNEALHRDLAGFRIQHPDLILLQYVDDLLLAATSELDCQQGTRALLQTLGDLGYRASAKKAQICQKQVKYLGYLLKEGQRWLTEARKETVMGQPIPKTPRQLREFLGTAGFCRLWIPGFAEMAAPLYPLTKPGTLFNWGPDQQKAFQEIKQALLTAPALGLPDLTKPFELFVDEKQGYAKGVLTQKLGPWRRPVAYLSKKLDPVAAGWPPCLRMVAAIAVLTKDAGKLTMGQPLVILAPHAVEALVKQPPDRWLSNARMTHYQALLLDTDRVQFGPVVALNPATLLPLPEEGLQHDCLDILAEAHGTRSDLMDQPLPDADHTWYTDGSSFLQEGQRKAGAAVTTETEVIWARALPAGTSAQRAELIALTQALKMAEGKKLNVYTDSRYAFATAHIHGEIYRRRGWLTSEGKEIKNKDEILALLKALFLPKRLSIIHCPGHQKGNSAEARGNRMADQAAREVATRETPETSTLLAGKRTADGSEFEKRTADGSEFESPKKKAKVE

SEQ ID NO: 2283 - protein, 2094 aa, synthetic construct
MPAAKRVKLDGGDKKYSIGLDIGTNSVGWAVITDEYKVPSKKFKVLGNTDRHSIKKNLIGALLFDSGETAEATRLKRTARRRYTRRKNRICYLQEIFSNEMAKVDDSFFHRLEESFLVEEDKKHERHPIFGNIVDEVAYHEKYPTIYHLRKKLVDSTDKADLRLIYLALAHMIKFRGHFLIEGDLNPDNSDVDKLFIQLVQTYNQLFEENPINASGVDAKAILSARLSKSRRLENLIAQLPGEKKNGLFGNLIALSLGLTPNFKSNFDLAEDAKLQLSKDTYDDDLDNLLAQIGDQYADLFLAAKNLSDAILLSDILRVNTEITKAPLSASMIKRYDEHHQDLTLLKALVRQQLPEKYKEIFFDQSKNGYAGYIDGGASQEEFYKFIKPILEKMDGTEELLVKLNREDLLRKQRTFDNGSIPHQIHLGELHAILRRQEDFYPFLKDNREKIEKILTFRIPYYVGPLARGNSRFAWMTRKSEETITPWNFEEVVDKGASAQSFIERMTNFDKNLPNEKVLPKHSLLYEYFTVYNELTKVKYVTEGMRKPAFLSGEQKKAIVDLLFKTNRKVTVKQLKEDYFKKIECFDSVEISGVEDRFNASLGTYHDLLKIIKDKDFLDNEENEDILEDIVLTLTLFEDREMIEERLKTYAHLFDDKVMKQLKRRRYTGWGRLSRKLINGIRDKQSGKTILDFLKSDGFANRNFMQLIHDDSLTFKEDIQKAQVSGQGDSLHEHIANLAGSPAIKKGILQTVKVVDELVKVMGRHKPENIVIEMARENQTTQKGQKNSRERMKRIEEGIKELGSQILKEHPVENTQLQNEKLYLYYLQNGRDMYVDQELDINRLSDYDVDHIVPQSFLKDDSIDNKVLTRSDKARGKSDNVPSEEVVKKMKNYWRQLLNAKLITQRKFDNLTKAERGGLSELDKAGFIKRQLVETRQITKHVAQILDSRMNTKYDENDKLIREVKVITLKSKLVSDFRKDFQFYKVREINNYHHAHDAYLNAVVGTALIKKYPKLESEFVYGDYKVYDVRKMIAKSEQEIGKATAKYFFYSNIMNFFKTEITLANGEIRKRPLIETNGETGEIVWDKGRDFATVRKVLSMPQVNIVKKTEVQTGGFSKESILPKRNSDKLIARKKDWDPKKYGGFDSPTVAYSVLVVAKVEKGKSKKLKSVKELLGITIMERSSFEKNPIDFLEAKGYKEVKKDLIIKLPKYSLFELENGRKRMLASAGELQKGNELALPSKYVNFLYLASHYEKLKGSPEDNEQKQLFVEQHKHYLDEIIEQISEFSKRVILADANLDKVLSAYNKHRDKPIREQAENIIHLFTLTNLGAPAAFKYFDTTIDRKRYTSTKEVLDATLIHQSITGLYETRIDLSQLGGDGGGSSPAPGGGGGTLNIEDEYRLHETSKEPDVSLGSTWLSDFPQAWAETGGMGLAVRQAPLIIPLKATSTPVSIKQYPMSQEARLGIKPHIQRLLDQGILVPCQSPWNTPLLPVKKPGTNDYRPVQDLREVNKRVEDIHPTVPNPYNLLSGLPPSHQWYTVLDLKDAFFCLRLHPTSQPLFAFEWRDPEMGISGQLTWTRLPQGFKNSPTLFNEALHRDLAGFRIQHPDLILLQYVDDLLLAATSELDCQQGTRALLQTLGDLGYRASAKKAQICQKQVKYLGYLLKEGQRWLTEARKETVMGQPIPKTPRQLREFLGTAGFCRLWIPGFAEMAAPLYPLTKPGTLFNWGPDQQKAFQEIKQALLTAPALGLPDLTKPFELFVDEKQGYAKGVLTQKLGPWRRPVAYLSKKLDPVAAGWPPCLRMVAAIAVLTKDAGKLTMGQPLVILAPHAVEALVKQPPDRWLSNARMTHYQALLLDTDRVQFGPVVALNPATLLPLPEEGLQHDCLDILAEAHGTRSDLMDQPLPDADHTWYTDGSSFLQEGQRKAGAAVTTETEVIWARALPAGTSAQRAELIALTQALKMAEGKKLNVYTDSRYAFATAHIHGEIYRRRGWLTSEGKEIKNKDEILALLKALFLPKRLSIIHCPGHQKGNSAEARGNRMADQAAREVATRETPETSTLLAGKRTADGSEFEKRTADGSEFESPKKKAKVE

SEQ ID NO: 2284 - protein, 2090 aa, synthetic construct
MPAAKRVKLDGGDKKYSIGLDIGTNSVGWAVITDEYKVPSKKFKVLGNTDRHSIKKNLIGALLFDSGETAEATRLKRTARRRYTRRKNRICYLQEIFSNEMAKVDDSFFHRLEESFLVEEDKKHERHPIFGNIVDEVAYHEKYPTIYHLRKKLVDSTDKADLRLIYLALAHMIKFRGHFLIEGDLNPDNSDVDKLFIQLVQTYNQLFEENPINASGVDAKAILSARLSKSRRLENLIAQLPGEKKNGLFGNLIALSLGLTPNFKSNFDLAEDAKLQLSKDTYDDDLDNLLAQIGDQYADLFLAAKNLSDAILLSDILRVNTEITKAPLSASMIKRYDEHHQDLTLLKALVRQQLPEKYKEIFFDQSKNGYAGYIDGGASQEEFYKFIKPILEKMDGTEELLVKLNREDLLRKQRTFDNGSIPHQIHLGELHAILRRQEDFYPFLKDNREKIEKILTFRIPYYVGPLARGNSRFAWMTRKSEETITPWNFEEVVDKGASAQSFIERMTNFDKNLPNEKVLPKHSLLYEYFTVYNELTKVKYVTEGMRKPAFLSGEQKKAIVDLLFKTNRKVTVKQLKEDYFKKIECFDSVEISGVEDRFNASLGTYHDLLKIIKDKDFLDNEENEDILEDIVLTLTLFEDREMIEERLKTYAHLFDDKVMKQLKRRRYTGWGRLSRKLINGIRDKQSGKTILDFLKSDGFANRNFMQLIHDDSLTFKEDIQKAQVSGQGDSLHEHIANLAGSPAIKKGILQTVKVVDELVKVMGRHKPENIVIEMARENQTTQKGQKNSRERMKRIEEGIKELGSQILKEHPVENTQLQNEKLYLYYLQNGRDMYVDQELDINRLSDYDVDHIVPQSFLKDDSIDNKVLTRSDKARGKSDNVPSEEVVKKMKNYWRQLLNAKLITQRKFDNLTKAERGGLSELDKAGFIKRQLVETRQITKHVAQILDSRMNTKYDENDKLIREVKVITLKSKLVSDFRKDFQFYKVREINNYHHAHDAYLNAVVGTALIKKYPKLESEFVYGDYKVYDVRKMIAKSEQEIGKATAKYFFYSNIMNFFKTEITLANGEIRKRPLIETNGETGEIVWDKGRDFATVRKVLSMPQVNIVKKTEVQTGGFSKESILPKRNSDKLIARKKDWDPKKYGGFDSPTVAYSVLVVAKVEKGKSKKLKSVKELLGITIMERSSFEKNPIDFLEAKGYKEVKKDLIIKLPKYSLFELENGRKRMLASAGELQKGNELALPSKYVNFLYLASHYEKLKGSPEDNEQKQLFVEQHKHYLDEIIEQISEFSKRVILADANLDKVLSAYNKHRDKPIREQAENIIHLFTLTNLGAPAAFKYFDTTIDRKRYTSTKEVLDATLIHQSITGLYETRIDLSQLGGDGGEAAAKGGTLNIEDEYRLHETSKEPDVSLGSTWLSDFPQAWAETGGMGLAVRQAPLIIPLKATSTPVSIKQYPMSQEARLGIKPHIQRLLDQGILVPCQSPWNTPLLPVKKPGTNDYRPVQDLREVNKRVEDIHPTVPNPYNLLSGLPPSHQWYTVLDLKDAFFCLRLHPTSQPLFAFEWRDPEMGISGQLTWTRLPQGFKNSPTLFNEALHRDLAGFRIQHPDLILLQYVDDLLLAATSELDCQQGTRALLQTLGDLGYRASAKKAQICQKQVKYLGYLLKEGQRWLTEARKETVMGQPIPKTPRQLREFLGTAGFCRLWIPGFAEMAAPLYPLTKPGTLFNWGPDQQKAFQEIKQALLTAPALGLPDLTKPFELFVDEKQGYAKGVLTQKLGPWRRPVAYLSKKLDPVAAGWPPCLRMVAAIAVLTKDAGKLTMGQPLVILAPHAVEALVKQPPDRWLSNARMTHYQALLLDTDRVQFGPVVALNPATLLPLPEEGLQHDCLDILAEAHGTRSDLMDQPLPDADHTWYTDGSSFLQEGQRKAGAAVTTETEVIWARALPAGTSAQRAELIALTQALKMAEGKKLNVYTDSRYAFATAHIHGEIYRRRGWLTSEGKEIKNKDEILALLKALFLPKRLSIIHCPGHQKGNSAEARGNRMADQAAREVATRETPETSTLLAGKRTADGSEFEKRTADGSEFESPKKKAKVE

SEQ ID NO: 2285 - protein, 2091 aa, synthetic construct
MPAAKRVKLDGGDKKYSIGLDIGTNSVGWAVITDEYKVPSKKFKVLGNTDRHSIKKNLIGALLFDSGETAEATRLKRTARRRYTRRKNRICYLQEIFSNEMAKVDDSFFHRLEESFLVEEDKKHERHPIFGNIVDEVAYHEKYPTIYHLRKKLVDSTDKADLRLIYLALAHMIKFRGHFLIEGDLNPDNSDVDKLFIQLVQTYNQLFEENPINASGVDAKAILSARLSKSRRLENLIAQLPGEKKNGLFGNLIALSLGLTPNFKSNFDLAEDAKLQLSKDTYDDDLDNLLAQIGDQYADLFLAAKNLSDAILLSDILRVNTEITKAPLSASMIKRYDEHHQDLTLLKALVRQQLPEKYKEIFFDQSKNGYAGYIDGGASQEEFYKFIKPILEKMDGTEELLVKLNREDLLRKQRTFDNGSIPHQIHLGELHAILRRQEDFYPFLKDNREKIEKILTFRIPYYVGPLARGNSRFAWMTRKSEETITPWNFEEVVDKGASAQSFIERMTNFDKNLPNEKVLPKHSLLYEYFTVYNELTKVKYVTEGMRKPAFLSGEQKKAIVDLLFKTNRKVTVKQLKEDYFKKIECFDSVEISGVEDRFNASLGTYHDLLKIIKDKDFLDNEENEDILEDIVLTLTLFEDREMIEERLKTYAHLFDDKVMKQLKRRRYTGWGRLSRKLINGIRDKQSGKTILDFLKSDGFANRNFMQLIHDDSLTFKEDIQKAQVSGQGDSLHEHIANLAGSPAIKKGILQTVKVVDELVKVMGRHKPENIVIEMARENQTTQKGQKNSRERMKRIEEGIKELGSQILKEHPVENTQLQNEKLYLYYLQNGRDMYVDQELDINRLSDYDVDHIVPQSFLKDDSIDNKVLTRSDKARGKSDNVPSEEVVKKMKNYWRQLLNAKLITQRKFDNLTKAERGGLSELDKAGFIKRQLVETRQITKHVAQILDSRMNTKYDENDKLIREVKVITLKSKLVSDFRKDFQFYKVREINNYHHAHDAYLNAVVGTALIKKYPKLESEFVYGDYKVYDVRKMIAKSEQEIGKATAKYFFYSNIMNFFKTEITLANGEIRKRPLIETNGETGEIVWDKGRDFATVRKVLSMPQVNIVKKTEVQTGGFSKESILPKRNSDKLIARKKDWDPKKYGGFDSPTVAYSVLVVAKVEKGKSKKLKSVKELLGITIMERSSFEKNPIDFLEAKGYKEVKKDLIIKLPKYSLFELENGRKRMLASAGELQKGNELALPSKYVNFLYLASHYEKLKGSPEDNEQKQLFVEQHKHYLDEIIEQISEFSKRVILADANLDKVLSAYNKHRDKPIREQAENIIHLFTLTNLGAPAAFKYFDTTIDRKRYTSTKEVLDATLIHQSITGLYETRIDLSQLGGDGGGSSPAPGGTLNIEDEYRLHETSKEPDVSLGSTWLSDFPQAWAETGGMGLAVRQAPLIIPLKATSTPVSIKQYPMSQEARLGIKPHIQRLLDQGILVPCQSPWNTPLLPVKKPGTNDYRPVQDLREVNKRVEDIHPTVPNPYNLLSGLPPSHQWYTVLDLKDAFFCLRLHPTSQPLFAFEWRDPEMGISGQLTWTRLPQGFKNSPTLFNEALHRDLAGFRIQHPDLILLQYVDDLLLAATSELDCQQGTRALLQTLGDLGYRASAKKAQICQKQVKYLGYLLKEGQRWLTEARKETVMGQPIPKTPRQLREFLGTAGFCRLWIPGFAEMAAPLYPLTKPGTLFNWGPDQQKAFQEIKQALLTAPALGLPDLTKPFELFVDEKQGYAKGVLTQKLGPWRRPVAYLSKKLDPVAAGWPPCLRMVAAIAVLTKDAGKLTMGQPLVILAPHAVEALVKQPPDRWLSNARMTHYQALLLDTDRVQFGPVVALNPATLLPLPEEGLQHDCLDILAEAHGTRSDLMDQPLPDADHTWYTDGSSFLQEGQRKAGAAVTTETEVIWARALPAGTSAQRAELIALTQALKMAEGKKLNVYTDSRYAFATAHIHGEIYRRRGWLTSEGKEIKNKDEILALLKALFLPKRLSIIHCPGHQKGNSAEARGNRMADQAAREVATRETPETSTLLAGKRTADGSEFEKRTADGSEFESPKKKAKVE

SEQ ID NO: 2286 - protein, 2096 aa, synthetic construct
MPAAKRVKLDGGDKKYSIGLDIGTNSVGWAVITDEYKVPSKKFKVLGNTDRHSIKKNLIGALLFDSGETAEATRLKRTARRRYTRRKNRICYLQEIFSNEMAKVDDSFFHRLEESFLVEEDKKHERHPIFGNIVDEVAYHEKYPTIYHLRKKLVDSTDKADLRLIYLALAHMIKFRGHFLIEGDLNPDNSDVDKLFIQLVQTYNQLFEENPINASGVDAKAILSARLSKSRRLENLIAQLPGEKKNGLFGNLIALSLGLTPNFKSNFDLAEDAKLQLSKDTYDDDLDNLLAQIGDQYADLFLAAKNLSDAILLSDILRVNTEITKAPLSASMIKRYDEHHQDLTLLKALVRQQLPEKYKEIFFDQSKNGYAGYIDGGASQEEFYKFIKPILEKMDGTEELLVKLNREDLLRKQRTFDNGSIPHQIHLGELHAILRRQEDFYPFLKDNREKIEKILTFRIPYYVGPLARGNSRFAWMTRKSEETITPWNFEEVVDKGASAQSFIERMTNFDKNLPNEKVLPKHSLLYEYFTVYNELTKVKYVTEGMRKPAFLSGEQKKAIVDLLFKTNRKVTVKQLKEDYFKKIECFDSVEISGVEDRFNASLGTYHDLLKIIKDKDFLDNEENEDILEDIVLTLTLFEDREMIEERLKTYAHLFDDKVMKQLKRRRYTGWGRLSRKLINGIRDKQSGKTILDFLKSDGFANRNFMQLIHDDSLTFKEDIQKAQVSGQGDSLHEHIANLAGSPAIKKGILQTVKVVDELVKVMGRHKPENIVIEMARENQTTQKGQKNSRERMKRIEEGIKELGSQILKEHPVENTQLQNEKLYLYYLQNGRDMYVDQELDINRLSDYDVDHIVPQSFLKDDSIDNKVLTRSDKARGKSDNVPSEEVVKKMKNYWRQLLNAKLITQRKFDNLTKAERGGLSELDKAGFIKRQLVETRQITKHVAQILDSRMNTKYDENDKLIREVKVITLKSKLVSDFRKDFQFYKVREINNYHHAHDAYLNAVVGTALIKKYPKLESEFVYGDYKVYDVRKMIAKSEQEIGKATAKYFFYSNIMNFFKTEITLANGEIRKRPLIETNGETGEIVWDKGRDFATVRKVLSMPQVNIVKKTEVQTGGFSKESILPKRNSDKLIARKKDWDPKKYGGFDSPTVAYSVLVVAKVEKGKSKKLKSVKELLGITIMERSSFEKNPIDFLEAKGYKEVKKDLIIKLPKYSLFELENGRKRMLASAGELQKGNELALPSKYVNFLYLASHYEKLKGSPEDNEQKQLFVEQHKHYLDEIIEQISEFSKRVILADANLDKVLSAYNKHRDKPIREQAENIIHLFTLTNLGAPAAFKYFDTTIDRKRYTSTKEVLDATLIHQSITGLYETRIDLSQLGGDGGGGSPAPEAAAKGGTLNIEDEYRLHETSKEPDVSLGSTWLSDFPQAWAETGGMGLAVRQAPLIIPLKATSTPVSIKQYPMSQEARLGIKPHIQRLLDQGILVPCQSPWNTPLLPVKKPGTNDYRPVQDLREVNKRVEDIHPTVPNPYNLLSGLPPSHQWYTVLDLKDAFFCLRLHPTSQPLFAFEWRDPEMGISGQLTWTRLPQGFKNSPTLFNEALHRDLAGFRIQHPDLILLQYVDDLLLAATSELDCQQGTRALLQTLGDLGYRASAKKAQICQKQVKYLGYLLKEGQRWLTEARKETVMGQPIPKTPRQLREFLGTAGFCRLWIPGFAEMAAPLYPLTKPGTLFNWGPDQQKAFQEIKQALLTAPALGLPDLTKPFELFVDEKQGYAKGVLTQKLGPWRRPVAYLSKKLDPVAAGWPPCLRMVAAIAVLTKDAGKLTMGQPLVILAPHAVEALVKQPPDRWLSNARMTHYQALLLDTDRVQFGPVVALNPATLLPLPEEGLQHDCLDILAEAHGTRSDLMDQPLPDADHTWYTDGSSFLQEGQRKAGAAVTTETEVIWARALPAGTSAQRAELIALTQALKMAEGKKLNVYTDSRYAFATAHIHGEIYRRRGWLTSEGKEIKNKDEILALLKALFLPKRLSIIHCPGHQKGNSAEARGNRMADQAAREVATRETPETSTLLAGKRTADGSEFEKRTADGSEFESPKKKAKVE

SEQ ID NO: 2287 - protein, 2096 aa, synthetic construct
MPAAKRVKLDGGDKKYSIGLDIGTNSVGWAVITDEYKVPSKKFKVLGNTDRHSIKKNLIGALLFDSGETAEATRLKRTARRRYTRRKNRICYLQEIFSNEMAKVDDSFFHRLEESFLVEEDKKHERHPIFGNIVDEVAYHEKYPTIYHLRKKLVDSTDKADLRLIYLALAHMIKFRGHFLIEGDLNPDNSDVDKLFIQLVQTYNQLFEENPINASGVDAKAILSARLSKSRRLENLIAQLPGEKKNGLFGNLIALSLGLTPNFKSNFDLAEDAKLQLSKDTYDDDLDNLLAQIGDQYADLFLAAKNLSDAILLSDILRVNTEITKAPLSASMIKRYDEHHQDLTLLKALVRQQLPEKYKEIFFDQSKNGYAGYIDGGASQEEFYKFIKPILEKMDGTEELLVKLNREDLLRKQRTFDNGSIPHQIHLGELHAILRRQEDFYPFLKDNREKIEKILTFRIPYYVGPLARGNSRFAWMTRKSEETITPWNFEEVVDKGASAQSFIERMTNFDKNLPNEKVLPKHSLLYEYFTVYNELTKVKYVTEGMRKPAFLSGEQKKAIVDLLFKTNRKVTVKQLKEDYFKKIECFDSVEISGVEDRFNASLGTYHDLLKIIKDKDFLDNEENEDILEDIVLTLTLFEDREMIEERLKTYAHLFDDKVMKQLKRRRYTGWGRLSRKLINGIRDKQSGKTILDFLKSDGFANRNFMQLIHDDSLTFKEDIQKAQVSGQGDSLHEHIANLAGSPAIKKGILQTVKVVDELVKVMGRHKPENIVIEMARENQTTQKGQKNSRERMKRIEEGIKELGSQILKEHPVENTQLQNEKLYLYYLQNGRDMYVDQELDINRLSDYDVDHIVPQSFLKDDSIDNKVLTRSDKARGKSDNVPSEEVVKKMKNYWRQLLNAKLITQRKFDNLTKAERGGLSELDKAGFIKRQLVETRQITKHVAQILDSRMNTKYDENDKLIREVKVITLKSKLVSDFRKDFQFYKVREINNYHHAHDAYLNAVVGTALIKKYPKLESEFVYGDYKVYDVRKMIAKSEQEIGKATAKYFFYSNIMNFFKTEITLANGEIRKRPLIETNGETGEIVWDKGRDFATVRKVLSMPQVNIVKKTEVQTGGFSKESILPKRNSDKLIARKKDWDPKKYGGFDSPTVAYSVLVVAKVEKGKSKKLKSVKELLGITIMERSSFEKNPIDFLEAKGYKEVKKDLIIKLPKYSLFELENGRKRMLASAGELQKGNELALPSKYVNFLYLASHYEKLKGSPEDNEQKQLFVEQHKHYLDEIIEQISEFSKRVILADANLDKVLSAYNKHRDKPIREQAENIIHLFTLTNLGAPAAFKYFDTTIDRKRYTSTKEVLDATLIHQSITGLYETRIDLSQLGGDGGGGSEAAAKGGGGGTLNIEDEYRLHETSKEPDVSLGSTWLSDFPQAWAETGGMGLAVRQAPLIIPLKATSTPVSIKQYPMSQEARLGIKPHIQRLLDQGILVPCQSPWNTPLLPVKKPGTNDYRPVQDLREVNKRVEDIHPTVPNPYNLLSGLPPSHQWYTVLDLKDAFFCLRLHPTSQPLFAFEWRDPEMGISGQLTWTRLPQGFKNSPTLFNEALHRDLAGFRIQHPDLILLQYVDDLLLAATSELDCQQGTRALLQTLGDLGYRASAKKAQICQKQVKYLGYLLKEGQRWLTEARKETVMGQPIPKTPRQLREFLGTAGFCRLWIPGFAEMAAPLYPLTKPGTLFNWGPDQQKAFQEIKQALLTAPALGLPDLTKPFELFVDEKQGYAKGVLTQKLGPWRRPVAYLSKKLDPVAAGWPPCLRMVAAIAVLTKDAGKLTMGQPLVILAPHAVEALVKQPPDRWLSNARMTHYQALLLDTDRVQFGPVVALNPATLLPLPEEGLQHDCLDILAEAHGTRSDLMDQPLPDADHTWYTDGSSFLQEGQRKAGAAVTTETEVIWARALPAGTSAQRAELIALTQALKMAEGKKLNVYTDSRYAFATAHIHGEIYRRRGWLTSEGKEIKNKDEILALLKALFLPKRLSIIHCPGHQKGNSAEARGNRMADQAAREVATRETPETSTLLAGKRTADGSEFEKRTADGSEFESPKKKAKVE

SEQ ID NO: 2288 - protein, 2094 aa, synthetic construct
MPAAKRVKLDGGDKKYSIGLDIGTNSVGWAVITDEYKVPSKKFKVLGNTDRHSIKKNLIGALLFDSGETAEATRLKRTARRRYTRRKNRICYLQEIFSNEMAKVDDSFFHRLEESFLVEEDKKHERHPIFGNIVDEVAYHEKYPTIYHLRKKLVDSTDKADLRLIYLALAHMIKFRGHFLIEGDLNPDNSDVDKLFIQLVQTYNQLFEENPINASGVDAKAILSARLSKSRRLENLIAQLPGEKKNGLFGNLIALSLGLTPNFKSNFDLAEDAKLQLSKDTYDDDLDNLLAQIGDQYADLFLAAKNLSDAILLSDILRVNTEITKAPLSASMIKRYDEHHQDLTLLKALVRQQLPEKYKEIFFDQSKNGYAGYIDGGASQEEFYKFIKPILEKMDGTEELLVKLNREDLLRKQRTFDNGSIPHQIHLGELHAILRRQEDFYPFLKDNREKIEKILTFRIPYYVGPLARGNSRFAWMTRKSEETITPWNFEEVVDKGASAQSFIERMTNFDKNLPNEKVLPKHSLLYEYFTVYNELTKVKYVTEGMRKPAFLSGEQKKAIVDLLFKTNRKVTVKQLKEDYFKKIECFDSVEISGVEDRFNASLGTYHDLLKIIKDKDFLDNEENEDILEDIVLTLTLFEDREMIEERLKTYAHLFDDKVMKQLKRRRYTGWGRLSRKLINGIRDKQSGKTILDFLKSDGFANRNFMQLIHDDSLTFKEDIQKAQVSGQGDSLHEHIANLAGSPAIKKGILQTVKVVDELVKVMGRHKPENIVIEMARENQTTQKGQKNSRERMKRIEEGIKELGSQILKEHPVENTQLQNEKLYLYYLQNGRDMYVDQELDINRLSDYDVDHIVPQSFLKDDSIDNKVLTRSDKARGKSDNVPSEEVVKKMKNYWRQLLNAKLITQRKFDNLTKAERGGLSELDKAGFIKRQLVETRQITKHVAQILDSRMNTKYDENDKLIREVKVITLKSKLVSDFRKDFQFYKVREINNYHHAHDAYLNAVVGTALIKKYPKLESEFVYGDYKVYDVRKMIAKSEQEIGKATAKYFFYSNIMNFFKTEITLANGEIRKRPLIETNGETGEIVWDKGRDFATVRKVLSMPQVNIVKKTEVQTGGFSKESILPKRNSDKLIARKKDWDPKKYGGFDSPTVAYSVLVVAKVEKGKSKKLKSVKELLGITIMERSSFEKNPIDFLEAKGYKEVKKDLIIKLPKYSLFELENGRKRMLASAGELQKGNELALPSKYVNFLYLASHYEKLKGSPEDNEQKQLFVEQHKHYLDEIIEQISEFSKRVILADANLDKVLSAYNKHRDKPIREQAENIIHLFTLTNLGAPAAFKYFDTTIDRKRYTSTKEVLDATLIHQSITGLYETRIDLSQLGGDGGGSSPAPGGSGGTLNIEDEYRLHETSKEPDVSLGSTWLSDFPQAWAETGGMGLAVRQAPLIIPLKATSTPVSIKQYPMSQEARLGIKPHIQRLLDQGILVPCQSPWNTPLLPVKKPGTNDYRPVQDLREVNKRVEDIHPTVPNPYNLLSGLPPSHQWYTVLDLKDAFFCLRLHPTSQPLFAFEWRDPEMGISGQLTWTRLPQGFKNSPTLFNEALHRDLAGFRIQHPDLILLQYVDDLLLAATSELDCQQGTRALLQTLGDLGYRASAKKAQICQKQVKYLGYLLKEGQRWLTEARKETVMGQPIPKTPRQLREFLGTAGFCRLWIPGFAEMAAPLYPLTKPGTLFNWGPDQQKAFQEIKQALLTAPALGLPDLTKPFELFVDEKQGYAKGVLTQKLGPWRRPVAYLSKKLDPVAAGWPPCLRMVAAIAVLTKDAGKLTMGQPLVILAPHAVEALVKQPPDRWLSNARMTHYQALLLDTDRVQFGPVVALNPATLLPLPEEGLQHDCLDILAEAHGTRSDLMDQPLPDADHTWYTDGSSFLQEGQRKAGAAVTTETEVIWARALPAGTSAQRAELIALTQALKMAEGKKLNVYTDSRYAFATAHIHGEIYRRRGWLTSEGKEIKNKDEILALLKALFLPKRLSIIHCPGHQKGNSAEARGNRMADQAAREVATRETPETSTLLAGKRTADGSEFEKRTADGSEFESPKKKAKVE

SEQ ID NO: 2289 - protein, 2096 aa, synthetic construct
MPAAKRVKLDGGDKKYSIGLDIGTNSVGWAVITDEYKVPSKKFKVLGNTDRHSIKKNLIGALLFDSGETAEATRLKRTARRRYTRRKNRICYLQEIFSNEMAKVDDSFFHRLEESFLVEEDKKHERHPIFGNIVDEVAYHEKYPTIYHLRKKLVDSTDKADLRLIYLALAHMIKFRGHFLIEGDLNPDNSDVDKLFIQLVQTYNQLFEENPINASGVDAKAILSARLSKSRRLENLIAQLPGEKKNGLFGNLIALSLGLTPNFKSNFDLAEDAKLQLSKDTYDDDLDNLLAQIGDQYADLFLAAKNLSDAILLSDILRVNTEITKAPLSASMIKRYDEHHQDLTLLKALVRQQLPEKYKEIFFDQSKNGYAGYIDGGASQEEFYKFIKPILEKMDGTEELLVKLNREDLLRKQRTFDNGSIPHQIHLGELHAILRRQEDFYPFLKDNREKIEKILTFRIPYYVGPLARGNSRFAWMTRKSEETITPWNFEEVVDKGASAQSFIERMTNFDKNLPNEKVLPKHSLLYEYFTVYNELTKVKYVTEGMRKPAFLSGEQKKAIVDLLFKTNRKVTVKQLKEDYFKKIECFDSVEISGVEDRFNASLGTYHDLLKIIKDKDFLDNEENEDILEDIVLTLTLFEDREMIEERLKTYAHLFDDKVMKQLKRRRYTGWGRLSRKLINGIRDKQSGKTILDFLKSDGFANRNFMQLIHDDSLTFKEDIQKAQVSGQGDSLHEHIANLAGSPAIKKGILQTVKVVDELVKVMGRHKPENIVIEMARENQTTQKGQKNSRERMKRIEEGIKELGSQILKEHPVENTQLQNEKLYLYYLQNGRDMYVDQELDINRLSDYDVDHIVPQSFLKDDSIDNKVLTRSDKARGKSDNVPSEEVVKKMKNYWRQLLNAKLITQRKFDNLTKAERGGLSELDKAGFIKRQLVETRQITKHVAQILDSRMNTKYDENDKLIREVKVITLKSKLVSDFRKDFQFYKVREINNYHHAHDAYLNAVVGTALIKKYPKLESEFVYGDYKVYDVRKMIAKSEQEIGKATAKYFFYSNIMNFFKTEITLANGEIRKRPLIETNGETGEIVWDKGRDFATVRKVLSMPQVNIVKKTEVQTGGFSKESILPKRNSDKLIARKKDWDPKKYGGFDSPTVAYSVLVVAKVEKGKSKKLKSVKELLGITIMERSSFEKNPIDFLEAKGYKEVKKDLIIKLPKYSLFELENGRKRMLASAGELQKGNELALPSKYVNFLYLASHYEKLKGSPEDNEQKQLFVEQHKHYLDEIIEQISEFSKRVILADANLDKVLSAYNKHRDKPIREQAENIIHLFTLTNLGAPAAFKYFDTTIDRKRYTSTKEVLDATLIHQSITGLYETRIDLSQLGGDGGGSSEAAAKGGGGGTLNIEDEYRLHETSKEPDVSLGSTWLSDFPQAWAETGGMGLAVRQAPLIIPLKATSTPVSIKQYPMSQEARLGIKPHIQRLLDQGILVPCQSPWNTPLLPVKKPGTNDYRPVQDLREVNKRVEDIHPTVPNPYNLLSGLPPSHQWYTVLDLKDAFFCLRLHPTSQPLFAFEWRDPEMGISGQLTWTRLPQGFKNSPTLFNEALHRDLAGFRIQHPDLILLQYVDDLLLAATSELDCQQGTRALLQTLGDLGYRASAKKAQICQKQVKYLGYLLKEGQRWLTEARKETVMGQPIPKTPRQLREFLGTAGFCRLWIPGFAEMAAPLYPLTKPGTLFNWGPDQQKAFQEIKQALLTAPALGLPDLTKPFELFVDEKQGYAKGVLTQKLGPWRRPVAYLSKKLDPVAAGWPPCLRMVAAIAVLTKDAGKLTMGQPLVILAPHAVEALVKQPPDRWLSNARMTHYQALLLDTDRVQFGPVVALNPATLLPLPEEGLQHDCLDILAEAHGTRSDLMDQPLPDADHTWYTDGSSFLQEGQRKAGAAVTTETEVIWARALPAGTSAQRAELIALTQALKMAEGKKLNVYTDSRYAFATAHIHGEIYRRRGWLTSEGKEIKNKDEILALLKALFLPKRLSIIHCPGHQKGNSAEARGNRMADQAAREVATRETPETSTLLAGKRTADGSEFEKRTADGSEFESPKKKAKVE

SEQ ID NO: 2290 - protein, 2094 aa, synthetic construct
MPAAKRVKLDGGDKKYSIGLDIGTNSVGWAVITDEYKVPSKKFKVLGNTDRHSIKKNLIGALLFDSGETAEATRLKRTARRRYTRRKNRICYLQEIFSNEMAKVDDSFFHRLEESFLVEEDKKHERHPIFGNIVDEVAYHEKYPTIYHLRKKLVDSTDKADLRLIYLALAHMIKFRGHFLIEGDLNPDNSDVDKLFIQLVQTYNQLFEENPINASGVDAKAILSARLSKSRRLENLIAQLPGEKKNGLFGNLIALSLGLTPNFKSNFDLAEDAKLQLSKDTYDDDLDNLLAQIGDQYADLFLAAKNLSDAILLSDILRVNTEITKAPLSASMIKRYDEHHQDLTLLKALVRQQLPEKYKEIFFDQSKNGYAGYIDGGASQEEFYKFIKPILEKMDGTEELLVKLNREDLLRKQRTFDNGSIPHQIHLGELHAILRRQEDFYPFLKDNREKIEKILTFRIPYYVGPLARGNSRFAWMTRKSEETITPWNFEEVVDKGASAQSFIERMTNFDKNLPNEKVLPKHSLLYEYFTVYNELTKVKYVTEGMRKPAFLSGEQKKAIVDLLFKTNRKVTVKQLKEDYFKKIECFDSVEISGVEDRFNASLGTYHDLLKIIKDKDFLDNEENEDILEDIVLTLTLFEDREMIEERLKTYAHLFDDKVMKQLKRRRYTGWGRLSRKLINGIRDKQSGKTILDFLKSDGFANRNFMQLIHDDSLTFKEDIQKAQVSGQGDSLHEHIANLAGSPAIKKGILQTVKVVDELVKVMGRHKPENIVIEMARENQTTQKGQKNSRERMKRIEEGIKELGSQILKEHPVENTQLQNEKLYLYYLQNGRDMYVDQELDINRLSDYDVDHIVPQSFLKDDSIDNKVLTRSDKARGKSDNVPSEEVVKKMKNYWRQLLNAKLITQRKFDNLTKAERGGLSELDKAGFIKRQLVETRQITKHVAQILDSRMNTKYDENDKLIREVKVITLKSKLVSDFRKDFQFYKVREINNYHHAHDAYLNAVVGTALIKKYPKLESEFVYGDYKVYDVRKMIAKSEQEIGKATAKYFFYSNIMNFFKTEITLANGEIRKRPLIETNGETGEIVWDKGRDFATVRKVLSMPQVNIVKKTEVQTGGFSKESILPKRNSDKLIARKKDWDPKKYGGFDSPTVAYSVLVVAKVEKGKSKKLKSVKELLGITIMERSSFEKNPIDFLEAKGYKEVKKDLIIKLPKYSLFELENGRKRMLASAGELQKGNELALPSKYVNFLYLASHYEKLKGSPEDNEQKQLFVEQHKHYLDEIIEQISEFSKRVILADANLDKVLSAYNKHRDKPIREQAENIIHLFTLTNLGAPAAFKYFDTTIDRKRYTSTKEVLDATLIHQSITGLYETRIDLSQLGGDGGGGGPAPGGSGGTLNIEDEYRLHETSKEPDVSLGSTWLSDFPQAWAETGGMGLAVRQAPLIIPLKATSTPVSIKQYPMSQEARLGIKPHIQRLLDQGILVPCQSPWNTPLLPVKKPGTNDYRPVQDLREVNKRVEDIHPTVPNPYNLLSGLPPSHQWYTVLDLKDAFFCLRLHPTSQPLFAFEWRDPEMGISGQLTWTRLPQGFKNSPTLFNEALHRDLAGFRIQHPDLILLQYVDDLLLAATSELDCQQGTRALLQTLGDLGYRASAKKAQICQKQVKYLGYLLKEGQRWLTEARKETVMGQPIPKTPRQLREFLGTAGFCRLWIPGFAEMAAPLYPLTKPGTLFNWGPDQQKAFQEIKQALLTAPALGLPDLTKPFELFVDEKQGYAKGVLTQKLGPWRRPVAYLSKKLDPVAAGWPPCLRMVAAIAVLTKDAGKLTMGQPLVILAPHAVEALVKQPPDRWLSNARMTHYQALLLDTDRVQFGPVVALNPATLLPLPEEGLQHDCLDILAEAHGTRSDLMDQPLPDADHTWYTDGSSFLQEGQRKAGAAVTTETEVIWARALPAGTSAQRAELIALTQALKMAEGKKLNVYTDSRYAFATAHIHGEIYRRRGWLTSEGKEIKNKDEILALLKALFLPKRLSIIHCPGHQKGNSAEARGNRMADQAAREVATRETPETSTLLAGKRTADGSEFEKRTADGSEFESPKKKAKVE

SEQ ID NO: 2291 - protein, 2097 aa, synthetic construct
MPAAKRVKLDGGDKKYSIGLDIGTNSVGWAVITDEYKVPSKKFKVLGNTDRHSIKKNLIGALLFDSGETAEATRLKRTARRRYTRRKNRICYLQEIFSNEMAKVDDSFFHRLEESFLVEEDKKHERHPIFGNIVDEVAYHEKYPTIYHLRKKLVDSTDKADLRLIYLALAHMIKFRGHFLIEGDLNPDNSDVDKLFIQLVQTYNQLFEENPINASGVDAKAILSARLSKSRRLENLIAQLPGEKKNGLFGNLIALSLGLTPNFKSNFDLAEDAKLQLSKDTYDDDLDNLLAQIGDQYADLFLAAKNLSDAILLSDILRVNTEITKAPLSASMIKRYDEHHQDLTLLKALVRQQLPEKYKEIFFDQSKNGYAGYIDGGASQEEFYKFIKPILEKMDGTEELLVKLNREDLLRKQRTFDNGSIPHQIHLGELHAILRRQEDFYPFLKDNREKIEKILTFRIPYYVGPLARGNSRFAWMTRKSEETITPWNFEEVVDKGASAQSFIERMTNFDKNLPNEKVLPKHSLLYEYFTVYNELTKVKYVTEGMRKPAFLSGEQKKAIVDLLFKTNRKVTVKQLKEDYFKKIECFDSVEISGVEDRFNASLGTYHDLLKIIKDKDFLDNEENEDILEDIVLTLTLFEDREMIEERLKTYAHLFDDKVMKQLKRRRYTGWGRLSRKLINGIRDKQSGKTILDFLKSDGFANRNFMQLIHDDSLTFKEDIQKAQVSGQGDSLHEHIANLAGSPAIKKGILQTVKVVDELVKVMGRHKPENIVIEMARENQTTQKGQKNSRERMKRIEEGIKELGSQILKEHPVENTQLQNEKLYLYYLQNGRDMYVDQELDINRLSDYDVDHIVPQSFLKDDSIDNKVLTRSDKARGKSDNVPSEEVVKKMKNYWRQLLNAKLITQRKFDNLTKAERGGLSELDKAGFIKRQLVETRQITKHVAQILDSRMNTKYDENDKLIREVKVITLKSKLVSDFRKDFQFYKVREINNYHHAHDAYLNAVVGTALIKKYPKLESEFVYGDYKVYDVRKMIAKSEQEIGKATAKYFFYSNIMNFFKTEITLANGEIRKRPLIETNGETGEIVWDKGRDFATVRKVLSMPQVNIVKKTEVQTGGFSKESILPKRNSDKLIARKKDWDPKKYGGFDSPTVAYSVLVVAKVEKGKSKKLKSVKELLGITIMERSSFEKNPIDFLEAKGYKEVKKDLIIKLPKYSLFELENGRKRMLASAGELQKGNELALPSKYVNFLYLASHYEKLKGSPEDNEQKQLFVEQHKHYLDEIIEQISEFSKRVILADANLDKVLSAYNKHRDKPIREQAENIIHLFTLTNLGAPAAFKYFDTTIDRKRYTSTKEVLDATLIHQSITGLYETRIDLSQLGGDGGGSSGSSGSSGSSGGTLNIEDEYRLHETSKEPDVSLGSTWLSDFPQAWAETGGMGLAVRQAPLIIPLKATSTPVSIKQYPMSQEARLGIKPHIQRLLDQGILVPCQSPWNTPLLPVKKPGTNDYRPVQDLREVNKRVEDIHPTVPNPYNLLSGLPPSHQWYTVLDLKDAFFCLRLHPTSQPLFAFEWRDPEMGISGQLTWTRLPQGFKNSPTLFNEALHRDLAGFRIQHPDLILLQYVDDLLLAATSELDCQQGTRALLQTLGDLGYRASAKKAQICQKQVKYLGYLLKEGQRWLTEARKETVMGQPIPKTPRQLREFLGTAGFCRLWIPGFAEMAAPLYPLTKPGTLFNWGPDQQKAFQEIKQALLTAPALGLPDLTKPFELFVDEKQGYAKGVLTQKLGPWRRPVAYLSKKLDPVAAGWPPCLRMVAAIAVLTKDAGKLTMGQPLVILAPHAVEALVKQPPDRWLSNARMTHYQALLLDTDRVQFGPVVALNPATLLPLPEEGLQHDCLDILAEAHGTRSDLMDQPLPDADHTWYTDGSSFLQEGQRKAGAAVTTETEVIWARALPAGTSAQRAELIALTQALKMAEGKKLNVYTDSRYAFATAHIHGEIYRRRGWLTSEGKEIKNKDEILALLKALFLPKRLSIIHCPGHQKGNSAEARGNRMADQAAREVATRETPETSTLLAGKRTADGSEFEKRTADGSEFESPKKKAKVE

SEQ ID NO: 2292 - protein, 2096 aa, synthetic construct
MPAAKRVKLDGGDKKYSIGLDIGTNSVGWAVITDEYKVPSKKFKVLGNTDRHSIKKNLIGALLFDSGETAEATRLKRTARRRYTRRKNRICYLQEIFSNEMAKVDDSFFHRLEESFLVEEDKKHERHPIFGNIVDEVAYHEKYPTIYHLRKKLVDSTDKADLRLIYLALAHMIKFRGHFLIEGDLNPDNSDVDKLFIQLVQTYNQLFEENPINASGVDAKAILSARLSKSRRLENLIAQLPGEKKNGLFGNLIALSLGLTPNFKSNFDLAEDAKLQLSKDTYDDDLDNLLAQIGDQYADLFLAAKNLSDAILLSDILRVNTEITKAPLSASMIKRYDEHHQDLTLLKALVRQQLPEKYKEIFFDQSKNGYAGYIDGGASQEEFYKFIKPILEKMDGTEELLVKLNREDLLRKQRTFDNGSIPHQIHLGELHAILRRQEDFYPFLKDNREKIEKILTFRIPYYVGPLARGNSRFAWMTRKSEETITPWNFEEVVDKGASAQSFIERMTNFDKNLPNEKVLPKHSLLYEYFTVYNELTKVKYVTEGMRKPAFLSGEQKKAIVDLLFKTNRKVTVKQLKEDYFKKIECFDSVEISGVEDRFNASLGTYHDLLKIIKDKDFLDNEENEDILEDIVLTLTLFEDREMIEERLKTYAHLFDDKVMKQLKRRRYTGWGRLSRKLINGIRDKQSGKTILDFLKSDGFANRNFMQLIHDDSLTFKEDIQKAQVSGQGDSLHEHIANLAGSPAIKKGILQTVKVVDELVKVMGRHKPENIVIEMARENQTTQKGQKNSRERMKRIEEGIKELGSQILKEHPVENTQLQNEKLYLYYLQNGRDMYVDQELDINRLSDYDVDHIVPQSFLKDDSIDNKVLTRSDKARGKSDNVPSEEVVKKMKNYWRQLLNAKLITQRKFDNLTKAERGGLSELDKAGFIKRQLVETRQITKHVAQILDSRMNTKYDENDKLIREVKVITLKSKLVSDFRKDFQFYKVREINNYHHAHDAYLNAVVGTALIKKYPKLESEFVYGDYKVYDVRKMIAKSEQEIGKATAKYFFYSNIMNFFKTEITLANGEIRKRPLIETNGETGEIVWDKGRDFATVRKVLSMPQVNIVKKTEVQTGGFSKESILPKRNSDKLIARKKDWDPKKYGGFDSPTVAYSVLVVAKVEKGKSKKLKSVKELLGITIMERSSFEKNPIDFLEAKGYKEVKKDLIIKLPKYSLFELENGRKRMLASAGELQKGNELALPSKYVNFLYLASHYEKLKGSPEDNEQKQLFVEQHKHYLDEIIEQISEFSKRVILADANLDKVLSAYNKHRDKPIREQAENIIHLFTLTNLGAPAAFKYFDTTIDRKRYTSTKEVLDATLIHQSITGLYETRIDLSQLGGDGGGSSGGGEAAAKGGTLNIEDEYRLHETSKEPDVSLGSTWLSDFPQAWAETGGMGLAVRQAPLIIPLKATSTPVSIKQYPMSQEARLGIKPHIQRLLDQGILVPCQSPWNTPLLPVKKPGTNDYRPVQDLREVNKRVEDIHPTVPNPYNLLSGLPPSHQWYTVLDLKDAFFCLRLHPTSQPLFAFEWRDPEMGISGQLTWTRLPQGFKNSPTLFNEALHRDLAGFRIQHPDLILLQYVDDLLLAATSELDCQQGTRALLQTLGDLGYRASAKKAQICQKQVKYLGYLLKEGQRWLTEARKETVMGQPIPKTPRQLREFLGTAGFCRLWIPGFAEMAAPLYPLTKPGTLFNWGPDQQKAFQEIKQALLTAPALGLPDLTKPFELFVDEKQGYAKGVLTQKLGPWRRPVAYLSKKLDPVAAGWPPCLRMVAAIAVLTKDAGKLTMGQPLVILAPHAVEALVKQPPDRWLSNARMTHYQALLLDTDRVQFGPVVALNPATLLPLPEEGLQHDCLDILAEAHGTRSDLMDQPLPDADHTWYTDGSSFLQEGQRKAGAAVTTETEVIWARALPAGTSAQRAELIALTQALKMAEGKKLNVYTDSRYAFATAHIHGEIYRRRGWLTSEGKEIKNKDEILALLKALFLPKRLSIIHCPGHQKGNSAEARGNRMADQAAREVATRETPETSTLLAGKRTADGSEFEKRTADGSEFESPKKKAKVE

SEQ ID NO: 2293 - protein, 2094 aa, synthetic construct
MPAAKRVKLDGGDKKYSIGLDIGTNSVGWAVITDEYKVPSKKFKVLGNTDRHSIKKNLIGALLFDSGETAEATRLKRTARRRYTRRKNRICYLQEIFSNEMAKVDDSFFHRLEESFLVEEDKKHERHPIFGNIVDEVAYHEKYPTIYHLRKKLVDSTDKADLRLIYLALAHMIKFRGHFLIEGDLNPDNSDVDKLFIQLVQTYNQLFEENPINASGVDAKAILSARLSKSRRLENLIAQLPGEKKNGLFGNLIALSLGLTPNFKSNFDLAEDAKLQLSKDTYDDDLDNLLAQIGDQYADLFLAAKNLSDAILLSDILRVNTEITKAPLSASMIKRYDEHHQDLTLLKALVRQQLPEKYKEIFFDQSKNGYAGYIDGGASQEEFYKFIKPILEKMDGTEELLVKLNREDLLRKQRTFDNGSIPHQIHLGELHAILRRQEDFYPFLKDNREKIEKILTFRIPYYVGPLARGNSRFAWMTRKSEETITPWNFEEVVDKGASAQSFIERMTNFDKNLPNEKVLPKHSLLYEYFTVYNELTKVKYVTEGMRKPAFLSGEQKKAIVDLLFKTNRKVTVKQLKEDYFKKIECFDSVEISGVEDRFNASLGTYHDLLKIIKDKDFLDNEENEDILEDIVLTLTLFEDREMIEERLKTYAHLFDDKVMKQLKRRRYTGWGRLSRKLINGIRDKQSGKTILDFLKSDGFANRNFMQLIHDDSLTFKEDIQKAQVSGQGDSLHEHIANLAGSPAIKKGILQTVKVVDELVKVMGRHKPENIVIEMARENQTTQKGQKNSRERMKRIEEGIKELGSQILKEHPVENTQLQNEKLYLYYLQNGRDMYVDQELDINRLSDYDVDHIVPQSFLKDDSIDNKVLTRSDKARGKSDNVPSEEVVKKMKNYWRQLLNAKLITQRKFDNLTKAERGGLSELDKAGFIKRQLVETRQITKHVAQILDSRMNTKYDENDKLIREVKVITLKSKLVSDFRKDFQFYKVREINNYHHAHDAYLNAVVGTALIKKYPKLESEFVYGDYKVYDVRKMIAKSEQEIGKATAKYFFYSNIMNFFKTEITLANGEIRKRPLIETNGETGEIVWDKGRDFATVRKVLSMPQVNIVKKTEVQTGGFSKESILPKRNSDKLIARKKDWDPKKYGGFDSPTVAYSVLVVAKVEKGKSKKLKSVKELLGITIMERSSFEKNPIDFLEAKGYKEVKKDLIIKLPKYSLFELENGRKRMLASAGELQKGNELALPSKYVNFLYLASHYEKLKGSPEDNEQKQLFVEQHKHYLDEIIEQISEFSKRVILADANLDKVLSAYNKHRDKPIREQAENIIHLFTLTNLGAPAAFKYFDTTIDRKRYTSTKEVLDATLIHQSITGLYETRIDLSQLGGDGGGGSGSSGGGGGTLNIEDEYRLHETSKEPDVSLGSTWLSDFPQAWAETGGMGLAVRQAPLIIPLKATSTPVSIKQYPMSQEARLGIKPHIQRLLDQGILVPCQSPWNTPLLPVKKPGTNDYRPVQDLREVNKRVEDIHPTVPNPYNLLSGLPPSHQWYTVLDLKDAFFCLRLHPTSQPLFAFEWRDPEMGISGQLTWTRLPQGFKNSPTLFNEALHRDLAGFRIQHPDLILLQYVDDLLLAATSELDCQQGTRALLQTLGDLGYRASAKKAQICQKQVKYLGYLLKEGQRWLTEARKETVMGQPIPKTPRQLREFLGTAGFCRLWIPGFAEMAAPLYPLTKPGTLFNWGPDQQKAFQEIKQALLTAPALGLPDLTKPFELFVDEKQGYAKGVLTQKLGPWRRPVAYLSKKLDPVAAGWPPCLRMVAAIAVLTKDAGKLTMGQPLVILAPHAVEALVKQPPDRWLSNARMTHYQALLLDTDRVQFGPVVALNPATLLPLPEEGLQHDCLDILAEAHGTRSDLMDQPLPDADHTWYTDGSSFLQEGQRKAGAAVTTETEVIWARALPAGTSAQRAELIALTQALKMAEGKKLNVYTDSRYAFATAHIHGEIYRRRGWLTSEGKEIKNKDEILALLKALFLPKRLSIIHCPGHQKGNSAEARGNRMADQAAREVATRETPETSTLLAGKRTADGSEFEKRTADGSEFESPKKKAKVE

SEQ ID NO: 2294 - protein, 2092 aa, synthetic construct
MPAAKRVKLDGGDKKYSIGLDIGTNSVGWAVITDEYKVPSKKFKVLGNTDRHSIKKNLIGALLFDSGETAEATRLKRTARRRYTRRKNRICYLQEIFSNEMAKVDDSFFHRLEESFLVEEDKKHERHPIFGNIVDEVAYHEKYPTIYHLRKKLVDSTDKADLRLIYLALAHMIKFRGHFLIEGDLNPDNSDVDKLFIQLVQTYNQLFEENPINASGVDAKAILSARLSKSRRLENLIAQLPGEKKNGLFGNLIALSLGLTPNFKSNFDLAEDAKLQLSKDTYDDDLDNLLAQIGDQYADLFLAAKNLSDAILLSDILRVNTEITKAPLSASMIKRYDEHHQDLTLLKALVRQQLPEKYKEIFFDQSKNGYAGYIDGGASQEEFYKFIKPILEKMDGTEELLVKLNREDLLRKQRTFDNGSIPHQIHLGELHAILRRQEDFYPFLKDNREKIEKILTFRIPYYVGPLARGNSRFAWMTRKSEETITPWNFEEVVDKGASAQSFIERMTNFDKNLPNEKVLPKHSLLYEYFTVYNELTKVKYVTEGMRKPAFLSGEQKKAIVDLLFKTNRKVTVKQLKEDYFKKIECFDSVEISGVEDRFNASLGTYHDLLKIIKDKDFLDNEENEDILEDIVLTLTLFEDREMIEERLKTYAHLFDDKVMKQLKRRRYTGWGRLSRKLINGIRDKQSGKTILDFLKSDGFANRNFMQLIHDDSLTFKEDIQKAQVSGQGDSLHEHIANLAGSPAIKKGILQTVKVVDELVKVMGRHKPENIVIEMARENQTTQKGQKNSRERMKRIEEGIKELGSQILKEHPVENTQLQNEKLYLYYLQNGRDMYVDQELDINRLSDYDVDHIVPQSFLKDDSIDNKVLTRSDKARGKSDNVPSEEVVKKMKNYWRQLLNAKLITQRKFDNLTKAERGGLSELDKAGFIKRQLVETRQITKHVAQILDSRMNTKYDENDKLIREVKVITLKSKLVSDFRKDFQFYKVREINNYHHAHDAYLNAVVGTALIKKYPKLESEFVYGDYKVYDVRKMIAKSEQEIGKATAKYFFYSNIMNFFKTEITLANGEIRKRPLIETNGETGEIVWDKGRDFATVRKVLSMPQVNIVKKTEVQTGGFSKESILPKRNSDKLIARKKDWDPKKYGGFDSPTVAYSVLVVAKVEKGKSKKLKSVKELLGITIMERSSFEKNPIDFLEAKGYKEVKKDLIIKLPKYSLFELENGRKRMLASAGELQKGNELALPSKYVNFLYLASHYEKLKGSPEDNEQKQLFVEQHKHYLDEIIEQISEFSKRVILADANLDKVLSAYNKHRDKPIREQAENIIHLFTLTNLGAPAAFKYFDTTIDRKRYTSTKEVLDATLIHQSITGLYETRIDLSQLGGDGGPAPAPAPGGTLNIEDEYRLHETSKEPDVSLGSTWLSDFPQAWAETGGMGLAVRQAPLIIPLKATSTPVSIKQYPMSQEARLGIKPHIQRLLDQGILVPCQSPWNTPLLPVKKPGTNDYRPVQDLREVNKRVEDIHPTVPNPYNLLSGLPPSHQWYTVLDLKDAFFCLRLHPTSQPLFAFEWRDPEMGISGQLTWTRLPQGFKNSPTLFNEALHRDLAGFRIQHPDLILLQYVDDLLLAATSELDCQQGTRALLQTLGDLGYRASAKKAQICQKQVKYLGYLLKEGQRWLTEARKETVMGQPIPKTPRQLREFLGTAGFCRLWIPGFAEMAAPLYPLTKPGTLFNWGPDQQKAFQEIKQALLTAPALGLPDLTKPFELFVDEKQGYAKGVLTQKLGPWRRPVAYLSKKLDPVAAGWPPCLRMVAAIAVLTKDAGKLTMGQPLVILAPHAVEALVKQPPDRWLSNARMTHYQALLLDTDRVQFGPVVALNPATLLPLPEEGLQHDCLDILAEAHGTRSDLMDQPLPDADHTWYTDGSSFLQEGQRKAGAAVTTETEVIWARALPAGTSAQRAELIALTQALKMAEGKKLNVYTDSRYAFATAHIHGEIYRRRGWLTSEGKEIKNKDEILALLKALFLPKRLSIIHCPGHQKGNSAEARGNRMADQAAREVATRETPETSTLLAGKRTADGSEFEKRTADGSEFESPKKKAKVE

SEQ ID NO: 2295 - protein, 2094 aa, synthetic construct
MPAAKRVKLDGGDKKYSIGLDIGTNSVGWAVITDEYKVPSKKFKVLGNTDRHSIKKNLIGALLFDSGETAEATRLKRTARRRYTRRKNRICYLQEIFSNEMAKVDDSFFHRLEESFLVEEDKKHERHPIFGNIVDEVAYHEKYPTIYHLRKKLVDSTDKADLRLIYLALAHMIKFRGHFLIEGDLNPDNSDVDKLFIQLVQTYNQLFEENPINASGVDAKAILSARLSKSRRLENLIAQLPGEKKNGLFGNLIALSLGLTPNFKSNFDLAEDAKLQLSKDTYDDDLDNLLAQIGDQYADLFLAAKNLSDAILLSDILRVNTEITKAPLSASMIKRYDEHHQDLTLLKALVRQQLPEKYKEIFFDQSKNGYAGYIDGGASQEEFYKFIKPILEKMDGTEELLVKLNREDLLRKQRTFDNGSIPHQIHLGELHAILRRQEDFYPFLKDNREKIEKILTFRIPYYVGPLARGNSRFAWMTRKSEETITPWNFEEVVDKGASAQSFIERMTNFDKNLPNEKVLPKHSLLYEYFTVYNELTKVKYVTEGMRKPAFLSGEQKKAIVDLLFKTNRKVTVKQLKEDYFKKIECFDSVEISGVEDRFNASLGTYHDLLKIIKDKDFLDNEENEDILEDIVLTLTLFEDREMIEERLKTYAHLFDDKVMKQLKRRRYTGWGRLSRKLINGIRDKQSGKTILDFLKSDGFANRNFMQLIHDDSLTFKEDIQKAQVSGQGDSLHEHIANLAGSPAIKKGILQTVKVVDELVKVMGRHKPENIVIEMARENQTTQKGQKNSRERMKRIEEGIKELGSQILKEHPVENTQLQNEKLYLYYLQNGRDMYVDQELDINRLSDYDVDHIVPQSFLKDDSIDNKVLTRSDKARGKSDNVPSEEVVKKMKNYWRQLLNAKLITQRKFDNLTKAERGGLSELDKAGFIKRQLVETRQITKHVAQILDSRMNTKYDENDKLIREVKVITLKSKLVSDFRKDFQFYKVREINNYHHAHDAYLNAVVGTALIKKYPKLESEFVYGDYKVYDVRKMIAKSEQEIGKATAKYFFYSNIMNFFKTEITLANGEIRKRPLIETNGETGEIVWDKGRDFATVRKVLSMPQVNIVKKTEVQTGGFSKESILPKRNSDKLIARKKDWDPKKYGGFDSPTVAYSVLVVAKVEKGKSKKLKSVKELLGITIMERSSFEKNPIDFLEAKGYKEVKKDLIIKLPKYSLFELENGRKRMLASAGELQKGNELALPSKYVNFLYLASHYEKLKGSPEDNEQKQLFVEQHKHYLDEIIEQISEFSKRVILADANLDKVLSAYNKHRDKPIREQAENIIHLFTLTNLGAPAAFKYFDTTIDRKRYTSTKEVLDATLIHQSITGLYETRIDLSQLGGDGGPAPAPAPAPGGTLNIEDEYRLHETSKEPDVSLGSTWLSDFPQAWAETGGMGLAVRQAPLIIPLKATSTPVSIKQYPMSQEARLGIKPHIQRLLDQGILVPCQSPWNTPLLPVKKPGTNDYRPVQDLREVNKRVEDIHPTVPNPYNLLSGLPPSHQWYTVLDLKDAFFCLRLHPTSQPLFAFEWRDPEMGISGQLTWTRLPQGFKNSPTLFNEALHRDLAGFRIQHPDLILLQYVDDLLLAATSELDCQQGTRALLQTLGDLGYRASAKKAQICQKQVKYLGYLLKEGQRWLTEARKETVMGQPIPKTPRQLREFLGTAGFCRLWIPGFAEMAAPLYPLTKPGTLFNWGPDQQKAFQEIKQALLTAPALGLPDLTKPFELFVDEKQGYAKGVLTQKLGPWRRPVAYLSKKLDPVAAGWPPCLRMVAAIAVLTKDAGKLTMGQPLVILAPHAVEALVKQPPDRWLSNARMTHYQALLLDTDRVQFGPVVALNPATLLPLPEEGLQHDCLDILAEAHGTRSDLMDQPLPDADHTWYTDGSSFLQEGQRKAGAAVTTETEVIWARALPAGTSAQRAELIALTQALKMAEGKKLNVYTDSRYAFATAHIHGEIYRRRGWLTSEGKEIKNKDEILALLKALFLPKRLSIIHCPGHQKGNSAEARGNRMADQAAREVATRETPETSTLLAGKRTADGSEFEKRTADGSEFESPKKKAKVE

SEQ ID NO: 2296 - protein, 2096 aa, synthetic construct
MPAAKRVKLDGGDKKYSIGLDIGTNSVGWAVITDEYKVPSKKFKVLGNTDRHSIKKNLIGALLFDSGETAEATRLKRTARRRYTRRKNRICYLQEIFSNEMAKVDDSFFHRLEESFLVEEDKKHERHPIFGNIVDEVAYHEKYPTIYHLRKKLVDSTDKADLRLIYLALAHMIKFRGHFLIEGDLNPDNSDVDKLFIQLVQTYNQLFEENPINASGVDAKAILSARLSKSRRLENLIAQLPGEKKNGLFGNLIALSLGLTPNFKSNFDLAEDAKLQLSKDTYDDDLDNLLAQIGDQYADLFLAAKNLSDAILLSDILRVNTEITKAPLSASMIKRYDEHHQDLTLLKALVRQQLPEKYKEIFFDQSKNGYAGYIDGGASQEEFYKFIKPILEKMDGTEELLVKLNREDLLRKQRTFDNGSIPHQIHLGELHAILRRQEDFYPFLKDNREKIEKILTFRIPYYVGPLARGNSRFAWMTRKSEETITPWNFEEVVDKGASAQSFIERMTNFDKNLPNEKVLPKHSLLYEYFTVYNELTKVKYVTEGMRKPAFLSGEQKKAIVDLLFKTNRKVTVKQLKEDYFKKIECFDSVEISGVEDRFNASLGTYHDLLKIIKDKDFLDNEENEDILEDIVLTLTLFEDREMIEERLKTYAHLFDDKVMKQLKRRRYTGWGRLSRKLINGIRDKQSGKTILDFLKSDGFANRNFMQLIHDDSLTFKEDIQKAQVSGQGDSLHEHIANLAGSPAIKKGILQTVKVVDELVKVMGRHKPENIVIEMARENQTTQKGQKNSRERMKRIEEGIKELGSQILKEHPVENTQLQNEKLYLYYLQNGRDMYVDQELDINRLSDYDVDHIVPQSFLKDDSIDNKVLTRSDKARGKSDNVPSEEVVKKMKNYWRQLLNAKLITQRKFDNLTKAERGGLSELDKAGFIKRQLVETRQITKHVAQILDSRMNTKYDENDKLIREVKVITLKSKLVSDFRKDFQFYKVREINNYHHAHDAYLNAVVGTALIKKYPKLESEFVYGDYKVYDVRKMIAKSEQEIGKATAKYFFYSNIMNFFKTEITLANGEIRKRPLIETNGETGEIVWDKGRDFATVRKVLSMPQVNIVKKTEVQTGGFSKESILPKRNSDKLIARKKDWDPKKYGGFDSPTVAYSVLVVAKVEKGKSKKLKSVKELLGITIMERSSFEKNPIDFLEAKGYKEVKKDLIIKLPKYSLFELENGRKRMLASAGELQKGNELALPSKYVNFLYLASHYEKLKGSPEDNEQKQLFVEQHKHYLDEIIEQISEFSKRVILADANLDKVLSAYNKHRDKPIREQAENIIHLFTLTNLGAPAAFKYFDTTIDRKRYTSTKEVLDATLIHQSITGLYETRIDLSQLGGDGGGGSEAAAKGSSGGTLNIEDEYRLHETSKEPDVSLGSTWLSDFPQAWAETGGMGLAVRQAPLIIPLKATSTPVSIKQYPMSQEARLGIKPHIQRLLDQGILVPCQSPWNTPLLPVKKPGTNDYRPVQDLREVNKRVEDIHPTVPNPYNLLSGLPPSHQWYTVLDLKDAFFCLRLHPTSQPLFAFEWRDPEMGISGQLTWTRLPQGFKNSPTLFNEALHRDLAGFRIQHPDLILLQYVDDLLLAATSELDCQQGTRALLQTLGDLGYRASAKKAQICQKQVKYLGYLLKEGQRWLTEARKETVMGQPIPKTPRQLREFLGTAGFCRLWIPGFAEMAAPLYPLTKPGTLFNWGPDQQKAFQEIKQALLTAPALGLPDLTKPFELFVDEKQGYAKGVLTQKLGPWRRPVAYLSKKLDPVAAGWPPCLRMVAAIAVLTKDAGKLTMGQPLVILAPHAVEALVKQPPDRWLSNARMTHYQALLLDTDRVQFGPVVALNPATLLPLPEEGLQHDCLDILAEAHGTRSDLMDQPLPDADHTWYTDGSSFLQEGQRKAGAAVTTETEVIWARALPAGTSAQRAELIALTQALKMAEGKKLNVYTDSRYAFATAHIHGEIYRRRGWLTSEGKEIKNKDEILALLKALFLPKRLSIIHCPGHQKGNSAEARGNRMADQAAREVATRETPETSTLLAGKRTADGSEFEKRTADGSEFESPKKKAKVE

SEQ ID NO: 2297 - protein, 2093 aa, synthetic construct
MPAAKRVKLDGGDKKYSIGLDIGTNSVGWAVITDEYKVPSKKFKVLGNTDRHSIKKNLIGALLFDSGETAEATRLKRTARRRYTRRKNRICYLQEIFSNEMAKVDDSFFHRLEESFLVEEDKKHERHPIFGNIVDEVAYHEKYPTIYHLRKKLVDSTDKADLRLIYLALAHMIKFRGHFLIEGDLNPDNSDVDKLFIQLVQTYNQLFEENPINASGVDAKAILSARLSKSRRLENLIAQLPGEKKNGLFGNLIALSLGLTPNFKSNFDLAEDAKLQLSKDTYDDDLDNLLAQIGDQYADLFLAAKNLSDAILLSDILRVNTEITKAPLSASMIKRYDEHHQDLTLLKALVRQQLPEKYKEIFFDQSKNGYAGYIDGGASQEEFYKFIKPILEKMDGTEELLVKLNREDLLRKQRTFDNGSIPHQIHLGELHAILRRQEDFYPFLKDNREKIEKILTFRIPYYVGPLARGNSRFAWMTRKSEETITPWNFEEVVDKGASAQSFIERMTNFDKNLPNEKVLPKHSLLYEYFTVYNELTKVKYVTEGMRKPAFLSGEQKKAIVDLLFKTNRKVTVKQLKEDYFKKIECFDSVEISGVEDRFNASLGTYHDLLKIIKDKDFLDNEENEDILEDIVLTLTLFEDREMIEERLKTYAHLFDDKVMKQLKRRRYTGWGRLSRKLINGIRDKQSGKTILDFLKSDGFANRNFMQLIHDDSLTFKEDIQKAQVSGQGDSLHEHIANLAGSPAIKKGILQTVKVVDELVKVMGRHKPENIVIEMARENQTTQKGQKNSRERMKRIEEGIKELGSQILKEHPVENTQLQNEKLYLYYLQNGRDMYVDQELDINRLSDYDVDHIVPQSFLKDDSIDNKVLTRSDKARGKSDNVPSEEVVKKMKNYWRQLLNAKLITQRKFDNLTKAERGGLSELDKAGFIKRQLVETRQITKHVAQILDSRMNTKYDENDKLIREVKVITLKSKLVSDFRKDFQFYKVREINNYHHAHDAYLNAVVGTALIKKYPKLESEFVYGDYKVYDVRKMIAKSEQEIGKATAKYFFYSNIMNFFKTEITLANGEIRKRPLIETNGETGEIVWDKGRDFATVRKVLSMPQVNIVKKTEVQTGGFSKESILPKRNSDKLIARKKDWDPKKYGGFDSPTVAYSVLVVAKVEKGKSKKLKSVKELLGITIMERSSFEKNPIDFLEAKGYKEVKKDLIIKLPKYSLFELENGRKRMLASAGELQKGNELALPSKYVNFLYLASHYEKLKGSPEDNEQKQLFVEQHKHYLDEIIEQISEFSKRVILADANLDKVLSAYNKHRDKPIREQAENIIHLFTLTNLGAPAAFKYFDTTIDRKRYTSTKEVLDATLIHQSITGLYETRIDLSQLGGDGGEAAAKGSSGGTLNIEDEYRLHETSKEPDVSLGSTWLSDFPQAWAETGGMGLAVRQAPLIIPLKATSTPVSIKQYPMSQEARLGIKPHIQRLLDQGILVPCQSPWNTPLLPVKKPGTNDYRPVQDLREVNKRVEDIHPTVPNPYNLLSGLPPSHQWYTVLDLKDAFFCLRLHPTSQPLFAFEWRDPEMGISGQLTWTRLPQGFKNSPTLFNEALHRDLAGFRIQHPDLILLQYVDDLLLAATSELDCQQGTRALLQTLGDLGYRASAKKAQICQKQVKYLGYLLKEGQRWLTEARKETVMGQPIPKTPRQLREFLGTAGFCRLWIPGFAEMAAPLYPLTKPGTLFNWGPDQQKAFQEIKQALLTAPALGLPDLTKPFELFVDEKQGYAKGVLTQKLGPWRRPVAYLSKKLDPVAAGWPPCLRMVAAIAVLTKDAGKLTMGQPLVILAPHAVEALVKQPPDRWLSNARMTHYQALLLDTDRVQFGPVVALNPATLLPLPEEGLQHDCLDILAEAHGTRSDLMDQPLPDADHTWYTDGSSFLQEGQRKAGAAVTTETEVIWARALPAGTSAQRAELIALTQALKMAEGKKLNVYTDSRYAFATAHIHGEIYRRRGWLTSEGKEIKNKDEILALLKALFLPKRLSIIHCPGHQKGNSAEARGNRMADQAAREVATRETPETSTLLAGKRTADGSEFEKRTADGSEFESPKKKAKVE

SEQ ID NO: 2298 - protein, 2091 aa, synthetic construct
MPAAKRVKLDGGDKKYSIGLDIGTNSVGWAVITDEYKVPSKKFKVLGNTDRHSIKKNLIGALLFDSGETAEATRLKRTARRRYTRRKNRICYLQEIFSNEMAKVDDSFFHRLEESFLVEEDKKHERHPIFGNIVDEVAYHEKYPTIYHLRKKLVDSTDKADLRLIYLALAHMIKFRGHFLIEGDLNPDNSDVDKLFIQLVQTYNQLFEENPINASGVDAKAILSARLSKSRRLENLIAQLPGEKKNGLFGNLIALSLGLTPNFKSNFDLAEDAKLQLSKDTYDDDLDNLLAQIGDQYADLFLAAKNLSDAILLSDILRVNTEITKAPLSASMIKRYDEHHQDLTLLKALVRQQLPEKYKEIFFDQSKNGYAGYIDGGASQEEFYKFIKPILEKMDGTEELLVKLNREDLLRKQRTFDNGSIPHQIHLGELHAILRRQEDFYPFLKDNREKIEKILTFRIPYYVGPLARGNSRFAWMTRKSEETITPWNFEEVVDKGASAQSFIERMTNFDKNLPNEKVLPKHSLLYEYFTVYNELTKVKYVTEGMRKPAFLSGEQKKAIVDLLFKTNRKVTVKQLKEDYFKKIECFDSVEISGVEDRFNASLGTYHDLLKIIKDKDFLDNEENEDILEDIVLTLTLFEDREMIEERLKTYAHLFDDKVMKQLKRRRYTGWGRLSRKLINGIRDKQSGKTILDFLKSDGFANRNFMQLIHDDSLTFKEDIQKAQVSGQGDSLHEHIANLAGSPAIKKGILQTVKVVDELVKVMGRHKPENIVIEMARENQTTQKGQKNSRERMKRIEEGIKELGSQILKEHPVENTQLQNEKLYLYYLQNGRDMYVDQELDINRLSDYDVDHIVPQSFLKDDSIDNKVLTRSDKARGKSDNVPSEEVVKKMKNYWRQLLNAKLITQRKFDNLTKAERGGLSELDKAGFIKRQLVETRQITKHVAQILDSRMNTKYDENDKLIREVKVITLKSKLVSDFRKDFQFYKVREINNYHHAHDAYLNAVVGTALIKKYPKLESEFVYGDYKVYDVRKMIAKSEQEIGKATAKYFFYSNIMNFFKTEITLANGEIRKRPLIETNGETGEIVWDKGRDFATVRKVLSMPQVNIVKKTEVQTGGFSKESILPKRNSDKLIARKKDWDPKKYGGFDSPTVAYSVLVVAKVEKGKSKKLKSVKELLGITIMERSSFEKNPIDFLEAKGYKEVKKDLIIKLPKYSLFELENGRKRMLASAGELQKGNELALPSKYVNFLYLASHYEKLKGSPEDNEQKQLFVEQHKHYLDEIIEQISEFSKRVILADANLDKVLSAYNKHRDKPIREQAENIIHLFTLTNLGAPAAFKYFDTTIDRKRYTSTKEVLDATLIHQSITGLYETRIDLSQLGGDGGPAPGGGGGTLNIEDEYRLHETSKEPDVSLGSTWLSDFPQAWAETGGMGLAVRQAPLIIPLKATSTPVSIKQYPMSQEARLGIKPHIQRLLDQGILVPCQSPWNTPLLPVKKPGTNDYRPVQDLREVNKRVEDIHPTVPNPYNLLSGLPPSHQWYTVLDLKDAFFCLRLHPTSQPLFAFEWRDPEMGISGQLTWTRLPQGFKNSPTLFNEALHRDLAGFRIQHPDLILLQYVDDLLLAATSELDCQQGTRALLQTLGDLGYRASAKKAQICQKQVKYLGYLLKEGQRWLTEARKETVMGQPIPKTPRQLREFLGTAGFCRLWIPGFAEMAAPLYPLTKPGTLFNWGPDQQKAFQEIKQALLTAPALGLPDLTKPFELFVDEKQGYAKGVLTQKLGPWRRPVAYLSKKLDPVAAGWPPCLRMVAAIAVLTKDAGKLTMGQPLVILAPHAVEALVKQPPDRWLSNARMTHYQALLLDTDRVQFGPVVALNPATLLPLPEEGLQHDCLDILAEAHGTRSDLMDQPLPDADHTWYTDGSSFLQEGQRKAGAAVTTETEVIWARALPAGTSAQRAELIALTQALKMAEGKKLNVYTDSRYAFATAHIHGEIYRRRGWLTSEGKEIKNKDEILALLKALFLPKRLSIIHCPGHQKGNSAEARGNRMADQAAREVATRETPETSTLLAGKRTADGSEFEKRTADGSEFESPKKKAKVE

SEQ ID NO: 2299 - protein, 2088 aa, synthetic construct
MPAAKRVKLDGGDKKYSIGLDIGTNSVGWAVITDEYKVPSKKFKVLGNTDRHSIKKNLIGALLFDSGETAEATRLKRTARRRYTRRKNRICYLQEIFSNEMAKVDDSFFHRLEESFLVEEDKKHERHPIFGNIVDEVAYHEKYPTIYHLRKKLVDSTDKADLRLIYLALAHMIKFRGHFLIEGDLNPDNSDVDKLFIQLVQTYNQLFEENPINASGVDAKAILSARLSKSRRLENLIAQLPGEKKNGLFGNLIALSLGLTPNFKSNFDLAEDAKLQLSKDTYDDDLDNLLAQIGDQYADLFLAAKNLSDAILLSDILRVNTEITKAPLSASMIKRYDEHHQDLTLLKALVRQQLPEKYKEIFFDQSKNGYAGYIDGGASQEEFYKFIKPILEKMDGTEELLVKLNREDLLRKQRTFDNGSIPHQIHLGELHAILRRQEDFYPFLKDNREKIEKILTFRIPYYVGPLARGNSRFAWMTRKSEETITPWNFEEVVDKGASAQSFIERMTNFDKNLPNEKVLPKHSLLYEYFTVYNELTKVKYVTEGMRKPAFLSGEQKKAIVDLLFKTNRKVTVKQLKEDYFKKIECFDSVEISGVEDRFNASLGTYHDLLKIIKDKDFLDNEENEDILEDIVLTLTLFEDREMIEERLKTYAHLFDDKVMKQLKRRRYTGWGRLSRKLINGIRDKQSGKTILDFLKSDGFANRNFMQLIHDDSLTFKEDIQKAQVSGQGDSLHEHIANLAGSPAIKKGILQTVKVVDELVKVMGRHKPENIVIEMARENQTTQKGQKNSRERMKRIEEGIKELGSQILKEHPVENTQLQNEKLYLYYLQNGRDMYVDQELDINRLSDYDVDHIVPQSFLKDDSIDNKVLTRSDKARGKSDNVPSEEVVKKMKNYWRQLLNAKLITQRKFDNLTKAERGGLSELDKAGFIKRQLVETRQITKHVAQILDSRMNTKYDENDKLIREVKVITLKSKLVSDFRKDFQFYKVREINNYHHAHDAYLNAVVGTALIKKYPKLESEFVYGDYKVYDVRKMIAKSEQEIGKATAKYFFYSNIMNFFKTEITLANGEIRKRPLIETNGETGEIVWDKGRDFATVRKVLSMPQVNIVKKTEVQTGGFSKESILPKRNSDKLIARKKDWDPKKYGGFDSPTVAYSVLVVAKVEKGKSKKLKSVKELLGITIMERSSFEKNPIDFLEAKGYKEVKKDLIIKLPKYSLFELENGRKRMLASAGELQKGNELALPSKYVNFLYLASHYEKLKGSPEDNEQKQLFVEQHKHYLDEIIEQISEFSKRVILADANLDKVLSAYNKHRDKPIREQAENIIHLFTLTNLGAPAAFKYFDTTIDRKRYTSTKEVLDATLIHQSITGLYETRIDLSQLGGDGGPAPGGTLNIEDEYRLHETSKEPDVSLGSTWLSDFPQAWAETGGMGLAVRQAPLIIPLKATSTPVSIKQYPMSQEARLGIKPHIQRLLDQGILVPCQSPWNTPLLPVKKPGTNDYRPVQDLREVNKRVEDIHPTVPNPYNLLSGLPPSHQWYTVLDLKDAFFCLRLHPTSQPLFAFEWRDPEMGISGQLTWTRLPQGFKNSPTLFNEALHRDLAGFRIQHPDLILLQYVDDLLLAATSELDCQQGTRALLQTLGDLGYRASAKKAQICQKQVKYLGYLLKEGQRWLTEARKETVMGQPIPKTPRQLREFLGKAGFCRLFIPGFAEMAAPLYPLTKPGTLFNWGPDQQKAFQEIKQALLTAPALGLPDLTKPFELFVDEKQGYAKGVLTQKLGPWRRPVAYLSKKLDPVAAGWPPCLRMVAAIAVLTKDAGKLTMGQPLVILAPHAVEALVKQPPDRWLSNARMTHYQALLLDTDRVQFGPVVALNPATLLPLPEEGLQHDCLDILAEAHGTRSDLMDQPLPDADHTWYTDGSSFLQEGQRKAGAAVTTETEVIWARALPAGTSAQRAELIALTQALKMAEGKKLNVYTDSRYAFATAHIHGEIYRRRGWLTSEGKEIKNKDEILALLKALFLPKRLSIIHCPGHQKGNSAEARGNRMADQAAREVATRETPETSTLLAGKRTADGSEFEKRTADGSEFESPKKKAKVE

SEQ ID NO: 2300 - protein, 2103 aa, synthetic construct
MPAAKRVKLDGGDKKYSIGLDIGTNSVGWAVITDEYKVPSKKFKVLGNTDRHSIKKNLIGALLFDSGETAEATRLKRTARRRYTRRKNRICYLQEIFSNEMAKVDDSFFHRLEESFLVEEDKKHERHPIFGNIVDEVAYHEKYPTIYHLRKKLVDSTDKADLRLIYLALAHMIKFRGHFLIEGDLNPDNSDVDKLFIQLVQTYNQLFEENPINASGVDAKAILSARLSKSRRLENLIAQLPGEKKNGLFGNLIALSLGLTPNFKSNFDLAEDAKLQLSKDTYDDDLDNLLAQIGDQYADLFLAAKNLSDAILLSDILRVNTEITKAPLSASMIKRYDEHHQDLTLLKALVRQQLPEKYKEIFFDQSKNGYAGYIDGGASQEEFYKFIKPILEKMDGTEELLVKLNREDLLRKQRTFDNGSIPHQIHLGELHAILRRQEDFYPFLKDNREKIEKILTFRIPYYVGPLARGNSRFAWMTRKSEETITPWNFEEVVDKGASAQSFIERMTNFDKNLPNEKVLPKHSLLYEYFTVYNELTKVKYVTEGMRKPAFLSGEQKKAIVDLLFKTNRKVTVKQLKEDYFKKIECFDSVEISGVEDRFNASLGTYHDLLKIIKDKDFLDNEENEDILEDIVLTLTLFEDREMIEERLKTYAHLFDDKVMKQLKRRRYTGWGRLSRKLINGIRDKQSGKTILDFLKSDGFANRNFMQLIHDDSLTFKEDIQKAQVSGQGDSLHEHIANLAGSPAIKKGILQTVKVVDELVKVMGRHKPENIVIEMARENQTTQKGQKNSRERMKRIEEGIKELGSQILKEHPVENTQLQNEKLYLYYLQNGRDMYVDQELDINRLSDYDVDHIVPQSFLKDDSIDNKVLTRSDKARGKSDNVPSEEVVKKMKNYWRQLLNAKLITQRKFDNLTKAERGGLSELDKAGFIKRQLVETRQITKHVAQILDSRMNTKYDENDKLIREVKVITLKSKLVSDFRKDFQFYKVREINNYHHAHDAYLNAVVGTALIKKYPKLESEFVYGDYKVYDVRKMIAKSEQEIGKATAKYFFYSNIMNFFKTEITLANGEIRKRPLIETNGETGEIVWDKGRDFATVRKVLSMPQVNIVKKTEVQTGGFSKESILPKRNSDKLIARKKDWDPKKYGGFDSPTVAYSVLVVAKVEKGKSKKLKSVKELLGITIMERSSFEKNPIDFLEAKGYKEVKKDLIIKLPKYSLFELENGRKRMLASAGELQKGNELALPSKYVNFLYLASHYEKLKGSPEDNEQKQLFVEQHKHYLDEIIEQISEFSKRVILADANLDKVLSAYNKHRDKPIREQAENIIHLFTLTNLGAPAAFKYFDTTIDRKRYTSTKEVLDATLIHQSITGLYETRIDLSQLGGDGGGGSGGSGGSGGSGGSGGSGGTLNIEDEYRLHETSKEPDVSLGSTWLSDFPQAWAETGGMGLAVRQAPLIIPLKATSTPVSIKQYPMSQEARLGIKPHIQRLLDQGILVPCQSPWNTPLLPVKKPGTNDYRPVQDLREVNKRVEDIHPTVPNPYNLLSGLPPSHQWYTVLDLKDAFFCLRLHPTSQPLFAFEWRDPEMGISGQLTWTRLPQGFKNSPTLFNEALHRDLAGFRIQHPDLILLQYVDDLLLAATSELDCQQGTRALLQTLGDLGYRASAKKAQICQKQVKYLGYLLKEGQRWLTEARKETVMGQPIPKTPRQLREFLGKAGFCRLFIPGFAEMAAPLYPLTKPGTLFNWGPDQQKAFQEIKQALLTAPALGLPDLTKPFELFVDEKQGYAKGVLTQKLGPWRRPVAYLSKKLDPVAAGWPPCLRMVAAIAVLTKDAGKLTMGQPLVILAPHAVEALVKQPPDRWLSNARMTHYQALLLDTDRVQFGPVVALNPATLLPLPEEGLQHDCLDILAEAHGTRSDLMDQPLPDADHTWYTDGSSFLQEGQRKAGAAVTTETEVIWARALPAGTSAQRAELIALTQALKMAEGKKLNVYTDSRYAFATAHIHGEIYRRRGWLTSEGKEIKNKDEILALLKALFLPKRLSIIHCPGHQKGNSAEARGNRMADQAAREVATRETPETSTLLAGKRTADGSEFEKRTADGSEFESPKKKAKVE

SEQ ID NO: 2301 - protein, 2096 aa, synthetic construct
MPAAKRVKLDGGDKKYSIGLDIGTNSVGWAVITDEYKVPSKKFKVLGNTDRHSIKKNLIGALLFDSGETAEATRLKRTARRRYTRRKNRICYLQEIFSNEMAKVDDSFFHRLEESFLVEEDKKHERHPIFGNIVDEVAYHEKYPTIYHLRKKLVDSTDKADLRLIYLALAHMIKFRGHFLIEGDLNPDNSDVDKLFIQLVQTYNQLFEENPINASGVDAKAILSARLSKSRRLENLIAQLPGEKKNGLFGNLIALSLGLTPNFKSNFDLAEDAKLQLSKDTYDDDLDNLLAQIGDQYADLFLAAKNLSDAILLSDILRVNTEITKAPLSASMIKRYDEHHQDLTLLKALVRQQLPEKYKEIFFDQSKNGYAGYIDGGASQEEFYKFIKPILEKMDGTEELLVKLNREDLLRKQRTFDNGSIPHQIHLGELHAILRRQEDFYPFLKDNREKIEKILTFRIPYYVGPLARGNSRFAWMTRKSEETITPWNFEEVVDKGASAQSFIERMTNFDKNLPNEKVLPKHSLLYEYFTVYNELTKVKYVTEGMRKPAFLSGEQKKAIVDLLFKTNRKVTVKQLKEDYFKKIECFDSVEISGVEDRFNASLGTYHDLLKIIKDKDFLDNEENEDILEDIVLTLTLFEDREMIEERLKTYAHLFDDKVMKQLKRRRYTGWGRLSRKLINGIRDKQSGKTILDFLKSDGFANRNFMQLIHDDSLTFKEDIQKAQVSGQGDSLHEHIANLAGSPAIKKGILQTVKVVDELVKVMGRHKPENIVIEMARENQTTQKGQKNSRERMKRIEEGIKELGSQILKEHPVENTQLQNEKLYLYYLQNGRDMYVDQELDINRLSDYDVDHIVPQSFLKDDSIDNKVLTRSDKARGKSDNVPSEEVVKKMKNYWRQLLNAKLITQRKFDNLTKAERGGLSELDKAGFIKRQLVETRQITKHVAQILDSRMNTKYDENDKLIREVKVITLKSKLVSDFRKDFQFYKVREINNYHHAHDAYLNAVVGTALIKKYPKLESEFVYGDYKVYDVRKMIAKSEQEIGKATAKYFFYSNIMNFFKTEITLANGEIRKRPLIETNGETGEIVWDKGRDFATVRKVLSMPQVNIVKKTEVQTGGFSKESILPKRNSDKLIARKKDWDPKKYGGFDSPTVAYSVLVVAKVEKGKSKKLKSVKELLGITIMERSSFEKNPIDFLEAKGYKEVKKDLIIKLPKYSLFELENGRKRMLASAGELQKGNELALPSKYVNFLYLASHYEKLKGSPEDNEQKQLFVEQHKHYLDEIIEQISEFSKRVILADANLDKVLSAYNKHRDKPIREQAENIIHLFTLTNLGAPAAFKYFDTTIDRKRYTSTKEVLDATLIHQSITGLYETRIDLSQLGGDGGPAPAPAPAPAPGGTLNIEDEYRLHETSKEPDVSLGSTWLSDFPQAWAETGGMGLAVRQAPLIIPLKATSTPVSIKQYPMSQEARLGIKPHIQRLLDQGILVPCQSPWNTPLLPVKKPGTNDYRPVQDLREVNKRVEDIHPTVPNPYNLLSGLPPSHQWYTVLDLKDAFFCLRLHPTSQPLFAFEWRDPEMGISGQLTWTRLPQGFKNSPTLFNEALHRDLAGFRIQHPDLILLQYVDDLLLAATSELDCQQGTRALLQTLGDLGYRASAKKAQICQKQVKYLGYLLKEGQRWLTEARKETVMGQPIPKTPRQLREFLGKAGFCRLFIPGFAEMAAPLYPLTKPGTLFNWGPDQQKAFQEIKQALLTAPALGLPDLTKPFELFVDEKQGYAKGVLTQKLGPWRRPVAYLSKKLDPVAAGWPPCLRMVAAIAVLTKDAGKLTMGQPLVILAPHAVEALVKQPPDRWLSNARMTHYQALLLDTDRVQFGPVVALNPATLLPLPEEGLQHDCLDILAEAHGTRSDLMDQPLPDADHTWYTDGSSFLQEGQRKAGAAVTTETEVIWARALPAGTSAQRAELIALTQALKMAEGKKLNVYTDSRYAFATAHIHGEIYRRRGWLTSEGKEIKNKDEILALLKALFLPKRLSIIHCPGHQKGNSAEARGNRMADQAAREVATRETPETSTLLAGKRTADGSEFEKRTADGSEFESPKKKAKVE

SEQ ID NO: 2302 - protein, 2091 aa, synthetic construct
MPAAKRVKLDGGDKKYSIGLDIGTNSVGWAVITDEYKVPSKKFKVLGNTDRHSIKKNLIGALLFDSGETAEATRLKRTARRRYTRRKNRICYLQEIFSNEMAKVDDSFFHRLEESFLVEEDKKHERHPIFGNIVDEVAYHEKYPTIYHLRKKLVDSTDKADLRLIYLALAHMIKFRGHFLIEGDLNPDNSDVDKLFIQLVQTYNQLFEENPINASGVDAKAILSARLSKSRRLENLIAQLPGEKKNGLFGNLIALSLGLTPNFKSNFDLAEDAKLQLSKDTYDDDLDNLLAQIGDQYADLFLAAKNLSDAILLSDILRVNTEITKAPLSASMIKRYDEHHQDLTLLKALVRQQLPEKYKEIFFDQSKNGYAGYIDGGASQEEFYKFIKPILEKMDGTEELLVKLNREDLLRKQRTFDNGSIPHQIHLGELHAILRRQEDFYPFLKDNREKIEKILTFRIPYYVGPLARGNSRFAWMTRKSEETITPWNFEEVVDKGASAQSFIERMTNFDKNLPNEKVLPKHSLLYEYFTVYNELTKVKYVTEGMRKPAFLSGEQKKAIVDLLFKTNRKVTVKQLKEDYFKKIECFDSVEISGVEDRFNASLGTYHDLLKIIKDKDFLDNEENEDILEDIVLTLTLFEDREMIEERLKTYAHLFDDKVMKQLKRRRYTGWGRLSRKLINGIRDKQSGKTILDFLKSDGFANRNFMQLIHDDSLTFKEDIQKAQVSGQGDSLHEHIANLAGSPAIKKGILQTVKVVDELVKVMGRHKPENIVIEMARENQTTQKGQKNSRERMKRIEEGIKELGSQILKEHPVENTQLQNEKLYLYYLQNGRDMYVDQELDINRLSDYDVDHIVPQSFLKDDSIDNKVLTRSDKARGKSDNVPSEEVVKKMKNYWRQLLNAKLITQRKFDNLTKAERGGLSELDKAGFIKRQLVETRQITKHVAQILDSRMNTKYDENDKLIREVKVITLKSKLVSDFRKDFQFYKVREINNYHHAHDAYLNAVVGTALIKKYPKLESEFVYGDYKVYDVRKMIAKSEQEIGKATAKYFFYSNIMNFFKTEITLANGEIRKRPLIETNGETGEIVWDKGRDFATVRKVLSMPQVNIVKKTEVQTGGFSKESILPKRNSDKLIARKKDWDPKKYGGFDSPTVAYSVLVVAKVEKGKSKKLKSVKELLGITIMERSSFEKNPIDFLEAKGYKEVKKDLIIKLPKYSLFELENGRKRMLASAGELQKGNELALPSKYVNFLYLASHYEKLKGSPEDNEQKQLFVEQHKHYLDEIIEQISEFSKRVILADANLDKVLSAYNKHRDKPIREQAENIIHLFTLTNLGAPAAFKYFDTTIDRKRYTSTKEVLDATLIHQSITGLYETRIDLSQLGGDGGGGGPAPGGTLNIEDEYRLHETSKEPDVSLGSTWLSDFPQAWAETGGMGLAVRQAPLIIPLKATSTPVSIKQYPMSQEARLGIKPHIQRLLDQGILVPCQSPWNTPLLPVKKPGTNDYRPVQDLREVNKRVEDIHPTVPNPYNLLSGLPPSHQWYTVLDLKDAFFCLRLHPTSQPLFAFEWRDPEMGISGQLTWTRLPQGFKNSPTLFNEALHRDLAGFRIQHPDLILLQYVDDLLLAATSELDCQQGTRALLQTLGDLGYRASAKKAQICQKQVKYLGYLLKEGQRWLTEARKETVMGQPIPKTPRQLREFLGKAGFCRLFIPGFAEMAAPLYPLTKPGTLFNWGPDQQKAFQEIKQALLTAPALGLPDLTKPFELFVDEKQGYAKGVLTQKLGPWRRPVAYLSKKLDPVAAGWPPCLRMVAAIAVLTKDAGKLTMGQPLVILAPHAVEALVKQPPDRWLSNARMTHYQALLLDTDRVQFGPVVALNPATLLPLPEEGLQHDCLDILAEAHGTRSDLMDQPLPDADHTWYTDGSSFLQEGQRKAGAAVTTETEVIWARALPAGTSAQRAELIALTQALKMAEGKKLNVYTDSRYAFATAHIHGEIYRRRGWLTSEGKEIKNKDEILALLKALFLPKRLSIIHCPGHQKGNSAEARGNRMADQAAREVATRETPETSTLLAGKRTADGSEFEKRTADGSEFESPKKKAKVE

SEQ ID NO: 2303 - protein, 2115 aa, synthetic construct
MPAAKRVKLDGGDKKYSIGLDIGTNSVGWAVITDEYKVPSKKFKVLGNTDRHSIKKNLIGALLFDSGETAEATRLKRTARRRYTRRKNRICYLQEIFSNEMAKVDDSFFHRLEESFLVEEDKKHERHPIFGNIVDEVAYHEKYPTIYHLRKKLVDSTDKADLRLIYLALAHMIKFRGHFLIEGDLNPDNSDVDKLFIQLVQTYNQLFEENPINASGVDAKAILSARLSKSRRLENLIAQLPGEKKNGLFGNLIALSLGLTPNFKSNFDLAEDAKLQLSKDTYDDDLDNLLAQIGDQYADLFLAAKNLSDAILLSDILRVNTEITKAPLSASMIKRYDEHHQDLTLLKALVRQQLPEKYKEIFFDQSKNGYAGYIDGGASQEEFYKFIKPILEKMDGTEELLVKLNREDLLRKQRTFDNGSIPHQIHLGELHAILRRQEDFYPFLKDNREKIEKILTFRIPYYVGPLARGNSRFAWMTRKSEETITPWNFEEVVDKGASAQSFIERMTNFDKNLPNEKVLPKHSLLYEYFTVYNELTKVKYVTEGMRKPAFLSGEQKKAIVDLLFKTNRKVTVKQLKEDYFKKIECFDSVEISGVEDRFNASLGTYHDLLKIIKDKDFLDNEENEDILEDIVLTLTLFEDREMIEERLKTYAHLFDDKVMKQLKRRRYTGWGRLSRKLINGIRDKQSGKTILDFLKSDGFANRNFMQLIHDDSLTFKEDIQKAQVSGQGDSLHEHIANLAGSPAIKKGILQTVKVVDELVKVMGRHKPENIVIEMARENQTTQKGQKNSRERMKRIEEGIKELGSQILKEHPVENTQLQNEKLYLYYLQNGRDMYVDQELDINRLSDYDVDHIVPQSFLKDDSIDNKVLTRSDKARGKSDNVPSEEVVKKMKNYWRQLLNAKLITQRKFDNLTKAERGGLSELDKAGFIKRQLVETRQITKHVAQILDSRMNTKYDENDKLIREVKVITLKSKLVSDFRKDFQFYKVREINNYHHAHDAYLNAVVGTALIKKYPKLESEFVYGDYKVYDVRKMIAKSEQEIGKATAKYFFYSNIMNFFKTEITLANGEIRKRPLIETNGETGEIVWDKGRDFATVRKVLSMPQVNIVKKTEVQTGGFSKESILPKRNSDKLIARKKDWDPKKYGGFDSPTVAYSVLVVAKVEKGKSKKLKSVKELLGITIMERSSFEKNPIDFLEAKGYKEVKKDLIIKLPKYSLFELENGRKRMLASAGELQKGNELALPSKYVNFLYLASHYEKLKGSPEDNEQKQLFVEQHKHYLDEIIEQISEFSKRVILADANLDKVLSAYNKHRDKPIREQAENIIHLFTLTNLGAPAAFKYFDTTIDRKRYTSTKEVLDATLIHQSITGLYETRIDLSQLGGDGGGGGGSGGGGSGGGGSGGGGSGGGGSGGGGSGGTLNIEDEYRLHETSKEPDVSLGSTWLSDFPQAWAETGGMGLAVRQAPLIIPLKATSTPVSIKQYPMSQEARLGIKPHIQRLLDQGILVPCQSPWNTPLLPVKKPGTNDYRPVQDLREVNKRVEDIHPTVPNPYNLLSGLPPSHQWYTVLDLKDAFFCLRLHPTSQPLFAFEWRDPEMGISGQLTWTRLPQGFKNSPTLFNEALHRDLAGFRIQHPDLILLQYVDDLLLAATSELDCQQGTRALLQTLGDLGYRASAKKAQICQKQVKYLGYLLKEGQRWLTEARKETVMGQPIPKTPRQLREFLGKAGFCRLFIPGFAEMAAPLYPLTKPGTLFNWGPDQQKAFQEIKQALLTAPALGLPDLTKPFELFVDEKQGYAKGVLTQKLGPWRRPVAYLSKKLDPVAAGWPPCLRMVAAIAVLTKDAGKLTMGQPLVILAPHAVEALVKQPPDRWLSNARMTHYQALLLDTDRVQFGPVVALNPATLLPLPEEGLQHDCLDILAEAHGTRSDLMDQPLPDADHTWYTDGSSFLQEGQRKAGAAVTTETEVIWARALPAGTSAQRAELIALTQALKMAEGKKLNVYTDSRYAFATAHIHGEIYRRRGWLTSEGKEIKNKDEILALLKALFLPKRLSIIHCPGHQKGNSAEARGNRMADQAAREVATRETPETSTLLAGKRTADGSEFEKRTADGSEFESPKKKAKVE

SEQ ID NO: 2304 - protein, 2103 aa, synthetic construct
MPAAKRVKLDGGDKKYSIGLDIGTNSVGWAVITDEYKVPSKKFKVLGNTDRHSIKKNLIGALLFDSGETAEATRLKRTARRRYTRRKNRICYLQEIFSNEMAKVDDSFFHRLEESFLVEEDKKHERHPIFGNIVDEVAYHEKYPTIYHLRKKLVDSTDKADLRLIYLALAHMIKFRGHFLIEGDLNPDNSDVDKLFIQLVQTYNQLFEENPINASGVDAKAILSARLSKSRRLENLIAQLPGEKKNGLFGNLIALSLGLTPNFKSNFDLAEDAKLQLSKDTYDDDLDNLLAQIGDQYADLFLAAKNLSDAILLSDILRVNTEITKAPLSASMIKRYDEHHQDLTLLKALVRQQLPEKYKEIFFDQSKNGYAGYIDGGASQEEFYKFIKPILEKMDGTEELLVKLNREDLLRKQRTFDNGSIPHQIHLGELHAILRRQEDFYPFLKDNREKIEKILTFRIPYYVGPLARGNSRFAWMTRKSEETITPWNFEEVVDKGASAQSFIERMTNFDKNLPNEKVLPKHSLLYEYFTVYNELTKVKYVTEGMRKPAFLSGEQKKAIVDLLFKTNRKVTVKQLKEDYFKKIECFDSVEISGVEDRFNASLGTYHDLLKIIKDKDFLDNEENEDILEDIVLTLTLFEDREMIEERLKTYAHLFDDKVMKQLKRRRYTGWGRLSRKLINGIRDKQSGKTILDFLKSDGFANRNFMQLIHDDSLTFKEDIQKAQVSGQGDSLHEHIANLAGSPAIKKGILQTVKVVDELVKVMGRHKPENIVIEMARENQTTQKGQKNSRERMKRIEEGIKELGSQILKEHPVENTQLQNEKLYLYYLQNGRDMYVDQELDINRLSDYDVDHIVPQSFLKDDSIDNKVLTRSDKARGKSDNVPSEEVVKKMKNYWRQLLNAKLITQRKFDNLTKAERGGLSELDKAGFIKRQLVETRQITKHVAQILDSRMNTKYDENDKLIREVKVITLKSKLVSDFRKDFQFYKVREINNYHHAHDAYLNAVVGTALIKKYPKLESEFVYGDYKVYDVRKMIAKSEQEIGKATAKYFFYSNIMNFFKTEITLANGEIRKRPLIETNGETGEIVWDKGRDFATVRKVLSMPQVNIVKKTEVQTGGFSKESILPKRNSDKLIARKKDWDPKKYGGFDSPTVAYSVLVVAKVEKGKSKKLKSVKELLGITIMERSSFEKNPIDFLEAKGYKEVKKDLIIKLPKYSLFELENGRKRMLASAGELQKGNELALPSKYVNFLYLASHYEKLKGSPEDNEQKQLFVEQHKHYLDEIIEQISEFSKRVILADANLDKVLSAYNKHRDKPIREQAENIIHLFTLTNLGAPAAFKYFDTTIDRKRYTSTKEVLDATLIHQSITGLYETRIDLSQLGGDGGGSSGSSGSSGSSGSSGSSGGTLNIEDEYRLHETSKEPDVSLGSTWLSDFPQAWAETGGMGLAVRQAPLIIPLKATSTPVSIKQYPMSQEARLGIKPHIQRLLDQGILVPCQSPWNTPLLPVKKPGTNDYRPVQDLREVNKRVEDIHPTVPNPYNLLSGLPPSHQWYTVLDLKDAFFCLRLHPTSQPLFAFEWRDPEMGISGQLTWTRLPQGFKNSPTLFNEALHRDLAGFRIQHPDLILLQYVDDLLLAATSELDCQQGTRALLQTLGDLGYRASAKKAQICQKQVKYLGYLLKEGQRWLTEARKETVMGQPIPKTPRQLREFLGKAGFCRLFIPGFAEMAAPLYPLTKPGTLFNWGPDQQKAFQEIKQALLTAPALGLPDLTKPFELFVDEKQGYAKGVLTQKLGPWRRPVAYLSKKLDPVAAGWPPCLRMVAAIAVLTKDAGKLTMGQPLVILAPHAVEALVKQPPDRWLSNARMTHYQALLLDTDRVQFGPVVALNPATLLPLPEEGLQHDCLDILAEAHGTRSDLMDQPLPDADHTWYTDGSSFLQEGQRKAGAAVTTETEVIWARALPAGTSAQRAELIALTQALKMAEGKKLNVYTDSRYAFATAHIHGEIYRRRGWLTSEGKEIKNKDEILALLKALFLPKRLSIIHCPGHQKGNSAEARGNRMADQAAREVATRETPETSTLLAGKRTADGSEFEKRTADGSEFESPKKKAKVE

SEQ ID NO: 2305 - protein, 2100 aa, synthetic construct
MPAAKRVKLDGGDKKYSIGLDIGTNSVGWAVITDEYKVPSKKFKVLGNTDRHSIKKNLIGALLFDSGETAEATRLKRTARRRYTRRKNRICYLQEIFSNEMAKVDDSFFHRLEESFLVEEDKKHERHPIFGNIVDEVAYHEKYPTIYHLRKKLVDSTDKADLRLIYLALAHMIKFRGHFLIEGDLNPDNSDVDKLFIQLVQTYNQLFEENPINASGVDAKAILSARLSKSRRLENLIAQLPGEKKNGLFGNLIALSLGLTPNFKSNFDLAEDAKLQLSKDTYDDDLDNLLAQIGDQYADLFLAAKNLSDAILLSDILRVNTEITKAPLSASMIKRYDEHHQDLTLLKALVRQQLPEKYKEIFFDQSKNGYAGYIDGGASQEEFYKFIKPILEKMDGTEELLVKLNREDLLRKQRTFDNGSIPHQIHLGELHAILRRQEDFYPFLKDNREKIEKILTFRIPYYVGPLARGNSRFAWMTRKSEETITPWNFEEVVDKGASAQSFIERMTNFDKNLPNEKVLPKHSLLYEYFTVYNELTKVKYVTEGMRKPAFLSGEQKKAIVDLLFKTNRKVTVKQLKEDYFKKIECFDSVEISGVEDRFNASLGTYHDLLKIIKDKDFLDNEENEDILEDIVLTLTLFEDREMIEERLKTYAHLFDDKVMKQLKRRRYTGWGRLSRKLINGIRDKQSGKTILDFLKSDGFANRNFMQLIHDDSLTFKEDIQKAQVSGQGDSLHEHIANLAGSPAIKKGILQTVKVVDELVKVMGRHKPENIVIEMARENQTTQKGQKNSRERMKRIEEGIKELGSQILKEHPVENTQLQNEKLYLYYLQNGRDMYVDQELDINRLSDYDVDHIVPQSFLKDDSIDNKVLTRSDKARGKSDNVPSEEVVKKMKNYWRQLLNAKLITQRKFDNLTKAERGGLSELDKAGFIKRQLVETRQITKHVAQILDSRMNTKYDENDKLIREVKVITLKSKLVSDFRKDFQFYKVREINNYHHAHDAYLNAVVGTALIKKYPKLESEFVYGDYKVYDVRKMIAKSEQEIGKATAKYFFYSNIMNFFKTEITLANGEIRKRPLIETNGETGEIVWDKGRDFATVRKVLSMPQVNIVKKTEVQTGGFSKESILPKRNSDKLIARKKDWDPKKYGGFDSPTVAYSVLVVAKVEKGKSKKLKSVKELLGITIMERSSFEKNPIDFLEAKGYKEVKKDLIIKLPKYSLFELENGRKRMLASAGELQKGNELALPSKYVNFLYLASHYEKLKGSPEDNEQKQLFVEQHKHYLDEIIEQISEFSKRVILADANLDKVLSAYNKHRDKPIREQAENIIHLFTLTNLGAPAAFKYFDTTIDRKRYTSTKEVLDATLIHQSITGLYETRIDLSQLGGDGGEAAAKGGGGSEAAAKGGTLNIEDEYRLHETSKEPDVSLGSTWLSDFPQAWAETGGMGLAVRQAPLIIPLKATSTPVSIKQYPMSQEARLGIKPHIQRLLDQGILVPCQSPWNTPLLPVKKPGTNDYRPVQDLREVNKRVEDIHPTVPNPYNLLSGLPPSHQWYTVLDLKDAFFCLRLHPTSQPLFAFEWRDPEMGISGQLTWTRLPQGFKNSPTLFNEALHRDLAGFRIQHPDLILLQYVDDLLLAATSELDCQQGTRALLQTLGDLGYRASAKKAQICQKQVKYLGYLLKEGQRWLTEARKETVMGQPIPKTPRQLREFLGKAGFCRLFIPGFAEMAAPLYPLTKPGTLFNWGPDQQKAFQEIKQALLTAPALGLPDLTKPFELFVDEKQGYAKGVLTQKLGPWRRPVAYLSKKLDPVAAGWPPCLRMVAAIAVLTKDAGKLTMGQPLVILAPHAVEALVKQPPDRWLSNARMTHYQALLLDTDRVQFGPVVALNPATLLPLPEEGLQHDCLDILAEAHGTRSDLMDQPLPDADHTWYTDGSSFLQEGQRKAGAAVTTETEVIWARALPAGTSAQRAELIALTQALKMAEGKKLNVYTDSRYAFATAHIHGEIYRRRGWLTSEGKEIKNKDEILALLKALFLPKRLSIIHCPGHQKGNSAEARGNRMADQAAREVATRETPETSTLLAGKRTADGSEFEKRTADGSEFESPKKKAKVE

SEQ ID NO: 2306 - protein, 2096 aa, synthetic construct
MPAAKRVKLDGGDKKYSIGLDIGTNSVGWAVITDEYKVPSKKFKVLGNTDRHSIKKNLIGALLFDSGETAEATRLKRTARRRYTRRKNRICYLQEIFSNEMAKVDDSFFHRLEESFLVEEDKKHERHPIFGNIVDEVAYHEKYPTIYHLRKKLVDSTDKADLRLIYLALAHMIKFRGHFLIEGDLNPDNSDVDKLFIQLVQTYNQLFEENPINASGVDAKAILSARLSKSRRLENLIAQLPGEKKNGLFGNLIALSLGLTPNFKSNFDLAEDAKLQLSKDTYDDDLDNLLAQIGDQYADLFLAAKNLSDAILLSDILRVNTEITKAPLSASMIKRYDEHHQDLTLLKALVRQQLPEKYKEIFFDQSKNGYAGYIDGGASQEEFYKFIKPILEKMDGTEELLVKLNREDLLRKQRTFDNGSIPHQIHLGELHAILRRQEDFYPFLKDNREKIEKILTFRIPYYVGPLARGNSRFAWMTRKSEETITPWNFEEVVDKGASAQSFIERMTNFDKNLPNEKVLPKHSLLYEYFTVYNELTKVKYVTEGMRKPAFLSGEQKKAIVDLLFKTNRKVTVKQLKEDYFKKIECFDSVEISGVEDRFNASLGTYHDLLKIIKDKDFLDNEENEDILEDIVLTLTLFEDREMIEERLKTYAHLFDDKVMKQLKRRRYTGWGRLSRKLINGIRDKQSGKTILDFLKSDGFANRNFMQLIHDDSLTFKEDIQKAQVSGQGDSLHEHIANLAGSPAIKKGILQTVKVVDELVKVMGRHKPENIVIEMARENQTTQKGQKNSRERMKRIEEGIKELGSQILKEHPVENTQLQNEKLYLYYLQNGRDMYVDQELDINRLSDYDVDHIVPQSFLKDDSIDNKVLTRSDKARGKSDNVPSEEVVKKMKNYWRQLLNAKLITQRKFDNLTKAERGGLSELDKAGFIKRQLVETRQITKHVAQILDSRMNTKYDENDKLIREVKVITLKSKLVSDFRKDFQFYKVREINNYHHAHDAYLNAVVGTALIKKYPKLESEFVYGDYKVYDVRKMIAKSEQEIGKATAKYFFYSNIMNFFKTEITLANGEIRKRPLIETNGETGEIVWDKGRDFATVRKVLSMPQVNIVKKTEVQTGGFSKESILPKRNSDKLIARKKDWDPKKYGGFDSPTVAYSVLVVAKVEKGKSKKLKSVKELLGITIMERSSFEKNPIDFLEAKGYKEVKKDLIIKLPKYSLFELENGRKRMLASAGELQKGNELALPSKYVNFLYLASHYEKLKGSPEDNEQKQLFVEQHKHYLDEIIEQISEFSKRVILADANLDKVLSAYNKHRDKPIREQAENIIHLFTLTNLGAPAAFKYFDTTIDRKRYTSTKEVLDATLIHQSITGLYETRIDLSQLGGDGGGGGEAAAKGGSGGTLNIEDEYRLHETSKEPDVSLGSTWLSDFPQAWAETGGMGLAVRQAPLIIPLKATSTPVSIKQYPMSQEARLGIKPHIQRLLDQGILVPCQSPWNTPLLPVKKPGTNDYRPVQDLREVNKRVEDIHPTVPNPYNLLSGLPPSHQWYTVLDLKDAFFCLRLHPTSQPLFAFEWRDPEMGISGQLTWTRLPQGFKNSPTLFNEALHRDLAGFRIQHPDLILLQYVDDLLLAATSELDCQQGTRALLQTLGDLGYRASAKKAQICQKQVKYLGYLLKEGQRWLTEARKETVMGQPIPKTPRQLREFLGKAGFCRLFIPGFAEMAAPLYPLTKPGTLFNWGPDQQKAFQEIKQALLTAPALGLPDLTKPFELFVDEKQGYAKGVLTQKLGPWRRPVAYLSKKLDPVAAGWPPCLRMVAAIAVLTKDAGKLTMGQPLVILAPHAVEALVKQPPDRWLSNARMTHYQALLLDTDRVQFGPVVALNPATLLPLPEEGLQHDCLDILAEAHGTRSDLMDQPLPDADHTWYTDGSSFLQEGQRKAGAAVTTETEVIWARALPAGTSAQRAELIALTQALKMAEGKKLNVYTDSRYAFATAHIHGEIYRRRGWLTSEGKEIKNKDEILALLKALFLPKRLSIIHCPGHQKGNSAEARGNRMADQAAREVATRETPETSTLLAGKRTADGSEFEKRTADGSEFESPKKKAKVE

SEQ ID NO: 2307 - protein, 2092 aa, synthetic construct
MPAAKRVKLDGGDKKYSIGLDIGTNSVGWAVITDEYKVPSKKFKVLGNTDRHSIKKNLIGALLFDSGETAEATRLKRTARRRYTRRKNRICYLQEIFSNEMAKVDDSFFHRLEESFLVEEDKKHERHPIFGNIVDEVAYHEKYPTIYHLRKKLVDSTDKADLRLIYLALAHMIKFRGHFLIEGDLNPDNSDVDKLFIQLVQTYNQLFEENPINASGVDAKAILSARLSKSRRLENLIAQLPGEKKNGLFGNLIALSLGLTPNFKSNFDLAEDAKLQLSKDTYDDDLDNLLAQIGDQYADLFLAAKNLSDAILLSDILRVNTEITKAPLSASMIKRYDEHHQDLTLLKALVRQQLPEKYKEIFFDQSKNGYAGYIDGGASQEEFYKFIKPILEKMDGTEELLVKLNREDLLRKQRTFDNGSIPHQIHLGELHAILRRQEDFYPFLKDNREKIEKILTFRIPYYVGPLARGNSRFAWMTRKSEETITPWNFEEVVDKGASAQSFIERMTNFDKNLPNEKVLPKHSLLYEYFTVYNELTKVKYVTEGMRKPAFLSGEQKKAIVDLLFKTNRKVTVKQLKEDYFKKIECFDSVEISGVEDRFNASLGTYHDLLKIIKDKDFLDNEENEDILEDIVLTLTLFEDREMIEERLKTYAHLFDDKVMKQLKRRRYTGWGRLSRKLINGIRDKQSGKTILDFLKSDGFANRNFMQLIHDDSLTFKEDIQKAQVSGQGDSLHEHIANLAGSPAIKKGILQTVKVVDELVKVMGRHKPENIVIEMARENQTTQKGQKNSRERMKRIEEGIKELGSQILKEHPVENTQLQNEKLYLYYLQNGRDMYVDQELDINRLSDYDVDHIVPQSFLKDDSIDNKVLTRSDKARGKSDNVPSEEVVKKMKNYWRQLLNAKLITQRKFDNLTKAERGGLSELDKAGFIKRQLVETRQITKHVAQILDSRMNTKYDENDKLIREVKVITLKSKLVSDFRKDFQFYKVREINNYHHAHDAYLNAVVGTALIKKYPKLESEFVYGDYKVYDVRKMIAKSEQEIGKATAKYFFYSNIMNFFKTEITLANGEIRKRPLIETNGETGEIVWDKGRDFATVRKVLSMPQVNIVKKTEVQTGGFSKESILPKRNSDKLIARKKDWDPKKYGGFDSPTVAYSVLVVAKVEKGKSKKLKSVKELLGITIMERSSFEKNPIDFLEAKGYKEVKKDLIIKLPKYSLFELENGRKRMLASAGELQKGNELALPSKYVNFLYLASHYEKLKGSPEDNEQKQLFVEQHKHYLDEIIEQISEFSKRVILADANLDKVLSAYNKHRDKPIREQAENIIHLFTLTNLGAPAAFKYFDTTIDRKRYTSTKEVLDATLIHQSITGLYETRIDLSQLGGDGGGGGGGGGGGTLNIEDEYRLHETSKEPDVSLGSTWLSDFPQAWAETGGMGLAVRQAPLIIPLKATSTPVSIKQYPMSQEARLGIKPHIQRLLDQGILVPCQSPWNTPLLPVKKPGTNDYRPVQDLREVNKRVEDIHPTVPNPYNLLSGLPPSHQWYTVLDLKDAFFCLRLHPTSQPLFAFEWRDPEMGISGQLTWTRLPQGFKNSPTLFNEALHRDLAGFRIQHPDLILLQYVDDLLLAATSELDCQQGTRALLQTLGDLGYRASAKKAQICQKQVKYLGYLLKEGQRWLTEARKETVMGQPIPKTPRQLREFLGKAGFCRLFIPGFAEMAAPLYPLTKPGTLFNWGPDQQKAFQEIKQALLTAPALGLPDLTKPFELFVDEKQGYAKGVLTQKLGPWRRPVAYLSKKLDPVAAGWPPCLRMVAAIAVLTKDAGKLTMGQPLVILAPHAVEALVKQPPDRWLSNARMTHYQALLLDTDRVQFGPVVALNPATLLPLPEEGLQHDCLDILAEAHGTRSDLMDQPLPDADHTWYTDGSSFLQEGQRKAGAAVTTETEVIWARALPAGTSAQRAELIALTQALKMAEGKKLNVYTDSRYAFATAHIHGEIYRRRGWLTSEGKEIKNKDEILALLKALFLPKRLSIIHCPGHQKGNSAEARGNRMADQAAREVATRETPETSTLLAGKRTADGSEFEKRTADGSEFESPKKKAKVE

SEQ ID NO: 2308 - protein, 2094 aa, synthetic construct
MPAAKRVKLDGGDKKYSIGLDIGTNSVGWAVITDEYKVPSKKFKVLGNTDRHSIKKNLIGALLFDSGETAEATRLKRTARRRYTRRKNRICYLQEIFSNEMAKVDDSFFHRLEESFLVEEDKKHERHPIFGNIVDEVAYHEKYPTIYHLRKKLVDSTDKADLRLIYLALAHMIKFRGHFLIEGDLNPDNSDVDKLFIQLVQTYNQLFEENPINASGVDAKAILSARLSKSRRLENLIAQLPGEKKNGLFGNLIALSLGLTPNFKSNFDLAEDAKLQLSKDTYDDDLDNLLAQIGDQYADLFLAAKNLSDAILLSDILRVNTEITKAPLSASMIKRYDEHHQDLTLLKALVRQQLPEKYKEIFFDQSKNGYAGYIDGGASQEEFYKFIKPILEKMDGTEELLVKLNREDLLRKQRTFDNGSIPHQIHLGELHAILRRQEDFYPFLKDNREKIEKILTFRIPYYVGPLARGNSRFAWMTRKSEETITPWNFEEVVDKGASAQSFIERMTNFDKNLPNEKVLPKHSLLYEYFTVYNELTKVKYVTEGMRKPAFLSGEQKKAIVDLLFKTNRKVTVKQLKEDYFKKIECFDSVEISGVEDRFNASLGTYHDLLKIIKDKDFLDNEENEDILEDIVLTLTLFEDREMIEERLKTYAHLFDDKVMKQLKRRRYTGWGRLSRKLINGIRDKQSGKTILDFLKSDGFANRNFMQLIHDDSLTFKEDIQKAQVSGQGDSLHEHIANLAGSPAIKKGILQTVKVVDELVKVMGRHKPENIVIEMARENQTTQKGQKNSRERMKRIEEGIKELGSQILKEHPVENTQLQNEKLYLYYLQNGRDMYVDQELDINRLSDYDVDHIVPQSFLKDDSIDNKVLTRSDKARGKSDNVPSEEVVKKMKNYWRQLLNAKLITQRKFDNLTKAERGGLSELDKAGFIKRQLVETRQITKHVAQILDSRMNTKYDENDKLIREVKVITLKSKLVSDFRKDFQFYKVREINNYHHAHDAYLNAVVGTALIKKYPKLESEFVYGDYKVYDVRKMIAKSEQEIGKATAKYFFYSNIMNFFKTEITLANGEIRKRPLIETNGETGEIVWDKGRDFATVRKVLSMPQVNIVKKTEVQTGGFSKESILPKRNSDKLIARKKDWDPKKYGGFDSPTVAYSVLVVAKVEKGKSKKLKSVKELLGITIMERSSFEKNPIDFLEAKGYKEVKKDLIIKLPKYSLFELENGRKRMLASAGELQKGNELALPSKYVNFLYLASHYEKLKGSPEDNEQKQLFVEQHKHYLDEIIEQISEFSKRVILADANLDKVLSAYNKHRDKPIREQAENIIHLFTLTNLGAPAAFKYFDTTIDRKRYTSTKEVLDATLIHQSITGLYETRIDLSQLGGDGGPAPGGGGSSGGTLNIEDEYRLHETSKEPDVSLGSTWLSDFPQAWAETGGMGLAVRQAPLIIPLKATSTPVSIKQYPMSQEARLGIKPHIQRLLDQGILVPCQSPWNTPLLPVKKPGTNDYRPVQDLREVNKRVEDIHPTVPNPYNLLSGLPPSHQWYTVLDLKDAFFCLRLHPTSQPLFAFEWRDPEMGISGQLTWTRLPQGFKNSPTLFNEALHRDLAGFRIQHPDLILLQYVDDLLLAATSELDCQQGTRALLQTLGDLGYRASAKKAQICQKQVKYLGYLLKEGQRWLTEARKETVMGQPIPKTPRQLREFLGKAGFCRLFIPGFAEMAAPLYPLTKPGTLFNWGPDQQKAFQEIKQALLTAPALGLPDLTKPFELFVDEKQGYAKGVLTQKLGPWRRPVAYLSKKLDPVAAGWPPCLRMVAAIAVLTKDAGKLTMGQPLVILAPHAVEALVKQPPDRWLSNARMTHYQALLLDTDRVQFGPVVALNPATLLPLPEEGLQHDCLDILAEAHGTRSDLMDQPLPDADHTWYTDGSSFLQEGQRKAGAAVTTETEVIWARALPAGTSAQRAELIALTQALKMAEGKKLNVYTDSRYAFATAHIHGEIYRRRGWLTSEGKEIKNKDEILALLKALFLPKRLSIIHCPGHQKGNSAEARGNRMADQAAREVATRETPETSTLLAGKRTADGSEFEKRTADGSEFESPKKKAKVE

SEQ ID NO: 2309 - protein, 2098 aa, synthetic construct
MPAAKRVKLDGGDKKYSIGLDIGTNSVGWAVITDEYKVPSKKFKVLGNTDRHSIKKNLIGALLFDSGETAEATRLKRTARRRYTRRKNRICYLQEIFSNEMAKVDDSFFHRLEESFLVEEDKKHERHPIFGNIVDEVAYHEKYPTIYHLRKKLVDSTDKADLRLIYLALAHMIKFRGHFLIEGDLNPDNSDVDKLFIQLVQTYNQLFEENPINASGVDAKAILSARLSKSRRLENLIAQLPGEKKNGLFGNLIALSLGLTPNFKSNFDLAEDAKLQLSKDTYDDDLDNLLAQIGDQYADLFLAAKNLSDAILLSDILRVNTEITKAPLSASMIKRYDEHHQDLTLLKALVRQQLPEKYKEIFFDQSKNGYAGYIDGGASQEEFYKFIKPILEKMDGTEELLVKLNREDLLRKQRTFDNGSIPHQIHLGELHAILRRQEDFYPFLKDNREKIEKILTFRIPYYVGPLARGNSRFAWMTRKSEETITPWNFEEVVDKGASAQSFIERMTNFDKNLPNEKVLPKHSLLYEYFTVYNELTKVKYVTEGMRKPAFLSGEQKKAIVDLLFKTNRKVTVKQLKEDYFKKIECFDSVEISGVEDRFNASLGTYHDLLKIIKDKDFLDNEENEDILEDIVLTLTLFEDREMIEERLKTYAHLFDDKVMKQLKRRRYTGWGRLSRKLINGIRDKQSGKTILDFLKSDGFANRNFMQLIHDDSLTFKEDIQKAQVSGQGDSLHEHIANLAGSPAIKKGILQTVKVVDELVKVMGRHKPENIVIEMARENQTTQKGQKNSRERMKRIEEGIKELGSQILKEHPVENTQLQNEKLYLYYLQNGRDMYVDQELDINRLSDYDVDHIVPQSFLKDDSIDNKVLTRSDKARGKSDNVPSEEVVKKMKNYWRQLLNAKLITQRKFDNLTKAERGGLSELDKAGFIKRQLVETRQITKHVAQILDSRMNTKYDENDKLIREVKVITLKSKLVSDFRKDFQFYKVREINNYHHAHDAYLNAVVGTALIKKYPKLESEFVYGDYKVYDVRKMIAKSEQEIGKATAKYFFYSNIMNFFKTEITLANGEIRKRPLIETNGETGEIVWDKGRDFATVRKVLSMPQVNIVKKTEVQTGGFSKESILPKRNSDKLIARKKDWDPKKYGGFDSPTVAYSVLVVAKVEKGKSKKLKSVKELLGITIMERSSFEKNPIDFLEAKGYKEVKKDLIIKLPKYSLFELENGRKRMLASAGELQKGNELALPSKYVNFLYLASHYEKLKGSPEDNEQKQLFVEQHKHYLDEIIEQISEFSKRVILADANLDKVLSAYNKHRDKPIREQAENIIHLFTLTNLGAPAAFKYFDTTIDRKRYTSTKEVLDATLIHQSITGLYETRIDLSQLGGDGGPAPAPAPAPAPAPGGTLNIEDEYRLHETSKEPDVSLGSTWLSDFPQAWAETGGMGLAVRQAPLIIPLKATSTPVSIKQYPMSQEARLGIKPHIQRLLDQGILVPCQSPWNTPLLPVKKPGTNDYRPVQDLREVNKRVEDIHPTVPNPYNLLSGLPPSHQWYTVLDLKDAFFCLRLHPTSQPLFAFEWRDPEMGISGQLTWTRLPQGFKNSPTLFNEALHRDLAGFRIQHPDLILLQYVDDLLLAATSELDCQQGTRALLQTLGDLGYRASAKKAQICQKQVKYLGYLLKEGQRWLTEARKETVMGQPIPKTPRQLREFLGKAGFCRLFIPGFAEMAAPLYPLTKPGTLFNWGPDQQKAFQEIKQALLTAPALGLPDLTKPFELFVDEKQGYAKGVLTQKLGPWRRPVAYLSKKLDPVAAGWPPCLRMVAAIAVLTKDAGKLTMGQPLVILAPHAVEALVKQPPDRWLSNARMTHYQALLLDTDRVQFGPVVALNPATLLPLPEEGLQHDCLDILAEAHGTRSDLMDQPLPDADHTWYTDGSSFLQEGQRKAGAAVTTETEVIWARALPAGTSAQRAELIALTQALKMAEGKKLNVYTDSRYAFATAHIHGEIYRRRGWLTSEGKEIKNKDEILALLKALFLPKRLSIIHCPGHQKGNSAEARGNRMADQAAREVATRETPETSTLLAGKRTADGSEFEKRTADGSEFESPKKKAKVE

SEQ ID NO: 2310 - protein, 2100 aa, synthetic construct
MPAAKRVKLDGGDKKYSIGLDIGTNSVGWAVITDEYKVPSKKFKVLGNTDRHSIKKNLIGALLFDSGETAEATRLKRTARRRYTRRKNRICYLQEIFSNEMAKVDDSFFHRLEESFLVEEDKKHERHPIFGNIVDEVAYHEKYPTIYHLRKKLVDSTDKADLRLIYLALAHMIKFRGHFLIEGDLNPDNSDVDKLFIQLVQTYNQLFEENPINASGVDAKAILSARLSKSRRLENLIAQLPGEKKNGLFGNLIALSLGLTPNFKSNFDLAEDAKLQLSKDTYDDDLDNLLAQIGDQYADLFLAAKNLSDAILLSDILRVNTEITKAPLSASMIKRYDEHHQDLTLLKALVRQQLPEKYKEIFFDQSKNGYAGYIDGGASQEEFYKFIKPILEKMDGTEELLVKLNREDLLRKQRTFDNGSIPHQIHLGELHAILRRQEDFYPFLKDNREKIEKILTFRIPYYVGPLARGNSRFAWMTRKSEETITPWNFEEVVDKGASAQSFIERMTNFDKNLPNEKVLPKHSLLYEYFTVYNELTKVKYVTEGMRKPAFLSGEQKKAIVDLLFKTNRKVTVKQLKEDYFKKIECFDSVEISGVEDRFNASLGTYHDLLKIIKDKDFLDNEENEDILEDIVLTLTLFEDREMIEERLKTYAHLFDDKVMKQLKRRRYTGWGRLSRKLINGIRDKQSGKTILDFLKSDGFANRNFMQLIHDDSLTFKEDIQKAQVSGQGDSLHEHIANLAGSPAIKKGILQTVKVVDELVKVMGRHKPENIVIEMARENQTTQKGQKNSRERMKRIEEGIKELGSQILKEHPVENTQLQNEKLYLYYLQNGRDMYVDQELDINRLSDYDVDHIVPQSFLKDDSIDNKVLTRSDKARGKSDNVPSEEVVKKMKNYWRQLLNAKLITQRKFDNLTKAERGGLSELDKAGFIKRQLVETRQITKHVAQILDSRMNTKYDENDKLIREVKVITLKSKLVSDFRKDFQFYKVREINNYHHAHDAYLNAVVGTALIKKYPKLESEFVYGDYKVYDVRKMIAKSEQEIGKATAKYFFYSNIMNFFKTEITLANGEIRKRPLIETNGETGEIVWDKGRDFATVRKVLSMPQVNIVKKTEVQTGGFSKESILPKRNSDKLIARKKDWDPKKYGGFDSPTVAYSVLVVAKVEKGKSKKLKSVKELLGITIMERSSFEKNPIDFLEAKGYKEVKKDLIIKLPKYSLFELENGRKRMLASAGELQKGNELALPSKYVNFLYLASHYEKLKGSPEDNEQKQLFVEQHKHYLDEIIEQISEFSKRVILADANLDKVLSAYNKHRDKPIREQAENIIHLFTLTNLGAPAAFKYFDTTIDRKRYTSTKEVLDATLIHQSITGLYETRIDLSQLGGDGGGGSGGSGGSGGSGGSGGTLNIEDEYRLHETSKEPDVSLGSTWLSDFPQAWAETGGMGLAVRQAPLIIPLKATSTPVSIKQYPMSQEARLGIKPHIQRLLDQGILVPCQSPWNTPLLPVKKPGTNDYRPVQDLREVNKRVEDIHPTVPNPYNLLSGLPPSHQWYTVLDLKDAFFCLRLHPTSQPLFAFEWRDPEMGISGQLTWTRLPQGFKNSPTLFNEALHRDLAGFRIQHPDLILLQYVDDLLLAATSELDCQQGTRALLQTLGDLGYRASAKKAQICQKQVKYLGYLLKEGQRWLTEARKETVMGQPIPKTPRQLREFLGKAGFCRLFIPGFAEMAAPLYPLTKPGTLFNWGPDQQKAFQEIKQALLTAPALGLPDLTKPFELFVDEKQGYAKGVLTQKLGPWRRPVAYLSKKLDPVAAGWPPCLRMVAAIAVLTKDAGKLTMGQPLVILAPHAVEALVKQPPDRWLSNARMTHYQALLLDTDRVQFGPVVALNPATLLPLPEEGLQHDCLDILAEAHGTRSDLMDQPLPDADHTWYTDGSSFLQEGQRKAGAAVTTETEVIWARALPAGTSAQRAELIALTQALKMAEGKKLNVYTDSRYAFATAHIHGEIYRRRGWLTSEGKEIKNKDEILALLKALFLPKRLSIIHCPGHQKGNSAEARGNRMADQAAREVATRETPETSTLLAGKRTADGSEFEKRTADGSEFESPKKKAKVE

SEQ ID NO: 2311 - protein, 2105 aa, synthetic construct
MPAAKRVKLDGGDKKYSIGLDIGTNSVGWAVITDEYKVPSKKFKVLGNTDRHSIKKNLIGALLFDSGETAEATRLKRTARRRYTRRKNRICYLQEIFSNEMAKVDDSFFHRLEESFLVEEDKKHERHPIFGNIVDEVAYHEKYPTIYHLRKKLVDSTDKADLRLIYLALAHMIKFRGHFLIEGDLNPDNSDVDKLFIQLVQTYNQLFEENPINASGVDAKAILSARLSKSRRLENLIAQLPGEKKNGLFGNLIALSLGLTPNFKSNFDLAEDAKLQLSKDTYDDDLDNLLAQIGDQYADLFLAAKNLSDAILLSDILRVNTEITKAPLSASMIKRYDEHHQDLTLLKALVRQQLPEKYKEIFFDQSKNGYAGYIDGGASQEEFYKFIKPILEKMDGTEELLVKLNREDLLRKQRTFDNGSIPHQIHLGELHAILRRQEDFYPFLKDNREKIEKILTFRIPYYVGPLARGNSRFAWMTRKSEETITPWNFEEVVDKGASAQSFIERMTNFDKNLPNEKVLPKHSLLYEYFTVYNELTKVKYVTEGMRKPAFLSGEQKKAIVDLLFKTNRKVTVKQLKEDYFKKIECFDSVEISGVEDRFNASLGTYHDLLKIIKDKDFLDNEENEDILEDIVLTLTLFEDREMIEERLKTYAHLFDDKVMKQLKRRRYTGWGRLSRKLINGIRDKQSGKTILDFLKSDGFANRNFMQLIHDDSLTFKEDIQKAQVSGQGDSLHEHIANLAGSPAIKKGILQTVKVVDELVKVMGRHKPENIVIEMARENQTTQKGQKNSRERMKRIEEGIKELGSQILKEHPVENTQLQNEKLYLYYLQNGRDMYVDQELDINRLSDYDVDHIVPQSFLKDDSIDNKVLTRSDKARGKSDNVPSEEVVKKMKNYWRQLLNAKLITQRKFDNLTKAERGGLSELDKAGFIKRQLVETRQITKHVAQILDSRMNTKYDENDKLIREVKVITLKSKLVSDFRKDFQFYKVREINNYHHAHDAYLNAVVGTALIKKYPKLESEFVYGDYKVYDVRKMIAKSEQEIGKATAKYFFYSNIMNFFKTEITLANGEIRKRPLIETNGETGEIVWDKGRDFATVRKVLSMPQVNIVKKTEVQTGGFSKESILPKRNSDKLIARKKDWDPKKYGGFDSPTVAYSVLVVAKVEKGKSKKLKSVKELLGITIMERSSFEKNPIDFLEAKGYKEVKKDLIIKLPKYSLFELENGRKRMLASAGELQKGNELALPSKYVNFLYLASHYEKLKGSPEDNEQKQLFVEQHKHYLDEIIEQISEFSKRVILADANLDKVLSAYNKHRDKPIREQAENIIHLFTLTNLGAPAAFKYFDTTIDRKRYTSTKEVLDATLIHQSITGLYETRIDLSQLGGDGGGGGGSGGGGSGGGGSGGGGSGGTLNIEDEYRLHETSKEPDVSLGSTWLSDFPQAWAETGGMGLAVRQAPLIIPLKATSTPVSIKQYPMSQEARLGIKPHIQRLLDQGILVPCQSPWNTPLLPVKKPGTNDYRPVQDLREVNKRVEDIHPTVPNPYNLLSGLPPSHQWYTVLDLKDAFFCLRLHPTSQPLFAFEWRDPEMGISGQLTWTRLPQGFKNSPTLFNEALHRDLAGFRIQHPDLILLQYVDDLLLAATSELDCQQGTRALLQTLGDLGYRASAKKAQICQKQVKYLGYLLKEGQRWLTEARKETVMGQPIPKTPRQLREFLGKAGFCRLFIPGFAEMAAPLYPLTKPGTLFNWGPDQQKAFQEIKQALLTAPALGLPDLTKPFELFVDEKQGYAKGVLTQKLGPWRRPVAYLSKKLDPVAAGWPPCLRMVAAIAVLTKDAGKLTMGQPLVILAPHAVEALVKQPPDRWLSNARMTHYQALLLDTDRVQFGPVVALNPATLLPLPEEGLQHDCLDILAEAHGTRSDLMDQPLPDADHTWYTDGSSFLQEGQRKAGAAVTTETEVIWARALPAGTSAQRAELIALTQALKMAEGKKLNVYTDSRYAFATAHIHGEIYRRRGWLTSEGKEIKNKDEILALLKALFLPKRLSIIHCPGHQKGNSAEARGNRMADQAAREVATRETPETSTLLAGKRTADGSEFEKRTADGSEFESPKKKAKVE

SEQ ID NO: 2312 - protein, 2094 aa, synthetic construct
MPAAKRVKLDGGDKKYSIGLDIGTNSVGWAVITDEYKVPSKKFKVLGNTDRHSIKKNLIGALLFDSGETAEATRLKRTARRRYTRRKNRICYLQEIFSNEMAKVDDSFFHRLEESFLVEEDKKHERHPIFGNIVDEVAYHEKYPTIYHLRKKLVDSTDKADLRLIYLALAHMIKFRGHFLIEGDLNPDNSDVDKLFIQLVQTYNQLFEENPINASGVDAKAILSARLSKSRRLENLIAQLPGEKKNGLFGNLIALSLGLTPNFKSNFDLAEDAKLQLSKDTYDDDLDNLLAQIGDQYADLFLAAKNLSDAILLSDILRVNTEITKAPLSASMIKRYDEHHQDLTLLKALVRQQLPEKYKEIFFDQSKNGYAGYIDGGASQEEFYKFIKPILEKMDGTEELLVKLNREDLLRKQRTFDNGSIPHQIHLGELHAILRRQEDFYPFLKDNREKIEKILTFRIPYYVGPLARGNSRFAWMTRKSEETITPWNFEEVVDKGASAQSFIERMTNFDKNLPNEKVLPKHSLLYEYFTVYNELTKVKYVTEGMRKPAFLSGEQKKAIVDLLFKTNRKVTVKQLKEDYFKKIECFDSVEISGVEDRFNASLGTYHDLLKIIKDKDFLDNEENEDILEDIVLTLTLFEDREMIEERLKTYAHLFDDKVMKQLKRRRYTGWGRLSRKLINGIRDKQSGKTILDFLKSDGFANRNFMQLIHDDSLTFKEDIQKAQVSGQGDSLHEHIANLAGSPAIKKGILQTVKVVDELVKVMGRHKPENIVIEMARENQTTQKGQKNSRERMKRIEEGIKELGSQILKEHPVENTQLQNEKLYLYYLQNGRDMYVDQELDINRLSDYDVDHIVPQSFLKDDSIDNKVLTRSDKARGKSDNVPSEEVVKKMKNYWRQLLNAKLITQRKFDNLTKAERGGLSELDKAGFIKRQLVETRQITKHVAQILDSRMNTKYDENDKLIREVKVITLKSKLVSDFRKDFQFYKVREINNYHHAHDAYLNAVVGTALIKKYPKLESEFVYGDYKVYDVRKMIAKSEQEIGKATAKYFFYSNIMNFFKTEITLANGEIRKRPLIETNGETGEIVWDKGRDFATVRKVLSMPQVNIVKKTEVQTGGFSKESILPKRNSDKLIARKKDWDPKKYGGFDSPTVAYSVLVVAKVEKGKSKKLKSVKELLGITIMERSSFEKNPIDFLEAKGYKEVKKDLIIKLPKYSLFELENGRKRMLASAGELQKGNELALPSKYVNFLYLASHYEKLKGSPEDNEQKQLFVEQHKHYLDEIIEQISEFSKRVILADANLDKVLSAYNKHRDKPIREQAENIIHLFTLTNLGAPAAFKYFDTTIDRKRYTSTKEVLDATLIHQSITGLYETRIDLSQLGGDGGGGGGGSGSSGGTLNIEDEYRLHETSKEPDVSLGSTWLSDFPQAWAETGGMGLAVRQAPLIIPLKATSTPVSIKQYPMSQEARLGIKPHIQRLLDQGILVPCQSPWNTPLLPVKKPGTNDYRPVQDLREVNKRVEDIHPTVPNPYNLLSGLPPSHQWYTVLDLKDAFFCLRLHPTSQPLFAFEWRDPEMGISGQLTWTRLPQGFKNSPTLFNEALHRDLAGFRIQHPDLILLQYVDDLLLAATSELDCQQGTRALLQTLGDLGYRASAKKAQICQKQVKYLGYLLKEGQRWLTEARKETVMGQPIPKTPRQLREFLGKAGFCRLFIPGFAEMAAPLYPLTKPGTLFNWGPDQQKAFQEIKQALLTAPALGLPDLTKPFELFVDEKQGYAKGVLTQKLGPWRRPVAYLSKKLDPVAAGWPPCLRMVAAIAVLTKDAGKLTMGQPLVILAPHAVEALVKQPPDRWLSNARMTHYQALLLDTDRVQFGPVVALNPATLLPLPEEGLQHDCLDILAEAHGTRSDLMDQPLPDADHTWYTDGSSFLQEGQRKAGAAVTTETEVIWARALPAGTSAQRAELIALTQALKMAEGKKLNVYTDSRYAFATAHIHGEIYRRRGWLTSEGKEIKNKDEILALLKALFLPKRLSIIHCPGHQKGNSAEARGNRMADQAAREVATRETPETSTLLAGKRTADGSEFEKRTADGSEFESPKKKAKVE

SEQ ID NO: 2313 - protein, 2097 aa, synthetic construct
MPAAKRVKLDGGDKKYSIGLDIGTNSVGWAVITDEYKVPSKKFKVLGNTDRHSIKKNLIGALLFDSGETAEATRLKRTARRRYTRRKNRICYLQEIFSNEMAKVDDSFFHRLEESFLVEEDKKHERHPIFGNIVDEVAYHEKYPTIYHLRKKLVDSTDKADLRLIYLALAHMIKFRGHFLIEGDLNPDNSDVDKLFIQLVQTYNQLFEENPINASGVDAKAILSARLSKSRRLENLIAQLPGEKKNGLFGNLIALSLGLTPNFKSNFDLAEDAKLQLSKDTYDDDLDNLLAQIGDQYADLFLAAKNLSDAILLSDILRVNTEITKAPLSASMIKRYDEHHQDLTLLKALVRQQLPEKYKEIFFDQSKNGYAGYIDGGASQEEFYKFIKPILEKMDGTEELLVKLNREDLLRKQRTFDNGSIPHQIHLGELHAILRRQEDFYPFLKDNREKIEKILTFRIPYYVGPLARGNSRFAWMTRKSEETITPWNFEEVVDKGASAQSFIERMTNFDKNLPNEKVLPKHSLLYEYFTVYNELTKVKYVTEGMRKPAFLSGEQKKAIVDLLFKTNRKVTVKQLKEDYFKKIECFDSVEISGVEDRFNASLGTYHDLLKIIKDKDFLDNEENEDILEDIVLTLTLFEDREMIEERLKTYAHLFDDKVMKQLKRRRYTGWGRLSRKLINGIRDKQSGKTILDFLKSDGFANRNFMQLIHDDSLTFKEDIQKAQVSGQGDSLHEHIANLAGSPAIKKGILQTVKVVDELVKVMGRHKPENIVIEMARENQTTQKGQKNSRERMKRIEEGIKELGSQILKEHPVENTQLQNEKLYLYYLQNGRDMYVDQELDINRLSDYDVDHIVPQSFLKDDSIDNKVLTRSDKARGKSDNVPSEEVVKKMKNYWRQLLNAKLITQRKFDNLTKAERGGLSELDKAGFIKRQLVETRQITKHVAQILDSRMNTKYDENDKLIREVKVITLKSKLVSDFRKDFQFYKVREINNYHHAHDAYLNAVVGTALIKKYPKLESEFVYGDYKVYDVRKMIAKSEQEIGKATAKYFFYSNIMNFFKTEITLANGEIRKRPLIETNGETGEIVWDKGRDFATVRKVLSMPQVNIVKKTEVQTGGFSKESILPKRNSDKLIARKKDWDPKKYGGFDSPTVAYSVLVVAKVEKGKSKKLKSVKELLGITIMERSSFEKNPIDFLEAKGYKEVKKDLIIKLPKYSLFELENGRKRMLASAGELQKGNELALPSKYVNFLYLASHYEKLKGSPEDNEQKQLFVEQHKHYLDEIIEQISEFSKRVILADANLDKVLSAYNKHRDKPIREQAENIIHLFTLTNLGAPAAFKYFDTTIDRKRYTSTKEVLDATLIHQSITGLYETRIDLSQLGGDGGGSAGSAAGSGEFGGTLNIEDEYRLHETSKEPDVSLGSTWLSDFPQAWAETGGMGLAVRQAPLIIPLKATSTPVSIKQYPMSQEARLGIKPHIQRLLDQGILVPCQSPWNTPLLPVKKPGTNDYRPVQDLREVNKRVEDIHPTVPNPYNLLSGLPPSHQWYTVLDLKDAFFCLRLHPTSQPLFAFEWRDPEMGISGQLTWTRLPQGFKNSPTLFNEALHRDLAGFRIQHPDLILLQYVDDLLLAATSELDCQQGTRALLQTLGDLGYRASAKKAQICQKQVKYLGYLLKEGQRWLTEARKETVMGQPIPKTPRQLREFLGKAGFCRLFIPGFAEMAAPLYPLTKPGTLFNWGPDQQKAFQEIKQALLTAPALGLPDLTKPFELFVDEKQGYAKGVLTQKLGPWRRPVAYLSKKLDPVAAGWPPCLRMVAAIAVLTKDAGKLTMGQPLVILAPHAVEALVKQPPDRWLSNARMTHYQALLLDTDRVQFGPVVALNPATLLPLPEEGLQHDCLDILAEAHGTRSDLMDQPLPDADHTWYTDGSSFLQEGQRKAGAAVTTETEVIWARALPAGTSAQRAELIALTQALKMAEGKKLNVYTDSRYAFATAHIHGEIYRRRGWLTSEGKEIKNKDEILALLKALFLPKRLSIIHCPGHQKGNSAEARGNRMADQAAREVATRETPETSTLLAGKRTADGSEFEKRTADGSEFESPKKKAKVE

SEQ ID NO: 2314 - protein, 2096 aa, synthetic construct
MPAAKRVKLDGGDKKYSIGLDIGTNSVGWAVITDEYKVPSKKFKVLGNTDRHSIKKNLIGALLFDSGETAEATRLKRTARRRYTRRKNRICYLQEIFSNEMAKVDDSFFHRLEESFLVEEDKKHERHPIFGNIVDEVAYHEKYPTIYHLRKKLVDSTDKADLRLIYLALAHMIKFRGHFLIEGDLNPDNSDVDKLFIQLVQTYNQLFEENPINASGVDAKAILSARLSKSRRLENLIAQLPGEKKNGLFGNLIALSLGLTPNFKSNFDLAEDAKLQLSKDTYDDDLDNLLAQIGDQYADLFLAAKNLSDAILLSDILRVNTEITKAPLSASMIKRYDEHHQDLTLLKALVRQQLPEKYKEIFFDQSKNGYAGYIDGGASQEEFYKFIKPILEKMDGTEELLVKLNREDLLRKQRTFDNGSIPHQIHLGELHAILRRQEDFYPFLKDNREKIEKILTFRIPYYVGPLARGNSRFAWMTRKSEETITPWNFEEVVDKGASAQSFIERMTNFDKNLPNEKVLPKHSLLYEYFTVYNELTKVKYVTEGMRKPAFLSGEQKKAIVDLLFKTNRKVTVKQLKEDYFKKIECFDSVEISGVEDRFNASLGTYHDLLKIIKDKDFLDNEENEDILEDIVLTLTLFEDREMIEERLKTYAHLFDDKVMKQLKRRRYTGWGRLSRKLINGIRDKQSGKTILDFLKSDGFANRNFMQLIHDDSLTFKEDIQKAQVSGQGDSLHEHIANLAGSPAIKKGILQTVKVVDELVKVMGRHKPENIVIEMARENQTTQKGQKNSRERMKRIEEGIKELGSQILKEHPVENTQLQNEKLYLYYLQNGRDMYVDQELDINRLSDYDVDHIVPQSFLKDDSIDNKVLTRSDKARGKSDNVPSEEVVKKMKNYWRQLLNAKLITQRKFDNLTKAERGGLSELDKAGFIKRQLVETRQITKHVAQILDSRMNTKYDENDKLIREVKVITLKSKLVSDFRKDFQFYKVREINNYHHAHDAYLNAVVGTALIKKYPKLESEFVYGDYKVYDVRKMIAKSEQEIGKATAKYFFYSNIMNFFKTEITLANGEIRKRPLIETNGETGEIVWDKGRDFATVRKVLSMPQVNIVKKTEVQTGGFSKESILPKRNSDKLIARKKDWDPKKYGGFDSPTVAYSVLVVAKVEKGKSKKLKSVKELLGITIMERSSFEKNPIDFLEAKGYKEVKKDLIIKLPKYSLFELENGRKRMLASAGELQKGNELALPSKYVNFLYLASHYEKLKGSPEDNEQKQLFVEQHKHYLDEIIEQISEFSKRVILADANLDKVLSAYNKHRDKPIREQAENIIHLFTLTNLGAPAAFKYFDTTIDRKRYTSTKEVLDATLIHQSITGLYETRIDLSQLGGDGGPAPEAAAKGGSGGTLNIEDEYRLHETSKEPDVSLGSTWLSDFPQAWAETGGMGLAVRQAPLIIPLKATSTPVSIKQYPMSQEARLGIKPHIQRLLDQGILVPCQSPWNTPLLPVKKPGTNDYRPVQDLREVNKRVEDIHPTVPNPYNLLSGLPPSHQWYTVLDLKDAFFCLRLHPTSQPLFAFEWRDPEMGISGQLTWTRLPQGFKNSPTLFNEALHRDLAGFRIQHPDLILLQYVDDLLLAATSELDCQQGTRALLQTLGDLGYRASAKKAQICQKQVKYLGYLLKEGQRWLTEARKETVMGQPIPKTPRQLREFLGKAGFCRLFIPGFAEMAAPLYPLTKPGTLFNWGPDQQKAFQEIKQALLTAPALGLPDLTKPFELFVDEKQGYAKGVLTQKLGPWRRPVAYLSKKLDPVAAGWPPCLRMVAAIAVLTKDAGKLTMGQPLVILAPHAVEALVKQPPDRWLSNARMTHYQALLLDTDRVQFGPVVALNPATLLPLPEEGLQHDCLDILAEAHGTRSDLMDQPLPDADHTWYTDGSSFLQEGQRKAGAAVTTETEVIWARALPAGTSAQRAELIALTQALKMAEGKKLNVYTDSRYAFATAHIHGEIYRRRGWLTSEGKEIKNKDEILALLKALFLPKRLSIIHCPGHQKGNSAEARGNRMADQAAREVATRETPETSTLLAGKRTADGSEFEKRTADGSEFESPKKKAKVE

SEQ ID NO: 2315 - protein, 2096 aa, synthetic construct
MPAAKRVKLDGGDKKYSIGLDIGTNSVGWAVITDEYKVPSKKFKVLGNTDRHSIKKNLIGALLFDSGETAEATRLKRTARRRYTRRKNRICYLQEIFSNEMAKVDDSFFHRLEESFLVEEDKKHERHPIFGNIVDEVAYHEKYPTIYHLRKKLVDSTDKADLRLIYLALAHMIKFRGHFLIEGDLNPDNSDVDKLFIQLVQTYNQLFEENPINASGVDAKAILSARLSKSRRLENLIAQLPGEKKNGLFGNLIALSLGLTPNFKSNFDLAEDAKLQLSKDTYDDDLDNLLAQIGDQYADLFLAAKNLSDAILLSDILRVNTEITKAPLSASMIKRYDEHHQDLTLLKALVRQQLPEKYKEIFFDQSKNGYAGYIDGGASQEEFYKFIKPILEKMDGTEELLVKLNREDLLRKQRTFDNGSIPHQIHLGELHAILRRQEDFYPFLKDNREKIEKILTFRIPYYVGPLARGNSRFAWMTRKSEETITPWNFEEVVDKGASAQSFIERMTNFDKNLPNEKVLPKHSLLYEYFTVYNELTKVKYVTEGMRKPAFLSGEQKKAIVDLLFKTNRKVTVKQLKEDYFKKIECFDSVEISGVEDRFNASLGTYHDLLKIIKDKDFLDNEENEDILEDIVLTLTLFEDREMIEERLKTYAHLFDDKVMKQLKRRRYTGWGRLSRKLINGIRDKQSGKTILDFLKSDGFANRNFMQLIHDDSLTFKEDIQKAQVSGQGDSLHEHIANLAGSPAIKKGILQTVKVVDELVKVMGRHKPENIVIEMARENQTTQKGQKNSRERMKRIEEGIKELGSQILKEHPVENTQLQNEKLYLYYLQNGRDMYVDQELDINRLSDYDVDHIVPQSFLKDDSIDNKVLTRSDKARGKSDNVPSEEVVKKMKNYWRQLLNAKLITQRKFDNLTKAERGGLSELDKAGFIKRQLVETRQITKHVAQILDSRMNTKYDENDKLIREVKVITLKSKLVSDFRKDFQFYKVREINNYHHAHDAYLNAVVGTALIKKYPKLESEFVYGDYKVYDVRKMIAKSEQEIGKATAKYFFYSNIMNFFKTEITLANGEIRKRPLIETNGETGEIVWDKGRDFATVRKVLSMPQVNIVKKTEVQTGGFSKESILPKRNSDKLIARKKDWDPKKYGGFDSPTVAYSVLVVAKVEKGKSKKLKSVKELLGITIMERSSFEKNPIDFLEAKGYKEVKKDLIIKLPKYSLFELENGRKRMLASAGELQKGNELALPSKYVNFLYLASHYEKLKGSPEDNEQKQLFVEQHKHYLDEIIEQISEFSKRVILADANLDKVLSAYNKHRDKPIREQAENIIHLFTLTNLGAPAAFKYFDTTIDRKRYTSTKEVLDATLIHQSITGLYETRIDLSQLGGDGGEAAAKPAPGGSGGTLNIEDEYRLHETSKEPDVSLGSTWLSDFPQAWAETGGMGLAVRQAPLIIPLKATSTPVSIKQYPMSQEARLGIKPHIQRLLDQGILVPCQSPWNTPLLPVKKPGTNDYRPVQDLREVNKRVEDIHPTVPNPYNLLSGLPPSHQWYTVLDLKDAFFCLRLHPTSQPLFAFEWRDPEMGISGQLTWTRLPQGFKNSPTLFNEALHRDLAGFRIQHPDLILLQYVDDLLLAATSELDCQQGTRALLQTLGDLGYRASAKKAQICQKQVKYLGYLLKEGQRWLTEARKETVMGQPIPKTPRQLREFLGKAGFCRLFIPGFAEMAAPLYPLTKPGTLFNWGPDQQKAFQEIKQALLTAPALGLPDLTKPFELFVDEKQGYAKGVLTQKLGPWRRPVAYLSKKLDPVAAGWPPCLRMVAAIAVLTKDAGKLTMGQPLVILAPHAVEALVKQPPDRWLSNARMTHYQALLLDTDRVQFGPVVALNPATLLPLPEEGLQHDCLDILAEAHGTRSDLMDQPLPDADHTWYTDGSSFLQEGQRKAGAAVTTETEVIWARALPAGTSAQRAELIALTQALKMAEGKKLNVYTDSRYAFATAHIHGEIYRRRGWLTSEGKEIKNKDEILALLKALFLPKRLSIIHCPGHQKGNSAEARGNRMADQAAREVATRETPETSTLLAGKRTADGSEFEKRTADGSEFESPKKKAKVE

SEQ ID NO: 2316 - protein, 2096 aa, synthetic construct
MPAAKRVKLDGGDKKYSIGLDIGTNSVGWAVITDEYKVPSKKFKVLGNTDRHSIKKNLIGALLFDSGETAEATRLKRTARRRYTRRKNRICYLQEIFSNEMAKVDDSFFHRLEESFLVEEDKKHERHPIFGNIVDEVAYHEKYPTIYHLRKKLVDSTDKADLRLIYLALAHMIKFRGHFLIEGDLNPDNSDVDKLFIQLVQTYNQLFEENPINASGVDAKAILSARLSKSRRLENLIAQLPGEKKNGLFGNLIALSLGLTPNFKSNFDLAEDAKLQLSKDTYDDDLDNLLAQIGDQYADLFLAAKNLSDAILLSDILRVNTEITKAPLSASMIKRYDEHHQDLTLLKALVRQQLPEKYKEIFFDQSKNGYAGYIDGGASQEEFYKFIKPILEKMDGTEELLVKLNREDLLRKQRTFDNGSIPHQIHLGELHAILRRQEDFYPFLKDNREKIEKILTFRIPYYVGPLARGNSRFAWMTRKSEETITPWNFEEVVDKGASAQSFIERMTNFDKNLPNEKVLPKHSLLYEYFTVYNELTKVKYVTEGMRKPAFLSGEQKKAIVDLLFKTNRKVTVKQLKEDYFKKIECFDSVEISGVEDRFNASLGTYHDLLKIIKDKDFLDNEENEDILEDIVLTLTLFEDREMIEERLKTYAHLFDDKVMKQLKRRRYTGWGRLSRKLINGIRDKQSGKTILDFLKSDGFANRNFMQLIHDDSLTFKEDIQKAQVSGQGDSLHEHIANLAGSPAIKKGILQTVKVVDELVKVMGRHKPENIVIEMARENQTTQKGQKNSRERMKRIEEGIKELGSQILKEHPVENTQLQNEKLYLYYLQNGRDMYVDQELDINRLSDYDVDHIVPQSFLKDDSIDNKVLTRSDKARGKSDNVPSEEVVKKMKNYWRQLLNAKLITQRKFDNLTKAERGGLSELDKAGFIKRQLVETRQITKHVAQILDSRMNTKYDENDKLIREVKVITLKSKLVSDFRKDFQFYKVREINNYHHAHDAYLNAVVGTALIKKYPKLESEFVYGDYKVYDVRKMIAKSEQEIGKATAKYFFYSNIMNFFKTEITLANGEIRKRPLIETNGETGEIVWDKGRDFATVRKVLSMPQVNIVKKTEVQTGGFSKESILPKRNSDKLIARKKDWDPKKYGGFDSPTVAYSVLVVAKVEKGKSKKLKSVKELLGITIMERSSFEKNPIDFLEAKGYKEVKKDLIIKLPKYSLFELENGRKRMLASAGELQKGNELALPSKYVNFLYLASHYEKLKGSPEDNEQKQLFVEQHKHYLDEIIEQISEFSKRVILADANLDKVLSAYNKHRDKPIREQAENIIHLFTLTNLGAPAAFKYFDTTIDRKRYTSTKEVLDATLIHQSITGLYETRIDLSQLGGDGGGGGEAAAKGSSGGTLNIEDEYRLHETSKEPDVSLGSTWLSDFPQAWAETGGMGLAVRQAPLIIPLKATSTPVSIKQYPMSQEARLGIKPHIQRLLDQGILVPCQSPWNTPLLPVKKPGTNDYRPVQDLREVNKRVEDIHPTVPNPYNLLSGLPPSHQWYTVLDLKDAFFCLRLHPTSQPLFAFEWRDPEMGISGQLTWTRLPQGFKNSPTLFNEALHRDLAGFRIQHPDLILLQYVDDLLLAATSELDCQQGTRALLQTLGDLGYRASAKKAQICQKQVKYLGYLLKEGQRWLTEARKETVMGQPIPKTPRQLREFLGKAGFCRLFIPGFAEMAAPLYPLTKPGTLFNWGPDQQKAFQEIKQALLTAPALGLPDLTKPFELFVDEKQGYAKGVLTQKLGPWRRPVAYLSKKLDPVAAGWPPCLRMVAAIAVLTKDAGKLTMGQPLVILAPHAVEALVKQPPDRWLSNARMTHYQALLLDTDRVQFGPVVALNPATLLPLPEEGLQHDCLDILAEAHGTRSDLMDQPLPDADHTWYTDGSSFLQEGQRKAGAAVTTETEVIWARALPAGTSAQRAELIALTQALKMAEGKKLNVYTDSRYAFATAHIHGEIYRRRGWLTSEGKEIKNKDEILALLKALFLPKRLSIIHCPGHQKGNSAEARGNRMADQAAREVATRETPETSTLLAGKRTADGSEFEKRTADGSEFESPKKKAKVE

SEQ ID NO: 2317 - protein, 2094 aa, synthetic construct
MPAAKRVKLDGGDKKYSIGLDIGTNSVGWAVITDEYKVPSKKFKVLGNTDRHSIKKNLIGALLFDSGETAEATRLKRTARRRYTRRKNRICYLQEIFSNEMAKVDDSFFHRLEESFLVEEDKKHERHPIFGNIVDEVAYHEKYPTIYHLRKKLVDSTDKADLRLIYLALAHMIKFRGHFLIEGDLNPDNSDVDKLFIQLVQTYNQLFEENPINASGVDAKAILSARLSKSRRLENLIAQLPGEKKNGLFGNLIALSLGLTPNFKSNFDLAEDAKLQLSKDTYDDDLDNLLAQIGDQYADLFLAAKNLSDAILLSDILRVNTEITKAPLSASMIKRYDEHHQDLTLLKALVRQQLPEKYKEIFFDQSKNGYAGYIDGGASQEEFYKFIKPILEKMDGTEELLVKLNREDLLRKQRTFDNGSIPHQIHLGELHAILRRQEDFYPFLKDNREKIEKILTFRIPYYVGPLARGNSRFAWMTRKSEETITPWNFEEVVDKGASAQSFIERMTNFDKNLPNEKVLPKHSLLYEYFTVYNELTKVKYVTEGMRKPAFLSGEQKKAIVDLLFKTNRKVTVKQLKEDYFKKIECFDSVEISGVEDRFNASLGTYHDLLKIIKDKDFLDNEENEDILEDIVLTLTLFEDREMIEERLKTYAHLFDDKVMKQLKRRRYTGWGRLSRKLINGIRDKQSGKTILDFLKSDGFANRNFMQLIHDDSLTFKEDIQKAQVSGQGDSLHEHIANLAGSPAIKKGILQTVKVVDELVKVMGRHKPENIVIEMARENQTTQKGQKNSRERMKRIEEGIKELGSQILKEHPVENTQLQNEKLYLYYLQNGRDMYVDQELDINRLSDYDVDHIVPQSFLKDDSIDNKVLTRSDKARGKSDNVPSEEVVKKMKNYWRQLLNAKLITQRKFDNLTKAERGGLSELDKAGFIKRQLVETRQITKHVAQILDSRMNTKYDENDKLIREVKVITLKSKLVSDFRKDFQFYKVREINNYHHAHDAYLNAVVGTALIKKYPKLESEFVYGDYKVYDVRKMIAKSEQEIGKATAKYFFYSNIMNFFKTEITLANGEIRKRPLIETNGETGEIVWDKGRDFATVRKVLSMPQVNIVKKTEVQTGGFSKESILPKRNSDKLIARKKDWDPKKYGGFDSPTVAYSVLVVAKVEKGKSKKLKSVKELLGITIMERSSFEKNPIDFLEAKGYKEVKKDLIIKLPKYSLFELENGRKRMLASAGELQKGNELALPSKYVNFLYLASHYEKLKGSPEDNEQKQLFVEQHKHYLDEIIEQISEFSKRVILADANLDKVLSAYNKHRDKPIREQAENIIHLFTLTNLGAPAAFKYFDTTIDRKRYTSTKEVLDATLIHQSITGLYETRIDLSQLGGDGGGGSGGGPAPGGTLNIEDEYRLHETSKEPDVSLGSTWLSDFPQAWAETGGMGLAVRQAPLIIPLKATSTPVSIKQYPMSQEARLGIKPHIQRLLDQGILVPCQSPWNTPLLPVKKPGTNDYRPVQDLREVNKRVEDIHPTVPNPYNLLSGLPPSHQWYTVLDLKDAFFCLRLHPTSQPLFAFEWRDPEMGISGQLTWTRLPQGFKNSPTLFNEALHRDLAGFRIQHPDLILLQYVDDLLLAATSELDCQQGTRALLQTLGDLGYRASAKKAQICQKQVKYLGYLLKEGQRWLTEARKETVMGQPIPKTPRQLREFLGKAGFCRLFIPGFAEMAAPLYPLTKPGTLFNWGPDQQKAFQEIKQALLTAPALGLPDLTKPFELFVDEKQGYAKGVLTQKLGPWRRPVAYLSKKLDPVAAGWPPCLRMVAAIAVLTKDAGKLTMGQPLVILAPHAVEALVKQPPDRWLSNARMTHYQALLLDTDRVQFGPVVALNPATLLPLPEEGLQHDCLDILAEAHGTRSDLMDQPLPDADHTWYTDGSSFLQEGQRKAGAAVTTETEVIWARALPAGTSAQRAELIALTQALKMAEGKKLNVYTDSRYAFATAHIHGEIYRRRGWLTSEGKEIKNKDEILALLKALFLPKRLSIIHCPGHQKGNSAEARGNRMADQAAREVATRETPETSTLLAGKRTADGSEFEKRTADGSEFESPKKKAKVE

SEQ ID NO: 2318 - protein, 2094 aa, synthetic construct
MPAAKRVKLDGGDKKYSIGLDIGTNSVGWAVITDEYKVPSKKFKVLGNTDRHSIKKNLIGALLFDSGETAEATRLKRTARRRYTRRKNRICYLQEIFSNEMAKVDDSFFHRLEESFLVEEDKKHERHPIFGNIVDEVAYHEKYPTIYHLRKKLVDSTDKADLRLIYLALAHMIKFRGHFLIEGDLNPDNSDVDKLFIQLVQTYNQLFEENPINASGVDAKAILSARLSKSRRLENLIAQLPGEKKNGLFGNLIALSLGLTPNFKSNFDLAEDAKLQLSKDTYDDDLDNLLAQIGDQYADLFLAAKNLSDAILLSDILRVNTEITKAPLSASMIKRYDEHHQDLTLLKALVRQQLPEKYKEIFFDQSKNGYAGYIDGGASQEEFYKFIKPILEKMDGTEELLVKLNREDLLRKQRTFDNGSIPHQIHLGELHAILRRQEDFYPFLKDNREKIEKILTFRIPYYVGPLARGNSRFAWMTRKSEETITPWNFEEVVDKGASAQSFIERMTNFDKNLPNEKVLPKHSLLYEYFTVYNELTKVKYVTEGMRKPAFLSGEQKKAIVDLLFKTNRKVTVKQLKEDYFKKIECFDSVEISGVEDRFNASLGTYHDLLKIIKDKDFLDNEENEDILEDIVLTLTLFEDREMIEERLKTYAHLFDDKVMKQLKRRRYTGWGRLSRKLINGIRDKQSGKTILDFLKSDGFANRNFMQLIHDDSLTFKEDIQKAQVSGQGDSLHEHIANLAGSPAIKKGILQTVKVVDELVKVMGRHKPENIVIEMARENQTTQKGQKNSRERMKRIEEGIKELGSQILKEHPVENTQLQNEKLYLYYLQNGRDMYVDQELDINRLSDYDVDHIVPQSFLKDDSIDNKVLTRSDKARGKSDNVPSEEVVKKMKNYWRQLLNAKLITQRKFDNLTKAERGGLSELDKAGFIKRQLVETRQITKHVAQILDSRMNTKYDENDKLIREVKVITLKSKLVSDFRKDFQFYKVREINNYHHAHDAYLNAVVGTALIKKYPKLESEFVYGDYKVYDVRKMIAKSEQEIGKATAKYFFYSNIMNFFKTEITLANGEIRKRPLIETNGETGEIVWDKGRDFATVRKVLSMPQVNIVKKTEVQTGGFSKESILPKRNSDKLIARKKDWDPKKYGGFDSPTVAYSVLVVAKVEKGKSKKLKSVKELLGITIMERSSFEKNPIDFLEAKGYKEVKKDLIIKLPKYSLFELENGRKRMLASAGELQKGNELALPSKYVNFLYLASHYEKLKGSPEDNEQKQLFVEQHKHYLDEIIEQISEFSKRVILADANLDKVLSAYNKHRDKPIREQAENIIHLFTLTNLGAPAAFKYFDTTIDRKRYTSTKEVLDATLIHQSITGLYETRIDLSQLGGDGGPAPAPAPAPGGTLNIEDEYRLHETSKEPDVSLGSTWLSDFPQAWAETGGMGLAVRQAPLIIPLKATSTPVSIKQYPMSQEARLGIKPHIQRLLDQGILVPCQSPWNTPLLPVKKPGTNDYRPVQDLREVNKRVEDIHPTVPNPYNLLSGLPPSHQWYTVLDLKDAFFCLRLHPTSQPLFAFEWRDPEMGISGQLTWTRLPQGFKNSPTLFNEALHRDLAGFRIQHPDLILLQYVDDLLLAATSELDCQQGTRALLQTLGDLGYRASAKKAQICQKQVKYLGYLLKEGQRWLTEARKETVMGQPIPKTPRQLREFLGKAGFCRLFIPGFAEMAAPLYPLTKPGTLFNWGPDQQKAFQEIKQALLTAPALGLPDLTKPFELFVDEKQGYAKGVLTQKLGPWRRPVAYLSKKLDPVAAGWPPCLRMVAAIAVLTKDAGKLTMGQPLVILAPHAVEALVKQPPDRWLSNARMTHYQALLLDTDRVQFGPVVALNPATLLPLPEEGLQHDCLDILAEAHGTRSDLMDQPLPDADHTWYTDGSSFLQEGQRKAGAAVTTETEVIWARALPAGTSAQRAELIALTQALKMAEGKKLNVYTDSRYAFATAHIHGEIYRRRGWLTSEGKEIKNKDEILALLKALFLPKRLSIIHCPGHQKGNSAEARGNRMADQAAREVATRETPETSTLLAGKRTADGSEFEKRTADGSEFESPKKKAKVE

SEQ ID NO: 2319 - protein, 2097 aa, synthetic construct
MPAAKRVKLDGGDKKYSIGLDIGTNSVGWAVITDEYKVPSKKFKVLGNTDRHSIKKNLIGALLFDSGETAEATRLKRTARRRYTRRKNRICYLQEIFSNEMAKVDDSFFHRLEESFLVEEDKKHERHPIFGNIVDEVAYHEKYPTIYHLRKKLVDSTDKADLRLIYLALAHMIKFRGHFLIEGDLNPDNSDVDKLFIQLVQTYNQLFEENPINASGVDAKAILSARLSKSRRLENLIAQLPGEKKNGLFGNLIALSLGLTPNFKSNFDLAEDAKLQLSKDTYDDDLDNLLAQIGDQYADLFLAAKNLSDAILLSDILRVNTEITKAPLSASMIKRYDEHHQDLTLLKALVRQQLPEKYKEIFFDQSKNGYAGYIDGGASQEEFYKFIKPILEKMDGTEELLVKLNREDLLRKQRTFDNGSIPHQIHLGELHAILRRQEDFYPFLKDNREKIEKILTFRIPYYVGPLARGNSRFAWMTRKSEETITPWNFEEVVDKGASAQSFIERMTNFDKNLPNEKVLPKHSLLYEYFTVYNELTKVKYVTEGMRKPAFLSGEQKKAIVDLLFKTNRKVTVKQLKEDYFKKIECFDSVEISGVEDRFNASLGTYHDLLKIIKDKDFLDNEENEDILEDIVLTLTLFEDREMIEERLKTYAHLFDDKVMKQLKRRRYTGWGRLSRKLINGIRDKQSGKTILDFLKSDGFANRNFMQLIHDDSLTFKEDIQKAQVSGQGDSLHEHIANLAGSPAIKKGILQTVKVVDELVKVMGRHKPENIVIEMARENQTTQKGQKNSRERMKRIEEGIKELGSQILKEHPVENTQLQNEKLYLYYLQNGRDMYVDQELDINRLSDYDVDHIVPQSFLKDDSIDNKVLTRSDKARGKSDNVPSEEVVKKMKNYWRQLLNAKLITQRKFDNLTKAERGGLSELDKAGFIKRQLVETRQITKHVAQILDSRMNTKYDENDKLIREVKVITLKSKLVSDFRKDFQFYKVREINNYHHAHDAYLNAVVGTALIKKYPKLESEFVYGDYKVYDVRKMIAKSEQEIGKATAKYFFYSNIMNFFKTEITLANGEIRKRPLIETNGETGEIVWDKGRDFATVRKVLSMPQVNIVKKTEVQTGGFSKESILPKRNSDKLIARKKDWDPKKYGGFDSPTVAYSVLVVAKVEKGKSKKLKSVKELLGITIMERSSFEKNPIDFLEAKGYKEVKKDLIIKLPKYSLFELENGRKRMLASAGELQKGNELALPSKYVNFLYLASHYEKLKGSPEDNEQKQLFVEQHKHYLDEIIEQISEFSKRVILADANLDKVLSAYNKHRDKPIREQAENIIHLFTLTNLGAPAAFKYFDTTIDRKRYTSTKEVLDATLIHQSITGLYETRIDLSQLGGDGGGGSGGSGGSGGSGGTLNIEDEYRLHETSKEPDVSLGSTWLSDFPQAWAETGGMGLAVRQAPLIIPLKATSTPVSIKQYPMSQEARLGIKPHIQRLLDQGILVPCQSPWNTPLLPVKKPGTNDYRPVQDLREVNKRVEDIHPTVPNPYNLLSGLPPSHQWYTVLDLKDAFFCLRLHPTSQPLFAFEWRDPEMGISGQLTWTRLPQGFKNSPTLFNEALHRDLAGFRIQHPDLILLQYVDDLLLAATSELDCQQGTRALLQTLGDLGYRASAKKAQICQKQVKYLGYLLKEGQRWLTEARKETVMGQPIPKTPRQLREFLGKAGFCRLFIPGFAEMAAPLYPLTKPGTLFNWGPDQQKAFQEIKQALLTAPALGLPDLTKPFELFVDEKQGYAKGVLTQKLGPWRRPVAYLSKKLDPVAAGWPPCLRMVAAIAVLTKDAGKLTMGQPLVILAPHAVEALVKQPPDRWLSNARMTHYQALLLDTDRVQFGPVVALNPATLLPLPEEGLQHDCLDILAEAHGTRSDLMDQPLPDADHTWYTDGSSFLQEGQRKAGAAVTTETEVIWARALPAGTSAQRAELIALTQALKMAEGKKLNVYTDSRYAFATAHIHGEIYRRRGWLTSEGKEIKNKDEILALLKALFLPKRLSIIHCPGHQKGNSAEARGNRMADQAAREVATRETPETSTLLAGKRTADGSEFEKRTADGSEFESPKKKAKVE

SEQ ID NO: 2320 - protein, 2094 aa, synthetic construct
MPAAKRVKLDGGDKKYSIGLDIGTNSVGWAVITDEYKVPSKKFKVLGNTDRHSIKKNLIGALLFDSGETAEATRLKRTARRRYTRRKNRICYLQEIFSNEMAKVDDSFFHRLEESFLVEEDKKHERHPIFGNIVDEVAYHEKYPTIYHLRKKLVDSTDKADLRLIYLALAHMIKFRGHFLIEGDLNPDNSDVDKLFIQLVQTYNQLFEENPINASGVDAKAILSARLSKSRRLENLIAQLPGEKKNGLFGNLIALSLGLTPNFKSNFDLAEDAKLQLSKDTYDDDLDNLLAQIGDQYADLFLAAKNLSDAILLSDILRVNTEITKAPLSASMIKRYDEHHQDLTLLKALVRQQLPEKYKEIFFDQSKNGYAGYIDGGASQEEFYKFIKPILEKMDGTEELLVKLNREDLLRKQRTFDNGSIPHQIHLGELHAILRRQEDFYPFLKDNREKIEKILTFRIPYYVGPLARGNSRFAWMTRKSEETITPWNFEEVVDKGASAQSFIERMTNFDKNLPNEKVLPKHSLLYEYFTVYNELTKVKYVTEGMRKPAFLSGEQKKAIVDLLFKTNRKVTVKQLKEDYFKKIECFDSVEISGVEDRFNASLGTYHDLLKIIKDKDFLDNEENEDILEDIVLTLTLFEDREMIEERLKTYAHLFDDKVMKQLKRRRYTGWGRLSRKLINGIRDKQSGKTILDFLKSDGFANRNFMQLIHDDSLTFKEDIQKAQVSGQGDSLHEHIANLAGSPAIKKGILQTVKVVDELVKVMGRHKPENIVIEMARENQTTQKGQKNSRERMKRIEEGIKELGSQILKEHPVENTQLQNEKLYLYYLQNGRDMYVDQELDINRLSDYDVDHIVPQSFLKDDSIDNKVLTRSDKARGKSDNVPSEEVVKKMKNYWRQLLNAKLITQRKFDNLTKAERGGLSELDKAGFIKRQLVETRQITKHVAQILDSRMNTKYDENDKLIREVKVITLKSKLVSDFRKDFQFYKVREINNYHHAHDAYLNAVVGTALIKKYPKLESEFVYGDYKVYDVRKMIAKSEQEIGKATAKYFFYSNIMNFFKTEITLANGEIRKRPLIETNGETGEIVWDKGRDFATVRKVLSMPQVNIVKKTEVQTGGFSKESILPKRNSDKLIARKKDWDPKKYGGFDSPTVAYSVLVVAKVEKGKSKKLKSVKELLGITIMERSSFEKNPIDFLEAKGYKEVKKDLIIKLPKYSLFELENGRKRMLASAGELQKGNELALPSKYVNFLYLASHYEKLKGSPEDNEQKQLFVEQHKHYLDEIIEQISEFSKRVILADANLDKVLSAYNKHRDKPIREQAENIIHLFTLTNLGAPAAFKYFDTTIDRKRYTSTKEVLDATLIHQSITGLYETRIDLSQLGGDGGGGGPAPGGSGGTLNIEDEYRLHETSKEPDVSLGSTWLSDFPQAWAETGGMGLAVRQAPLIIPLKATSTPVSIKQYPMSQEARLGIKPHIQRLLDQGILVPCQSPWNTPLLPVKKPGTNDYRPVQDLREVNKRVEDIHPTVPNPYNLLSGLPPSHQWYTVLDLKDAFFCLRLHPTSQPLFAFEWRDPEMGISGQLTWTRLPQGFKNSPTLFNEALHRDLAGFRIQHPDLILLQYVDDLLLAATSELDCQQGTRALLQTLGDLGYRASAKKAQICQKQVKYLGYLLKEGQRWLTEARKETVMGQPIPKTPRQLREFLGKAGFCRLFIPGFAEMAAPLYPLTKPGTLFNWGPDQQKAFQEIKQALLTAPALGLPDLTKPFELFVDEKQGYAKGVLTQKLGPWRRPVAYLSKKLDPVAAGWPPCLRMVAAIAVLTKDAGKLTMGQPLVILAPHAVEALVKQPPDRWLSNARMTHYQALLLDTDRVQFGPVVALNPATLLPLPEEGLQHDCLDILAEAHGTRSDLMDQPLPDADHTWYTDGSSFLQEGQRKAGAAVTTETEVIWARALPAGTSAQRAELIALTQALKMAEGKKLNVYTDSRYAFATAHIHGEIYRRRGWLTSEGKEIKNKDEILALLKALFLPKRLSIIHCPGHQKGNSAEARGNRMADQAAREVATRETPETSTLLAGKRTADGSEFEKRTADGSEFESPKKKAKVE

SEQ ID NO: 2321 - protein, 2094 aa, synthetic construct
MPAAKRVKLDGGDKKYSIGLDIGTNSVGWAVITDEYKVPSKKFKVLGNTDRHSIKKNLIGALLFDSGETAEATRLKRTARRRYTRRKNRICYLQEIFSNEMAKVDDSFFHRLEESFLVEEDKKHERHPIFGNIVDEVAYHEKYPTIYHLRKKLVDSTDKADLRLIYLALAHMIKFRGHFLIEGDLNPDNSDVDKLFIQLVQTYNQLFEENPINASGVDAKAILSARLSKSRRLENLIAQLPGEKKNGLFGNLIALSLGLTPNFKSNFDLAEDAKLQLSKDTYDDDLDNLLAQIGDQYADLFLAAKNLSDAILLSDILRVNTEITKAPLSASMIKRYDEHHQDLTLLKALVRQQLPEKYKEIFFDQSKNGYAGYIDGGASQEEFYKFIKPILEKMDGTEELLVKLNREDLLRKQRTFDNGSIPHQIHLGELHAILRRQEDFYPFLKDNREKIEKILTFRIPYYVGPLARGNSRFAWMTRKSEETITPWNFEEVVDKGASAQSFIERMTNFDKNLPNEKVLPKHSLLYEYFTVYNELTKVKYVTEGMRKPAFLSGEQKKAIVDLLFKTNRKVTVKQLKEDYFKKIECFDSVEISGVEDRFNASLGTYHDLLKIIKDKDFLDNEENEDILEDIVLTLTLFEDREMIEERLKTYAHLFDDKVMKQLKRRRYTGWGRLSRKLINGIRDKQSGKTILDFLKSDGFANRNFMQLIHDDSLTFKEDIQKAQVSGQGDSLHEHIANLAGSPAIKKGILQTVKVVDELVKVMGRHKPENIVIEMARENQTTQKGQKNSRERMKRIEEGIKELGSQILKEHPVENTQLQNEKLYLYYLQNGRDMYVDQELDINRLSDYDVDHIVPQSFLKDDSIDNKVLTRSDKARGKSDNVPSEEVVKKMKNYWRQLLNAKLITQRKFDNLTKAERGGLSELDKAGFIKRQLVETRQITKHVAQILDSRMNTKYDENDKLIREVKVITLKSKLVSDFRKDFQFYKVREINNYHHAHDAYLNAVVGTALIKKYPKLESEFVYGDYKVYDVRKMIAKSEQEIGKATAKYFFYSNIMNFFKTEITLANGEIRKRPLIETNGETGEIVWDKGRDFATVRKVLSMPQVNIVKKTEVQTGGFSKESILPKRNSDKLIARKKDWDPKKYGGFDSPTVAYSVLVVAKVEKGKSKKLKSVKELLGITIMERSSFEKNPIDFLEAKGYKEVKKDLIIKLPKYSLFELENGRKRMLASAGELQKGNELALPSKYVNFLYLASHYEKLKGSPEDNEQKQLFVEQHKHYLDEIIEQISEFSKRVILADANLDKVLSAYNKHRDKPIREQAENIIHLFTLTNLGAPAAFKYFDTTIDRKRYTSTKEVLDATLIHQSITGLYETRIDLSQLGGDGGPAPGGSGSSGGTLNIEDEYRLHETSKEPDVSLGSTWLSDFPQAWAETGGMGLAVRQAPLIIPLKATSTPVSIKQYPMSQEARLGIKPHIQRLLDQGILVPCQSPWNTPLLPVKKPGTNDYRPVQDLREVNKRVEDIHPTVPNPYNLLSGLPPSHQWYTVLDLKDAFFCLRLHPTSQPLFAFEWRDPEMGISGQLTWTRLPQGFKNSPTLFNEALHRDLAGFRIQHPDLILLQYVDDLLLAATSELDCQQGTRALLQTLGDLGYRASAKKAQICQKQVKYLGYLLKEGQRWLTEARKETVMGQPIPKTPRQLREFLGKAGFCRLFIPGFAEMAAPLYPLTKPGTLFNWGPDQQKAFQEIKQALLTAPALGLPDLTKPFELFVDEKQGYAKGVLTQKLGPWRRPVAYLSKKLDPVAAGWPPCLRMVAAIAVLTKDAGKLTMGQPLVILAPHAVEALVKQPPDRWLSNARMTHYQALLLDTDRVQFGPVVALNPATLLPLPEEGLQHDCLDILAEAHGTRSDLMDQPLPDADHTWYTDGSSFLQEGQRKAGAAVTTETEVIWARALPAGTSAQRAELIALTQALKMAEGKKLNVYTDSRYAFATAHIHGEIYRRRGWLTSEGKEIKNKDEILALLKALFLPKRLSIIHCPGHQKGNSAEARGNRMADQAAREVATRETPETSTLLAGKRTADGSEFEKRTADGSEFESPKKKAKVE

SEQ ID NO: 2322 - protein, 2115 aa, synthetic construct
MPAAKRVKLDGGDKKYSIGLDIGTNSVGWAVITDEYKVPSKKFKVLGNTDRHSIKKNLIGALLFDSGETAEATRLKRTARRRYTRRKNRICYLQEIFSNEMAKVDDSFFHRLEESFLVEEDKKHERHPIFGNIVDEVAYHEKYPTIYHLRKKLVDSTDKADLRLIYLALAHMIKFRGHFLIEGDLNPDNSDVDKLFIQLVQTYNQLFEENPINASGVDAKAILSARLSKSRRLENLIAQLPGEKKNGLFGNLIALSLGLTPNFKSNFDLAEDAKLQLSKDTYDDDLDNLLAQIGDQYADLFLAAKNLSDAILLSDILRVNTEITKAPLSASMIKRYDEHHQDLTLLKALVRQQLPEKYKEIFFDQSKNGYAGYIDGGASQEEFYKFIKPILEKMDGTEELLVKLNREDLLRKQRTFDNGSIPHQIHLGELHAILRRQEDFYPFLKDNREKIEKILTFRIPYYVGPLARGNSRFAWMTRKSEETITPWNFEEVVDKGASAQSFIERMTNFDKNLPNEKVLPKHSLLYEYFTVYNELTKVKYVTEGMRKPAFLSGEQKKAIVDLLFKTNRKVTVKQLKEDYFKKIECFDSVEISGVEDRFNASLGTYHDLLKIIKDKDFLDNEENEDILEDIVLTLTLFEDREMIEERLKTYAHLFDDKVMKQLKRRRYTGWGRLSRKLINGIRDKQSGKTILDFLKSDGFANRNFMQLIHDDSLTFKEDIQKAQVSGQGDSLHEHIANLAGSPAIKKGILQTVKVVDELVKVMGRHKPENIVIEMARENQTTQKGQKNSRERMKRIEEGIKELGSQILKEHPVENTQLQNEKLYLYYLQNGRDMYVDQELDINRLSDYDVDHIVPQSFLKDDSIDNKVLTRSDKARGKSDNVPSEEVVKKMKNYWRQLLNAKLITQRKFDNLTKAERGGLSELDKAGFIKRQLVETRQITKHVAQILDSRMNTKYDENDKLIREVKVITLKSKLVSDFRKDFQFYKVREINNYHHAHDAYLNAVVGTALIKKYPKLESEFVYGDYKVYDVRKMIAKSEQEIGKATAKYFFYSNIMNFFKTEITLANGEIRKRPLIETNGETGEIVWDKGRDFATVRKVLSMPQVNIVKKTEVQTGGFSKESILPKRNSDKLIARKKDWDPKKYGGFDSPTVAYSVLVVAKVEKGKSKKLKSVKELLGITIMERSSFEKNPIDFLEAKGYKEVKKDLIIKLPKYSLFELENGRKRMLASAGELQKGNELALPSKYVNFLYLASHYEKLKGSPEDNEQKQLFVEQHKHYLDEIIEQISEFSKRVILADANLDKVLSAYNKHRDKPIREQAENIIHLFTLTNLGAPAAFKYFDTTIDRKRYTSTKEVLDATLIHQSITGLYETRIDLSQLGGDGGEAAAKEAAAKEAAAKEAAAKEAAAKEAAAKGGTLNIEDEYRLHETSKEPDVSLGSTWLSDFPQAWAETGGMGLAVRQAPLIIPLKATSTPVSIKQYPMSQEARLGIKPHIQRLLDQGILVPCQSPWNTPLLPVKKPGTNDYRPVQDLREVNKRVEDIHPTVPNPYNLLSGLPPSHQWYTVLDLKDAFFCLRLHPTSQPLFAFEWRDPEMGISGQLTWTRLPQGFKNSPTLFNEALHRDLAGFRIQHPDLILLQYVDDLLLAATSELDCQQGTRALLQTLGDLGYRASAKKAQICQKQVKYLGYLLKEGQRWLTEARKETVMGQPIPKTPRQLREFLGKAGFCRLFIPGFAEMAAPLYPLTKPGTLFNWGPDQQKAFQEIKQALLTAPALGLPDLTKPFELFVDEKQGYAKGVLTQKLGPWRRPVAYLSKKLDPVAAGWPPCLRMVAAIAVLTKDAGKLTMGQPLVILAPHAVEALVKQPPDRWLSNARMTHYQALLLDTDRVQFGPVVALNPATLLPLPEEGLQHDCLDILAEAHGTRSDLMDQPLPDADHTWYTDGSSFLQEGQRKAGAAVTTETEVIWARALPAGTSAQRAELIALTQALKMAEGKKLNVYTDSRYAFATAHIHGEIYRRRGWLTSEGKEIKNKDEILALLKALFLPKRLSIIHCPGHQKGNSAEARGNRMADQAAREVATRETPETSTLLAGKRTADGSEFEKRTADGSEFESPKKKAKVE

SEQ ID NO: 2323 - protein, 2088 aa, synthetic construct
MPAAKRVKLDGGDKKYSIGLDIGTNSVGWAVITDEYKVPSKKFKVLGNTDRHSIKKNLIGALLFDSGETAEATRLKRTARRRYTRRKNRICYLQEIFSNEMAKVDDSFFHRLEESFLVEEDKKHERHPIFGNIVDEVAYHEKYPTIYHLRKKLVDSTDKADLRLIYLALAHMIKFRGHFLIEGDLNPDNSDVDKLFIQLVQTYNQLFEENPINASGVDAKAILSARLSKSRRLENLIAQLPGEKKNGLFGNLIALSLGLTPNFKSNFDLAEDAKLQLSKDTYDDDLDNLLAQIGDQYADLFLAAKNLSDAILLSDILRVNTEITKAPLSASMIKRYDEHHQDLTLLKALVRQQLPEKYKEIFFDQSKNGYAGYIDGGASQEEFYKFIKPILEKMDGTEELLVKLNREDLLRKQRTFDNGSIPHQIHLGELHAILRRQEDFYPFLKDNREKIEKILTFRIPYYVGPLARGNSRFAWMTRKSEETITPWNFEEVVDKGASAQSFIERMTNFDKNLPNEKVLPKHSLLYEYFTVYNELTKVKYVTEGMRKPAFLSGEQKKAIVDLLFKTNRKVTVKQLKEDYFKKIECFDSVEISGVEDRFNASLGTYHDLLKIIKDKDFLDNEENEDILEDIVLTLTLFEDREMIEERLKTYAHLFDDKVMKQLKRRRYTGWGRLSRKLINGIRDKQSGKTILDFLKSDGFANRNFMQLIHDDSLTFKEDIQKAQVSGQGDSLHEHIANLAGSPAIKKGILQTVKVVDELVKVMGRHKPENIVIEMARENQTTQKGQKNSRERMKRIEEGIKELGSQILKEHPVENTQLQNEKLYLYYLQNGRDMYVDQELDINRLSDYDVDHIVPQSFLKDDSIDNKVLTRSDKARGKSDNVPSEEVVKKMKNYWRQLLNAKLITQRKFDNLTKAERGGLSELDKAGFIKRQLVETRQITKHVAQILDSRMNTKYDENDKLIREVKVITLKSKLVSDFRKDFQFYKVREINNYHHAHDAYLNAVVGTALIKKYPKLESEFVYGDYKVYDVRKMIAKSEQEIGKATAKYFFYSNIMNFFKTEITLANGEIRKRPLIETNGETGEIVWDKGRDFATVRKVLSMPQVNIVKKTEVQTGGFSKESILPKRNSDKLIARKKDWDPKKYGGFDSPTVAYSVLVVAKVEKGKSKKLKSVKELLGITIMERSSFEKNPIDFLEAKGYKEVKKDLIIKLPKYSLFELENGRKRMLASAGELQKGNELALPSKYVNFLYLASHYEKLKGSPEDNEQKQLFVEQHKHYLDEIIEQISEFSKRVILADANLDKVLSAYNKHRDKPIREQAENIIHLFTLTNLGAPAAFKYFDTTIDRKRYTSTKEVLDATLIHQSITGLYETRIDLSQLGGDGGGGSGGTLNIEDEYRLHETSKEPDVSLGSTWLSDFPQAWAETGGMGLAVRQAPLIIPLKATSTPVSIKQYPMSQEARLGIKPHIQRLLDQGILVPCQSPWNTPLLPVKKPGTNDYRPVQDLREVNKRVEDIHPTVPNPYNLLSGLPPSHQWYTVLDLKDAFFCLRLHPTSQPLFAFEWRDPEMGISGQLTWTRLPQGFKNSPTLFNEALHRDLAGFRIQHPDLILLQYVDDLLLAATSELDCQQGTRALLQTLGDLGYRASAKKAQICQKQVKYLGYLLKEGQRWLTEARKETVMGQPIPKTPRQLREFLGKAGFCRLFIPGFAEMAAPLYPLTKPGTLFNWGPDQQKAFQEIKQALLTAPALGLPDLTKPFELFVDEKQGYAKGVLTQKLGPWRRPVAYLSKKLDPVAAGWPPCLRMVAAIAVLTKDAGKLTMGQPLVILAPHAVEALVKQPPDRWLSNARMTHYQALLLDTDRVQFGPVVALNPATLLPLPEEGLQHDCLDILAEAHGTRSDLMDQPLPDADHTWYTDGSSFLQEGQRKAGAAVTTETEVIWARALPAGTSAQRAELIALTQALKMAEGKKLNVYTDSRYAFATAHIHGEIYRRRGWLTSEGKEIKNKDEILALLKALFLPKRLSIIHCPGHQKGNSAEARGNRMADQAAREVATRETPETSTLLAGKRTADGSEFEKRTADGSEFESPKKKAKVE

SEQ ID NO: 2324 - protein, 2110 aa, synthetic construct
MPAAKRVKLDGGDKKYSIGLDIGTNSVGWAVITDEYKVPSKKFKVLGNTDRHSIKKNLIGALLFDSGETAEATRLKRTARRRYTRRKNRICYLQEIFSNEMAKVDDSFFHRLEESFLVEEDKKHERHPIFGNIVDEVAYHEKYPTIYHLRKKLVDSTDKADLRLIYLALAHMIKFRGHFLIEGDLNPDNSDVDKLFIQLVQTYNQLFEENPINASGVDAKAILSARLSKSRRLENLIAQLPGEKKNGLFGNLIALSLGLTPNFKSNFDLAEDAKLQLSKDTYDDDLDNLLAQIGDQYADLFLAAKNLSDAILLSDILRVNTEITKAPLSASMIKRYDEHHQDLTLLKALVRQQLPEKYKEIFFDQSKNGYAGYIDGGASQEEFYKFIKPILEKMDGTEELLVKLNREDLLRKQRTFDNGSIPHQIHLGELHAILRRQEDFYPFLKDNREKIEKILTFRIPYYVGPLARGNSRFAWMTRKSEETITPWNFEEVVDKGASAQSFIERMTNFDKNLPNEKVLPKHSLLYEYFTVYNELTKVKYVTEGMRKPAFLSGEQKKAIVDLLFKTNRKVTVKQLKEDYFKKIECFDSVEISGVEDRFNASLGTYHDLLKIIKDKDFLDNEENEDILEDIVLTLTLFEDREMIEERLKTYAHLFDDKVMKQLKRRRYTGWGRLSRKLINGIRDKQSGKTILDFLKSDGFANRNFMQLIHDDSLTFKEDIQKAQVSGQGDSLHEHIANLAGSPAIKKGILQTVKVVDELVKVMGRHKPENIVIEMARENQTTQKGQKNSRERMKRIEEGIKELGSQILKEHPVENTQLQNEKLYLYYLQNGRDMYVDQELDINRLSDYDVDHIVPQSFLKDDSIDNKVLTRSDKARGKSDNVPSEEVVKKMKNYWRQLLNAKLITQRKFDNLTKAERGGLSELDKAGFIKRQLVETRQITKHVAQILDSRMNTKYDENDKLIREVKVITLKSKLVSDFRKDFQFYKVREINNYHHAHDAYLNAVVGTALIKKYPKLESEFVYGDYKVYDVRKMIAKSEQEIGKATAKYFFYSNIMNFFKTEITLANGEIRKRPLIETNGETGEIVWDKGRDFATVRKVLSMPQVNIVKKTEVQTGGFSKESILPKRNSDKLIARKKDWDPKKYGGFDSPTVAYSVLVVAKVEKGKSKKLKSVKELLGITIMERSSFEKNPIDFLEAKGYKEVKKDLIIKLPKYSLFELENGRKRMLASAGELQKGNELALPSKYVNFLYLASHYEKLKGSPEDNEQKQLFVEQHKHYLDEIIEQISEFSKRVILADANLDKVLSAYNKHRDKPIREQAENIIHLFTLTNLGAPAAFKYFDTTIDRKRYTSTKEVLDATLIHQSITGLYETRIDLSQLGGDGGEAAAKEAAAKEAAAKEAAAKEAAAKGGTLNIEDEYRLHETSKEPDVSLGSTWLSDFPQAWAETGGMGLAVRQAPLIIPLKATSTPVSIKQYPMSQEARLGIKPHIQRLLDQGILVPCQSPWNTPLLPVKKPGTNDYRPVQDLREVNKRVEDIHPTVPNPYNLLSGLPPSHQWYTVLDLKDAFFCLRLHPTSQPLFAFEWRDPEMGISGQLTWTRLPQGFKNSPTLFNEALHRDLAGFRIQHPDLILLQYVDDLLLAATSELDCQQGTRALLQTLGDLGYRASAKKAQICQKQVKYLGYLLKEGQRWLTEARKETVMGQPIPKTPRQLREFLGKAGFCRLFIPGFAEMAAPLYPLTKPGTLFNWGPDQQKAFQEIKQALLTAPALGLPDLTKPFELFVDEKQGYAKGVLTQKLGPWRRPVAYLSKKLDPVAAGWPPCLRMVAAIAVLTKDAGKLTMGQPLVILAPHAVEALVKQPPDRWLSNARMTHYQALLLDTDRVQFGPVVALNPATLLPLPEEGLQHDCLDILAEAHGTRSDLMDQPLPDADHTWYTDGSSFLQEGQRKAGAAVTTETEVIWARALPAGTSAQRAELIALTQALKMAEGKKLNVYTDSRYAFATAHIHGEIYRRRGWLTSEGKEIKNKDEILALLKALFLPKRLSIIHCPGHQKGNSAEARGNRMADQAAREVATRETPETSTLLAGKRTADGSEFEKRTADGSEFESPKKKAKVE

SEQ ID NO: 2325 - protein, 2105 aa, synthetic construct
MPAAKRVKLDGGDKKYSIGLDIGTNSVGWAVITDEYKVPSKKFKVLGNTDRHSIKKNLIGALLFDSGETAEATRLKRTARRRYTRRKNRICYLQEIFSNEMAKVDDSFFHRLEESFLVEEDKKHERHPIFGNIVDEVAYHEKYPTIYHLRKKLVDSTDKADLRLIYLALAHMIKFRGHFLIEGDLNPDNSDVDKLFIQLVQTYNQLFEENPINASGVDAKAILSARLSKSRRLENLIAQLPGEKKNGLFGNLIALSLGLTPNFKSNFDLAEDAKLQLSKDTYDDDLDNLLAQIGDQYADLFLAAKNLSDAILLSDILRVNTEITKAPLSASMIKRYDEHHQDLTLLKALVRQQLPEKYKEIFFDQSKNGYAGYIDGGASQEEFYKFIKPILEKMDGTEELLVKLNREDLLRKQRTFDNGSIPHQIHLGELHAILRRQEDFYPFLKDNREKIEKILTFRIPYYVGPLARGNSRFAWMTRKSEETITPWNFEEVVDKGASAQSFIERMTNFDKNLPNEKVLPKHSLLYEYFTVYNELTKVKYVTEGMRKPAFLSGEQKKAIVDLLFKTNRKVTVKQLKEDYFKKIECFDSVEISGVEDRFNASLGTYHDLLKIIKDKDFLDNEENEDILEDIVLTLTLFEDREMIEERLKTYAHLFDDKVMKQLKRRRYTGWGRLSRKLINGIRDKQSGKTILDFLKSDGFANRNFMQLIHDDSLTFKEDIQKAQVSGQGDSLHEHIANLAGSPAIKKGILQTVKVVDELVKVMGRHKPENIVIEMARENQTTQKGQKNSRERMKRIEEGIKELGSQILKEHPVENTQLQNEKLYLYYLQNGRDMYVDQELDINRLSDYDVDHIVPQSFLKDDSIDNKVLTRSDKARGKSDNVPSEEVVKKMKNYWRQLLNAKLITQRKFDNLTKAERGGLSELDKAGFIKRQLVETRQITKHVAQILDSRMNTKYDENDKLIREVKVITLKSKLVSDFRKDFQFYKVREINNYHHAHDAYLNAVVGTALIKKYPKLESEFVYGDYKVYDVRKMIAKSEQEIGKATAKYFFYSNIMNFFKTEITLANGEIRKRPLIETNGETGEIVWDKGRDFATVRKVLSMPQVNIVKKTEVQTGGFSKESILPKRNSDKLIARKKDWDPKKYGGFDSPTVAYSVLVVAKVEKGKSKKLKSVKELLGITIMERSSFEKNPIDFLEAKGYKEVKKDLIIKLPKYSLFELENGRKRMLASAGELQKGNELALPSKYVNFLYLASHYEKLKGSPEDNEQKQLFVEQHKHYLDEIIEQISEFSKRVILADANLDKVLSAYNKHRDKPIREQAENIIHLFTLTNLGAPAAFKYFDTTIDRKRYTSTKEVLDATLIHQSITGLYETRIDLSQLGGDGGEAAAKEAAAKEAAAKEAAAKGGTLNIEDEYRLHETSKEPDVSLGSTWLSDFPQAWAETGGMGLAVRQAPLIIPLKATSTPVSIKQYPMSQEARLGIKPHIQRLLDQGILVPCQSPWNTPLLPVKKPGTNDYRPVQDLREVNKRVEDIHPTVPNPYNLLSGLPPSHQWYTVLDLKDAFFCLRLHPTSQPLFAFEWRDPEMGISGQLTWTRLPQGFKNSPTLFNEALHRDLAGFRIQHPDLILLQYVDDLLLAATSELDCQQGTRALLQTLGDLGYRASAKKAQICQKQVKYLGYLLKEGQRWLTEARKETVMGQPIPKTPRQLREFLGKAGFCRLFIPGFAEMAAPLYPLTKPGTLFNWGPDQQKAFQEIKQALLTAPALGLPDLTKPFELFVDEKQGYAKGVLTQKLGPWRRPVAYLSKKLDPVAAGWPPCLRMVAAIAVLTKDAGKLTMGQPLVILAPHAVEALVKQPPDRWLSNARMTHYQALLLDTDRVQFGPVVALNPATLLPLPEEGLQHDCLDILAEAHGTRSDLMDQPLPDADHTWYTDGSSFLQEGQRKAGAAVTTETEVIWARALPAGTSAQRAELIALTQALKMAEGKKLNVYTDSRYAFATAHIHGEIYRRRGWLTSEGKEIKNKDEILALLKALFLPKRLSIIHCPGHQKGNSAEARGNRMADQAAREVATRETPETSTLLAGKRTADGSEFEKRTADGSEFESPKKKAKVE

SEQ ID NO: 2326 - protein, 2096 aa, synthetic construct
MPAAKRVKLDGGDKKYSIGLDIGTNSVGWAVITDEYKVPSKKFKVLGNTDRHSIKKNLIGALLFDSGETAEATRLKRTARRRYTRRKNRICYLQEIFSNEMAKVDDSFFHRLEESFLVEEDKKHERHPIFGNIVDEVAYHEKYPTIYHLRKKLVDSTDKADLRLIYLALAHMIKFRGHFLIEGDLNPDNSDVDKLFIQLVQTYNQLFEENPINASGVDAKAILSARLSKSRRLENLIAQLPGEKKNGLFGNLIALSLGLTPNFKSNFDLAEDAKLQLSKDTYDDDLDNLLAQIGDQYADLFLAAKNLSDAILLSDILRVNTEITKAPLSASMIKRYDEHHQDLTLLKALVRQQLPEKYKEIFFDQSKNGYAGYIDGGASQEEFYKFIKPILEKMDGTEELLVKLNREDLLRKQRTFDNGSIPHQIHLGELHAILRRQEDFYPFLKDNREKIEKILTFRIPYYVGPLARGNSRFAWMTRKSEETITPWNFEEVVDKGASAQSFIERMTNFDKNLPNEKVLPKHSLLYEYFTVYNELTKVKYVTEGMRKPAFLSGEQKKAIVDLLFKTNRKVTVKQLKEDYFKKIECFDSVEISGVEDRFNASLGTYHDLLKIIKDKDFLDNEENEDILEDIVLTLTLFEDREMIEERLKTYAHLFDDKVMKQLKRRRYTGWGRLSRKLINGIRDKQSGKTILDFLKSDGFANRNFMQLIHDDSLTFKEDIQKAQVSGQGDSLHEHIANLAGSPAIKKGILQTVKVVDELVKVMGRHKPENIVIEMARENQTTQKGQKNSRERMKRIEEGIKELGSQILKEHPVENTQLQNEKLYLYYLQNGRDMYVDQELDINRLSDYDVDHIVPQSFLKDDSIDNKVLTRSDKARGKSDNVPSEEVVKKMKNYWRQLLNAKLITQRKFDNLTKAERGGLSELDKAGFIKRQLVETRQITKHVAQILDSRMNTKYDENDKLIREVKVITLKSKLVSDFRKDFQFYKVREINNYHHAHDAYLNAVVGTALIKKYPKLESEFVYGDYKVYDVRKMIAKSEQEIGKATAKYFFYSNIMNFFKTEITLANGEIRKRPLIETNGETGEIVWDKGRDFATVRKVLSMPQVNIVKKTEVQTGGFSKESILPKRNSDKLIARKKDWDPKKYGGFDSPTVAYSVLVVAKVEKGKSKKLKSVKELLGITIMERSSFEKNPIDFLEAKGYKEVKKDLIIKLPKYSLFELENGRKRMLASAGELQKGNELALPSKYVNFLYLASHYEKLKGSPEDNEQKQLFVEQHKHYLDEIIEQISEFSKRVILADANLDKVLSAYNKHRDKPIREQAENIIHLFTLTNLGAPAAFKYFDTTIDRKRYTSTKEVLDATLIHQSITGLYETRIDLSQLGGDGGGGSEAAAKPAPGGTLNIEDEYRLHETSKEPDVSLGSTWLSDFPQAWAETGGMGLAVRQAPLIIPLKATSTPVSIKQYPMSQEARLGIKPHIQRLLDQGILVPCQSPWNTPLLPVKKPGTNDYRPVQDLREVNKRVEDIHPTVPNPYNLLSGLPPSHQWYTVLDLKDAFFCLRLHPTSQPLFAFEWRDPEMGISGQLTWTRLPQGFKNSPTLFNEALHRDLAGFRIQHPDLILLQYVDDLLLAATSELDCQQGTRALLQTLGDLGYRASAKKAQICQKQVKYLGYLLKEGQRWLTEARKETVMGQPIPKTPRQLREFLGKAGFCRLFIPGFAEMAAPLYPLTKPGTLFNWGPDQQKAFQEIKQALLTAPALGLPDLTKPFELFVDEKQGYAKGVLTQKLGPWRRPVAYLSKKLDPVAAGWPPCLRMVAAIAVLTKDAGKLTMGQPLVILAPHAVEALVKQPPDRWLSNARMTHYQALLLDTDRVQFGPVVALNPATLLPLPEEGLQHDCLDILAEAHGTRSDLMDQPLPDADHTWYTDGSSFLQEGQRKAGAAVTTETEVIWARALPAGTSAQRAELIALTQALKMAEGKKLNVYTDSRYAFATAHIHGEIYRRRGWLTSEGKEIKNKDEILALLKALFLPKRLSIIHCPGHQKGNSAEARGNRMADQAAREVATRETPETSTLLAGKRTADGSEFEKRTADGSEFESPKKKAKVE

SEQ ID NO: 2327 - protein, 2096 aa, synthetic construct
MPAAKRVKLDGGDKKYSIGLDIGTNSVGWAVITDEYKVPSKKFKVLGNTDRHSIKKNLIGALLFDSGETAEATRLKRTARRRYTRRKNRICYLQEIFSNEMAKVDDSFFHRLEESFLVEEDKKHERHPIFGNIVDEVAYHEKYPTIYHLRKKLVDSTDKADLRLIYLALAHMIKFRGHFLIEGDLNPDNSDVDKLFIQLVQTYNQLFEENPINASGVDAKAILSARLSKSRRLENLIAQLPGEKKNGLFGNLIALSLGLTPNFKSNFDLAEDAKLQLSKDTYDDDLDNLLAQIGDQYADLFLAAKNLSDAILLSDILRVNTEITKAPLSASMIKRYDEHHQDLTLLKALVRQQLPEKYKEIFFDQSKNGYAGYIDGGASQEEFYKFIKPILEKMDGTEELLVKLNREDLLRKQRTFDNGSIPHQIHLGELHAILRRQEDFYPFLKDNREKIEKILTFRIPYYVGPLARGNSRFAWMTRKSEETITPWNFEEVVDKGASAQSFIERMTNFDKNLPNEKVLPKHSLLYEYFTVYNELTKVKYVTEGMRKPAFLSGEQKKAIVDLLFKTNRKVTVKQLKEDYFKKIECFDSVEISGVEDRFNASLGTYHDLLKIIKDKDFLDNEENEDILEDIVLTLTLFEDREMIEERLKTYAHLFDDKVMKQLKRRRYTGWGRLSRKLINGIRDKQSGKTILDFLKSDGFANRNFMQLIHDDSLTFKEDIQKAQVSGQGDSLHEHIANLAGSPAIKKGILQTVKVVDELVKVMGRHKPENIVIEMARENQTTQKGQKNSRERMKRIEEGIKELGSQILKEHPVENTQLQNEKLYLYYLQNGRDMYVDQELDINRLSDYDVDHIVPQSFLKDDSIDNKVLTRSDKARGKSDNVPSEEVVKKMKNYWRQLLNAKLITQRKFDNLTKAERGGLSELDKAGFIKRQLVETRQITKHVAQILDSRMNTKYDENDKLIREVKVITLKSKLVSDFRKDFQFYKVREINNYHHAHDAYLNAVVGTALIKKYPKLESEFVYGDYKVYDVRKMIAKSEQEIGKATAKYFFYSNIMNFFKTEITLANGEIRKRPLIETNGETGEIVWDKGRDFATVRKVLSMPQVNIVKKTEVQTGGFSKESILPKRNSDKLIARKKDWDPKKYGGFDSPTVAYSVLVVAKVEKGKSKKLKSVKELLGITIMERSSFEKNPIDFLEAKGYKEVKKDLIIKLPKYSLFELENGRKRMLASAGELQKGNELALPSKYVNFLYLASHYEKLKGSPEDNEQKQLFVEQHKHYLDEIIEQISEFSKRVILADANLDKVLSAYNKHRDKPIREQAENIIHLFTLTNLGAPAAFKYFDTTIDRKRYTSTKEVLDATLIHQSITGLYETRIDLSQLGGDGGGGGGSSEAAAKGGTLNIEDEYRLHETSKEPDVSLGSTWLSDFPQAWAETGGMGLAVRQAPLIIPLKATSTPVSIKQYPMSQEARLGIKPHIQRLLDQGILVPCQSPWNTPLLPVKKPGTNDYRPVQDLREVNKRVEDIHPTVPNPYNLLSGLPPSHQWYTVLDLKDAFFCLRLHPTSQPLFAFEWRDPEMGISGQLTWTRLPQGFKNSPTLFNEALHRDLAGFRIQHPDLILLQYVDDLLLAATSELDCQQGTRALLQTLGDLGYRASAKKAQICQKQVKYLGYLLKEGQRWLTEARKETVMGQPIPKTPRQLREFLGKAGFCRLFIPGFAEMAAPLYPLTKPGTLFNWGPDQQKAFQEIKQALLTAPALGLPDLTKPFELFVDEKQGYAKGVLTQKLGPWRRPVAYLSKKLDPVAAGWPPCLRMVAAIAVLTKDAGKLTMGQPLVILAPHAVEALVKQPPDRWLSNARMTHYQALLLDTDRVQFGPVVALNPATLLPLPEEGLQHDCLDILAEAHGTRSDLMDQPLPDADHTWYTDGSSFLQEGQRKAGAAVTTETEVIWARALPAGTSAQRAELIALTQALKMAEGKKLNVYTDSRYAFATAHIHGEIYRRRGWLTSEGKEIKNKDEILALLKALFLPKRLSIIHCPGHQKGNSAEARGNRMADQAAREVATRETPETSTLLAGKRTADGSEFEKRTADGSEFESPKKKAKVE

SEQ ID NO: 2328 - protein, 2090 aa, synthetic construct
MPAAKRVKLDGGDKKYSIGLDIGTNSVGWAVITDEYKVPSKKFKVLGNTDRHSIKKNLIGALLFDSGETAEATRLKRTARRRYTRRKNRICYLQEIFSNEMAKVDDSFFHRLEESFLVEEDKKHERHPIFGNIVDEVAYHEKYPTIYHLRKKLVDSTDKADLRLIYLALAHMIKFRGHFLIEGDLNPDNSDVDKLFIQLVQTYNQLFEENPINASGVDAKAILSARLSKSRRLENLIAQLPGEKKNGLFGNLIALSLGLTPNFKSNFDLAEDAKLQLSKDTYDDDLDNLLAQIGDQYADLFLAAKNLSDAILLSDILRVNTEITKAPLSASMIKRYDEHHQDLTLLKALVRQQLPEKYKEIFFDQSKNGYAGYIDGGASQEEFYKFIKPILEKMDGTEELLVKLNREDLLRKQRTFDNGSIPHQIHLGELHAILRRQEDFYPFLKDNREKIEKILTFRIPYYVGPLARGNSRFAWMTRKSEETITPWNFEEVVDKGASAQSFIERMTNFDKNLPNEKVLPKHSLLYEYFTVYNELTKVKYVTEGMRKPAFLSGEQKKAIVDLLFKTNRKVTVKQLKEDYFKKIECFDSVEISGVEDRFNASLGTYHDLLKIIKDKDFLDNEENEDILEDIVLTLTLFEDREMIEERLKTYAHLFDDKVMKQLKRRRYTGWGRLSRKLINGIRDKQSGKTILDFLKSDGFANRNFMQLIHDDSLTFKEDIQKAQVSGQGDSLHEHIANLAGSPAIKKGILQTVKVVDELVKVMGRHKPENIVIEMARENQTTQKGQKNSRERMKRIEEGIKELGSQILKEHPVENTQLQNEKLYLYYLQNGRDMYVDQELDINRLSDYDVDHIVPQSFLKDDSIDNKVLTRSDKARGKSDNVPSEEVVKKMKNYWRQLLNAKLITQRKFDNLTKAERGGLSELDKAGFIKRQLVETRQITKHVAQILDSRMNTKYDENDKLIREVKVITLKSKLVSDFRKDFQFYKVREINNYHHAHDAYLNAVVGTALIKKYPKLESEFVYGDYKVYDVRKMIAKSEQEIGKATAKYFFYSNIMNFFKTEITLANGEIRKRPLIETNGETGEIVWDKGRDFATVRKVLSMPQVNIVKKTEVQTGGFSKESILPKRNSDKLIARKKDWDPKKYGGFDSPTVAYSVLVVAKVEKGKSKKLKSVKELLGITIMERSSFEKNPIDFLEAKGYKEVKKDLIIKLPKYSLFELENGRKRMLASAGELQKGNELALPSKYVNFLYLASHYEKLKGSPEDNEQKQLFVEQHKHYLDEIIEQISEFSKRVILADANLDKVLSAYNKHRDKPIREQAENIIHLFTLTNLGAPAAFKYFDTTIDRKRYTSTKEVLDATLIHQSITGLYETRIDLSQLGGDGGEAAAKGGTLNIEDEYRLHETSKEPDVSLGSTWLSDFPQAWAETGGMGLAVRQAPLIIPLKATSTPVSIKQYPMSQEARLGIKPHIQRLLDQGILVPCQSPWNTPLLPVKKPGTNDYRPVQDLREVNKRVEDIHPTVPNPYNLLSGLPPSHQWYTVLDLKDAFFCLRLHPTSQPLFAFEWRDPEMGISGQLTWTRLPQGFKNSPTLFNEALHRDLAGFRIQHPDLILLQYVDDLLLAATSELDCQQGTRALLQTLGDLGYRASAKKAQICQKQVKYLGYLLKEGQRWLTEARKETVMGQPIPKTPRQLREFLGKAGFCRLFIPGFAEMAAPLYPLTKPGTLFNWGPDQQKAFQEIKQALLTAPALGLPDLTKPFELFVDEKQGYAKGVLTQKLGPWRRPVAYLSKKLDPVAAGWPPCLRMVAAIAVLTKDAGKLTMGQPLVILAPHAVEALVKQPPDRWLSNARMTHYQALLLDTDRVQFGPVVALNPATLLPLPEEGLQHDCLDILAEAHGTRSDLMDQPLPDADHTWYTDGSSFLQEGQRKAGAAVTTETEVIWARALPAGTSAQRAELIALTQALKMAEGKKLNVYTDSRYAFATAHIHGEIYRRRGWLTSEGKEIKNKDEILALLKALFLPKRLSIIHCPGHQKGNSAEARGNRMADQAAREVATRETPETSTLLAGKRTADGSEFEKRTADGSEFESPKKKAKVE

SEQ ID NO: 2329 - protein, 2094 aa, synthetic construct
MPAAKRVKLDGGDKKYSIGLDIGTNSVGWAVITDEYKVPSKKFKVLGNTDRHSIKKNLIGALLFDSGETAEATRLKRTARRRYTRRKNRICYLQEIFSNEMAKVDDSFFHRLEESFLVEEDKKHERHPIFGNIVDEVAYHEKYPTIYHLRKKLVDSTDKADLRLIYLALAHMIKFRGHFLIEGDLNPDNSDVDKLFIQLVQTYNQLFEENPINASGVDAKAILSARLSKSRRLENLIAQLPGEKKNGLFGNLIALSLGLTPNFKSNFDLAEDAKLQLSKDTYDDDLDNLLAQIGDQYADLFLAAKNLSDAILLSDILRVNTEITKAPLSASMIKRYDEHHQDLTLLKALVRQQLPEKYKEIFFDQSKNGYAGYIDGGASQEEFYKFIKPILEKMDGTEELLVKLNREDLLRKQRTFDNGSIPHQIHLGELHAILRRQEDFYPFLKDNREKIEKILTFRIPYYVGPLARGNSRFAWMTRKSEETITPWNFEEVVDKGASAQSFIERMTNFDKNLPNEKVLPKHSLLYEYFTVYNELTKVKYVTEGMRKPAFLSGEQKKAIVDLLFKTNRKVTVKQLKEDYFKKIECFDSVEISGVEDRFNASLGTYHDLLKIIKDKDFLDNEENEDILEDIVLTLTLFEDREMIEERLKTYAHLFDDKVMKQLKRRRYTGWGRLSRKLINGIRDKQSGKTILDFLKSDGFANRNFMQLIHDDSLTFKEDIQKAQVSGQGDSLHEHIANLAGSPAIKKGILQTVKVVDELVKVMGRHKPENIVIEMARENQTTQKGQKNSRERMKRIEEGIKELGSQILKEHPVENTQLQNEKLYLYYLQNGRDMYVDQELDINRLSDYDVDHIVPQSFLKDDSIDNKVLTRSDKARGKSDNVPSEEVVKKMKNYWRQLLNAKLITQRKFDNLTKAERGGLSELDKAGFIKRQLVETRQITKHVAQILDSRMNTKYDENDKLIREVKVITLKSKLVSDFRKDFQFYKVREINNYHHAHDAYLNAVVGTALIKKYPKLESEFVYGDYKVYDVRKMIAKSEQEIGKATAKYFFYSNIMNFFKTEITLANGEIRKRPLIETNGETGEIVWDKGRDFATVRKVLSMPQVNIVKKTEVQTGGFSKESILPKRNSDKLIARKKDWDPKKYGGFDSPTVAYSVLVVAKVEKGKSKKLKSVKELLGITIMERSSFEKNPIDFLEAKGYKEVKKDLIIKLPKYSLFELENGRKRMLASAGELQKGNELALPSKYVNFLYLASHYEKLKGSPEDNEQKQLFVEQHKHYLDEIIEQISEFSKRVILADANLDKVLSAYNKHRDKPIREQAENIIHLFTLTNLGAPAAFKYFDTTIDRKRYTSTKEVLDATLIHQSITGLYETRIDLSQLGGDGGGSSPAPGGGGGTLNIEDEYRLHETSKEPDVSLGSTWLSDFPQAWAETGGMGLAVRQAPLIIPLKATSTPVSIKQYPMSQEARLGIKPHIQRLLDQGILVPCQSPWNTPLLPVKKPGTNDYRPVQDLREVNKRVEDIHPTVPNPYNLLSGLPPSHQWYTVLDLKDAFFCLRLHPTSQPLFAFEWRDPEMGISGQLTWTRLPQGFKNSPTLFNEALHRDLAGFRIQHPDLILLQYVDDLLLAATSELDCQQGTRALLQTLGDLGYRASAKKAQICQKQVKYLGYLLKEGQRWLTEARKETVMGQPIPKTPRQLREFLGKAGFCRLFIPGFAEMAAPLYPLTKPGTLFNWGPDQQKAFQEIKQALLTAPALGLPDLTKPFELFVDEKQGYAKGVLTQKLGPWRRPVAYLSKKLDPVAAGWPPCLRMVAAIAVLTKDAGKLTMGQPLVILAPHAVEALVKQPPDRWLSNARMTHYQALLLDTDRVQFGPVVALNPATLLPLPEEGLQHDCLDILAEAHGTRSDLMDQPLPDADHTWYTDGSSFLQEGQRKAGAAVTTETEVIWARALPAGTSAQRAELIALTQALKMAEGKKLNVYTDSRYAFATAHIHGEIYRRRGWLTSEGKEIKNKDEILALLKALFLPKRLSIIHCPGHQKGNSAEARGNRMADQAAREVATRETPETSTLLAGKRTADGSEFEKRTADGSEFESPKKKAKVE

SEQ ID NO: 2330 - protein, 2088 aa, synthetic construct
MPAAKRVKLDGGDKKYSIGLDIGTNSVGWAVITDEYKVPSKKFKVLGNTDRHSIKKNLIGALLFDSGETAEATRLKRTARRRYTRRKNRICYLQEIFSNEMAKVDDSFFHRLEESFLVEEDKKHERHPIFGNIVDEVAYHEKYPTIYHLRKKLVDSTDKADLRLIYLALAHMIKFRGHFLIEGDLNPDNSDVDKLFIQLVQTYNQLFEENPINASGVDAKAILSARLSKSRRLENLIAQLPGEKKNGLFGNLIALSLGLTPNFKSNFDLAEDAKLQLSKDTYDDDLDNLLAQIGDQYADLFLAAKNLSDAILLSDILRVNTEITKAPLSASMIKRYDEHHQDLTLLKALVRQQLPEKYKEIFFDQSKNGYAGYIDGGASQEEFYKFIKPILEKMDGTEELLVKLNREDLLRKQRTFDNGSIPHQIHLGELHAILRRQEDFYPFLKDNREKIEKILTFRIPYYVGPLARGNSRFAWMTRKSEETITPWNFEEVVDKGASAQSFIERMTNFDKNLPNEKVLPKHSLLYEYFTVYNELTKVKYVTEGMRKPAFLSGEQKKAIVDLLFKTNRKVTVKQLKEDYFKKIECFDSVEISGVEDRFNASLGTYHDLLKIIKDKDFLDNEENEDILEDIVLTLTLFEDREMIEERLKTYAHLFDDKVMKQLKRRRYTGWGRLSRKLINGIRDKQSGKTILDFLKSDGFANRNFMQLIHDDSLTFKEDIQKAQVSGQGDSLHEHIANLAGSPAIKKGILQTVKVVDELVKVMGRHKPENIVIEMARENQTTQKGQKNSRERMKRIEEGIKELGSQILKEHPVENTQLQNEKLYLYYLQNGRDMYVDQELDINRLSDYDVDHIVPQSFLKDDSIDNKVLTRSDKARGKSDNVPSEEVVKKMKNYWRQLLNAKLITQRKFDNLTKAERGGLSELDKAGFIKRQLVETRQITKHVAQILDSRMNTKYDENDKLIREVKVITLKSKLVSDFRKDFQFYKVREINNYHHAHDAYLNAVVGTALIKKYPKLESEFVYGDYKVYDVRKMIAKSEQEIGKATAKYFFYSNIMNFFKTEITLANGEIRKRPLIETNGETGEIVWDKGRDFATVRKVLSMPQVNIVKKTEVQTGGFSKESILPKRNSDKLIARKKDWDPKKYGGFDSPTVAYSVLVVAKVEKGKSKKLKSVKELLGITIMERSSFEKNPIDFLEAKGYKEVKKDLIIKLPKYSLFELENGRKRMLASAGELQKGNELALPSKYVNFLYLASHYEKLKGSPEDNEQKQLFVEQHKHYLDEIIEQISEFSKRVILADANLDKVLSAYNKHRDKPIREQAENIIHLFTLTNLGAPAAFKYFDTTIDRKRYTSTKEVLDATLIHQSITGLYETRIDLSQLGGDGGGSSGGTLNIEDEYRLHETSKEPDVSLGSTWLSDFPQAWAETGGMGLAVRQAPLIIPLKATSTPVSIKQYPMSQEARLGIKPHIQRLLDQGILVPCQSPWNTPLLPVKKPGTNDYRPVQDLREVNKRVEDIHPTVPNPYNLLSGLPPSHQWYTVLDLKDAFFCLRLHPTSQPLFAFEWRDPEMGISGQLTWTRLPQGFKNSPTLFNEALHRDLAGFRIQHPDLILLQYVDDLLLAATSELDCQQGTRALLQTLGDLGYRASAKKAQICQKQVKYLGYLLKEGQRWLTEARKETVMGQPIPKTPRQLREFLGKAGFCRLFIPGFAEMAAPLYPLTKPGTLFNWGPDQQKAFQEIKQALLTAPALGLPDLTKPFELFVDEKQGYAKGVLTQKLGPWRRPVAYLSKKLDPVAAGWPPCLRMVAAIAVLTKDAGKLTMGQPLVILAPHAVEALVKQPPDRWLSNARMTHYQALLLDTDRVQFGPVVALNPATLLPLPEEGLQHDCLDILAEAHGTRSDLMDQPLPDADHTWYTDGSSFLQEGQRKAGAAVTTETEVIWARALPAGTSAQRAELIALTQALKMAEGKKLNVYTDSRYAFATAHIHGEIYRRRGWLTSEGKEIKNKDEILALLKALFLPKRLSIIHCPGHQKGNSAEARGNRMADQAAREVATRETPETSTLLAGKRTADGSEFEKRTADGSEFESPKKKAKVE

SEQ ID NO: 2331 - protein, 2094 aa, synthetic construct
MPAAKRVKLDGGDKKYSIGLDIGTNSVGWAVITDEYKVPSKKFKVLGNTDRHSIKKNLIGALLFDSGETAEATRLKRTARRRYTRRKNRICYLQEIFSNEMAKVDDSFFHRLEESFLVEEDKKHERHPIFGNIVDEVAYHEKYPTIYHLRKKLVDSTDKADLRLIYLALAHMIKFRGHFLIEGDLNPDNSDVDKLFIQLVQTYNQLFEENPINASGVDAKAILSARLSKSRRLENLIAQLPGEKKNGLFGNLIALSLGLTPNFKSNFDLAEDAKLQLSKDTYDDDLDNLLAQIGDQYADLFLAAKNLSDAILLSDILRVNTEITKAPLSASMIKRYDEHHQDLTLLKALVRQQLPEKYKEIFFDQSKNGYAGYIDGGASQEEFYKFIKPILEKMDGTEELLVKLNREDLLRKQRTFDNGSIPHQIHLGELHAILRRQEDFYPFLKDNREKIEKILTFRIPYYVGPLARGNSRFAWMTRKSEETITPWNFEEVVDKGASAQSFIERMTNFDKNLPNEKVLPKHSLLYEYFTVYNELTKVKYVTEGMRKPAFLSGEQKKAIVDLLFKTNRKVTVKQLKEDYFKKIECFDSVEISGVEDRFNASLGTYHDLLKIIKDKDFLDNEENEDILEDIVLTLTLFEDREMIEERLKTYAHLFDDKVMKQLKRRRYTGWGRLSRKLINGIRDKQSGKTILDFLKSDGFANRNFMQLIHDDSLTFKEDIQKAQVSGQGDSLHEHIANLAGSPAIKKGILQTVKVVDELVKVMGRHKPENIVIEMARENQTTQKGQKNSRERMKRIEEGIKELGSQILKEHPVENTQLQNEKLYLYYLQNGRDMYVDQELDINRLSDYDVDHIVPQSFLKDDSIDNKVLTRSDKARGKSDNVPSEEVVKKMKNYWRQLLNAKLITQRKFDNLTKAERGGLSELDKAGFIKRQLVETRQITKHVAQILDSRMNTKYDENDKLIREVKVITLKSKLVSDFRKDFQFYKVREINNYHHAHDAYLNAVVGTALIKKYPKLESEFVYGDYKVYDVRKMIAKSEQEIGKATAKYFFYSNIMNFFKTEITLANGEIRKRPLIETNGETGEIVWDKGRDFATVRKVLSMPQVNIVKKTEVQTGGFSKESILPKRNSDKLIARKKDWDPKKYGGFDSPTVAYSVLVVAKVEKGKSKKLKSVKELLGITIMERSSFEKNPIDFLEAKGYKEVKKDLIIKLPKYSLFELENGRKRMLASAGELQKGNELALPSKYVNFLYLASHYEKLKGSPEDNEQKQLFVEQHKHYLDEIIEQISEFSKRVILADANLDKVLSAYNKHRDKPIREQAENIIHLFTLTNLGAPAAFKYFDTTIDRKRYTSTKEVLDATLIHQSITGLYETRIDLSQLGGDGGGGSGSSGGGGGTLNIEDEYRLHETSKEPDVSLGSTWLSDFPQAWAETGGMGLAVRQAPLIIPLKATSTPVSIKQYPMSQEARLGIKPHIQRLLDQGILVPCQSPWNTPLLPVKKPGTNDYRPVQDLREVNKRVEDIHPTVPNPYNLLSGLPPSHQWYTVLDLKDAFFCLRLHPTSQPLFAFEWRDPEMGISGQLTWTRLPQGFKNSPTLFNEALHRDLAGFRIQHPDLILLQYVDDLLLAATSELDCQQGTRALLQTLGDLGYRASAKKAQICQKQVKYLGYLLKEGQRWLTEARKETVMGQPIPKTPRQLREFLGKAGFCRLFIPGFAEMAAPLYPLTKPGTLFNWGPDQQKAFQEIKQALLTAPALGLPDLTKPFELFVDEKQGYAKGVLTQKLGPWRRPVAYLSKKLDPVAAGWPPCLRMVAAIAVLTKDAGKLTMGQPLVILAPHAVEALVKQPPDRWLSNARMTHYQALLLDTDRVQFGPVVALNPATLLPLPEEGLQHDCLDILAEAHGTRSDLMDQPLPDADHTWYTDGSSFLQEGQRKAGAAVTTETEVIWARALPAGTSAQRAELIALTQALKMAEGKKLNVYTDSRYAFATAHIHGEIYRRRGWLTSEGKEIKNKDEILALLKALFLPKRLSIIHCPGHQKGNSAEARGNRMADQAAREVATRETPETSTLLAGKRTADGSEFEKRTADGSEFESPKKKAKVE

SEQ ID NO: 2332 - protein, 2096 aa, synthetic construct
MPAAKRVKLDGGDKKYSIGLDIGTNSVGWAVITDEYKVPSKKFKVLGNTDRHSIKKNLIGALLFDSGETAEATRLKRTARRRYTRRKNRICYLQEIFSNEMAKVDDSFFHRLEESFLVEEDKKHERHPIFGNIVDEVAYHEKYPTIYHLRKKLVDSTDKADLRLIYLALAHMIKFRGHFLIEGDLNPDNSDVDKLFIQLVQTYNQLFEENPINASGVDAKAILSARLSKSRRLENLIAQLPGEKKNGLFGNLIALSLGLTPNFKSNFDLAEDAKLQLSKDTYDDDLDNLLAQIGDQYADLFLAAKNLSDAILLSDILRVNTEITKAPLSASMIKRYDEHHQDLTLLKALVRQQLPEKYKEIFFDQSKNGYAGYIDGGASQEEFYKFIKPILEKMDGTEELLVKLNREDLLRKQRTFDNGSIPHQIHLGELHAILRRQEDFYPFLKDNREKIEKILTFRIPYYVGPLARGNSRFAWMTRKSEETITPWNFEEVVDKGASAQSFIERMTNFDKNLPNEKVLPKHSLLYEYFTVYNELTKVKYVTEGMRKPAFLSGEQKKAIVDLLFKTNRKVTVKQLKEDYFKKIECFDSVEISGVEDRFNASLGTYHDLLKIIKDKDFLDNEENEDILEDIVLTLTLFEDREMIEERLKTYAHLFDDKVMKQLKRRRYTGWGRLSRKLINGIRDKQSGKTILDFLKSDGFANRNFMQLIHDDSLTFKEDIQKAQVSGQGDSLHEHIANLAGSPAIKKGILQTVKVVDELVKVMGRHKPENIVIEMARENQTTQKGQKNSRERMKRIEEGIKELGSQILKEHPVENTQLQNEKLYLYYLQNGRDMYVDQELDINRLSDYDVDHIVPQSFLKDDSIDNKVLTRSDKARGKSDNVPSEEVVKKMKNYWRQLLNAKLITQRKFDNLTKAERGGLSELDKAGFIKRQLVETRQITKHVAQILDSRMNTKYDENDKLIREVKVITLKSKLVSDFRKDFQFYKVREINNYHHAHDAYLNAVVGTALIKKYPKLESEFVYGDYKVYDVRKMIAKSEQEIGKATAKYFFYSNIMNFFKTEITLANGEIRKRPLIETNGETGEIVWDKGRDFATVRKVLSMPQVNIVKKTEVQTGGFSKESILPKRNSDKLIARKKDWDPKKYGGFDSPTVAYSVLVVAKVEKGKSKKLKSVKELLGITIMERSSFEKNPIDFLEAKGYKEVKKDLIIKLPKYSLFELENGRKRMLASAGELQKGNELALPSKYVNFLYLASHYEKLKGSPEDNEQKQLFVEQHKHYLDEIIEQISEFSKRVILADANLDKVLSAYNKHRDKPIREQAENIIHLFTLTNLGAPAAFKYFDTTIDRKRYTSTKEVLDATLIHQSITGLYETRIDLSQLGGDGGPAPGGSEAAAKGGTLNIEDEYRLHETSKEPDVSLGSTWLSDFPQAWAETGGMGLAVRQAPLIIPLKATSTPVSIKQYPMSQEARLGIKPHIQRLLDQGILVPCQSPWNTPLLPVKKPGTNDYRPVQDLREVNKRVEDIHPTVPNPYNLLSGLPPSHQWYTVLDLKDAFFCLRLHPTSQPLFAFEWRDPEMGISGQLTWTRLPQGFKNSPTLFNEALHRDLAGFRIQHPDLILLQYVDDLLLAATSELDCQQGTRALLQTLGDLGYRASAKKAQICQKQVKYLGYLLKEGQRWLTEARKETVMGQPIPKTPRQLREFLGKAGFCRLFIPGFAEMAAPLYPLTKPGTLFNWGPDQQKAFQEIKQALLTAPALGLPDLTKPFELFVDEKQGYAKGVLTQKLGPWRRPVAYLSKKLDPVAAGWPPCLRMVAAIAVLTKDAGKLTMGQPLVILAPHAVEALVKQPPDRWLSNARMTHYQALLLDTDRVQFGPVVALNPATLLPLPEEGLQHDCLDILAEAHGTRSDLMDQPLPDADHTWYTDGSSFLQEGQRKAGAAVTTETEVIWARALPAGTSAQRAELIALTQALKMAEGKKLNVYTDSRYAFATAHIHGEIYRRRGWLTSEGKEIKNKDEILALLKALFLPKRLSIIHCPGHQKGNSAEARGNRMADQAAREVATRETPETSTLLAGKRTADGSEFEKRTADGSEFESPKKKAKVE

SEQ ID NO: 2333 - protein, 2100 aa, synthetic construct
MPAAKRVKLDGGDKKYSIGLDIGTNSVGWAVITDEYKVPSKKFKVLGNTDRHSIKKNLIGALLFDSGETAEATRLKRTARRRYTRRKNRICYLQEIFSNEMAKVDDSFFHRLEESFLVEEDKKHERHPIFGNIVDEVAYHEKYPTIYHLRKKLVDSTDKADLRLIYLALAHMIKFRGHFLIEGDLNPDNSDVDKLFIQLVQTYNQLFEENPINASGVDAKAILSARLSKSRRLENLIAQLPGEKKNGLFGNLIALSLGLTPNFKSNFDLAEDAKLQLSKDTYDDDLDNLLAQIGDQYADLFLAAKNLSDAILLSDILRVNTEITKAPLSASMIKRYDEHHQDLTLLKALVRQQLPEKYKEIFFDQSKNGYAGYIDGGASQEEFYKFIKPILEKMDGTEELLVKLNREDLLRKQRTFDNGSIPHQIHLGELHAILRRQEDFYPFLKDNREKIEKILTFRIPYYVGPLARGNSRFAWMTRKSEETITPWNFEEVVDKGASAQSFIERMTNFDKNLPNEKVLPKHSLLYEYFTVYNELTKVKYVTEGMRKPAFLSGEQKKAIVDLLFKTNRKVTVKQLKEDYFKKIECFDSVEISGVEDRFNASLGTYHDLLKIIKDKDFLDNEENEDILEDIVLTLTLFEDREMIEERLKTYAHLFDDKVMKQLKRRRYTGWGRLSRKLINGIRDKQSGKTILDFLKSDGFANRNFMQLIHDDSLTFKEDIQKAQVSGQGDSLHEHIANLAGSPAIKKGILQTVKVVDELVKVMGRHKPENIVIEMARENQTTQKGQKNSRERMKRIEEGIKELGSQILKEHPVENTQLQNEKLYLYYLQNGRDMYVDQELDINRLSDYDVDHIVPQSFLKDDSIDNKVLTRSDKARGKSDNVPSEEVVKKMKNYWRQLLNAKLITQRKFDNLTKAERGGLSELDKAGFIKRQLVETRQITKHVAQILDSRMNTKYDENDKLIREVKVITLKSKLVSDFRKDFQFYKVREINNYHHAHDAYLNAVVGTALIKKYPKLESEFVYGDYKVYDVRKMIAKSEQEIGKATAKYFFYSNIMNFFKTEITLANGEIRKRPLIETNGETGEIVWDKGRDFATVRKVLSMPQVNIVKKTEVQTGGFSKESILPKRNSDKLIARKKDWDPKKYGGFDSPTVAYSVLVVAKVEKGKSKKLKSVKELLGITIMERSSFEKNPIDFLEAKGYKEVKKDLIIKLPKYSLFELENGRKRMLASAGELQKGNELALPSKYVNFLYLASHYEKLKGSPEDNEQKQLFVEQHKHYLDEIIEQISEFSKRVILADANLDKVLSAYNKHRDKPIREQAENIIHLFTLTNLGAPAAFKYFDTTIDRKRYTSTKEVLDATLIHQSITGLYETRIDLSQLGGDGGGGGGSGGGGSGGGGSGGTLNIEDEYRLHETSKEPDVSLGSTWLSDFPQAWAETGGMGLAVRQAPLIIPLKATSTPVSIKQYPMSQEARLGIKPHIQRLLDQGILVPCQSPWNTPLLPVKKPGTNDYRPVQDLREVNKRVEDIHPTVPNPYNLLSGLPPSHQWYTVLDLKDAFFCLRLHPTSQPLFAFEWRDPEMGISGQLTWTRLPQGFKNSPTLFNEALHRDLAGFRIQHPDLILLQYVDDLLLAATSELDCQQGTRALLQTLGDLGYRASAKKAQICQKQVKYLGYLLKEGQRWLTEARKETVMGQPIPKTPRQLREFLGKAGFCRLFIPGFAEMAAPLYPLTKPGTLFNWGPDQQKAFQEIKQALLTAPALGLPDLTKPFELFVDEKQGYAKGVLTQKLGPWRRPVAYLSKKLDPVAAGWPPCLRMVAAIAVLTKDAGKLTMGQPLVILAPHAVEALVKQPPDRWLSNARMTHYQALLLDTDRVQFGPVVALNPATLLPLPEEGLQHDCLDILAEAHGTRSDLMDQPLPDADHTWYTDGSSFLQEGQRKAGAAVTTETEVIWARALPAGTSAQRAELIALTQALKMAEGKKLNVYTDSRYAFATAHIHGEIYRRRGWLTSEGKEIKNKDEILALLKALFLPKRLSIIHCPGHQKGNSAEARGNRMADQAAREVATRETPETSTLLAGKRTADGSEFEKRTADGSEFESPKKKAKVE

SEQ ID NO: 2334 - protein, 2096 aa, synthetic construct
MPAAKRVKLDGGDKKYSIGLDIGTNSVGWAVITDEYKVPSKKFKVLGNTDRHSIKKNLIGALLFDSGETAEATRLKRTARRRYTRRKNRICYLQEIFSNEMAKVDDSFFHRLEESFLVEEDKKHERHPIFGNIVDEVAYHEKYPTIYHLRKKLVDSTDKADLRLIYLALAHMIKFRGHFLIEGDLNPDNSDVDKLFIQLVQTYNQLFEENPINASGVDAKAILSARLSKSRRLENLIAQLPGEKKNGLFGNLIALSLGLTPNFKSNFDLAEDAKLQLSKDTYDDDLDNLLAQIGDQYADLFLAAKNLSDAILLSDILRVNTEITKAPLSASMIKRYDEHHQDLTLLKALVRQQLPEKYKEIFFDQSKNGYAGYIDGGASQEEFYKFIKPILEKMDGTEELLVKLNREDLLRKQRTFDNGSIPHQIHLGELHAILRRQEDFYPFLKDNREKIEKILTFRIPYYVGPLARGNSRFAWMTRKSEETITPWNFEEVVDKGASAQSFIERMTNFDKNLPNEKVLPKHSLLYEYFTVYNELTKVKYVTEGMRKPAFLSGEQKKAIVDLLFKTNRKVTVKQLKEDYFKKIECFDSVEISGVEDRFNASLGTYHDLLKIIKDKDFLDNEENEDILEDIVLTLTLFEDREMIEERLKTYAHLFDDKVMKQLKRRRYTGWGRLSRKLINGIRDKQSGKTILDFLKSDGFANRNFMQLIHDDSLTFKEDIQKAQVSGQGDSLHEHIANLAGSPAIKKGILQTVKVVDELVKVMGRHKPENIVIEMARENQTTQKGQKNSRERMKRIEEGIKELGSQILKEHPVENTQLQNEKLYLYYLQNGRDMYVDQELDINRLSDYDVDHIVPQSFLKDDSIDNKVLTRSDKARGKSDNVPSEEVVKKMKNYWRQLLNAKLITQRKFDNLTKAERGGLSELDKAGFIKRQLVETRQITKHVAQILDSRMNTKYDENDKLIREVKVITLKSKLVSDFRKDFQFYKVREINNYHHAHDAYLNAVVGTALIKKYPKLESEFVYGDYKVYDVRKMIAKSEQEIGKATAKYFFYSNIMNFFKTEITLANGEIRKRPLIETNGETGEIVWDKGRDFATVRKVLSMPQVNIVKKTEVQTGGFSKESILPKRNSDKLIARKKDWDPKKYGGFDSPTVAYSVLVVAKVEKGKSKKLKSVKELLGITIMERSSFEKNPIDFLEAKGYKEVKKDLIIKLPKYSLFELENGRKRMLASAGELQKGNELALPSKYVNFLYLASHYEKLKGSPEDNEQKQLFVEQHKHYLDEIIEQISEFSKRVILADANLDKVLSAYNKHRDKPIREQAENIIHLFTLTNLGAPAAFKYFDTTIDRKRYTSTKEVLDATLIHQSITGLYETRIDLSQLGGDGGEAAAKGGSGGGGGTLNIEDEYRLHETSKEPDVSLGSTWLSDFPQAWAETGGMGLAVRQAPLIIPLKATSTPVSIKQYPMSQEARLGIKPHIQRLLDQGILVPCQSPWNTPLLPVKKPGTNDYRPVQDLREVNKRVEDIHPTVPNPYNLLSGLPPSHQWYTVLDLKDAFFCLRLHPTSQPLFAFEWRDPEMGISGQLTWTRLPQGFKNSPTLFNEALHRDLAGFRIQHPDLILLQYVDDLLLAATSELDCQQGTRALLQTLGDLGYRASAKKAQICQKQVKYLGYLLKEGQRWLTEARKETVMGQPIPKTPRQLREFLGKAGFCRLFIPGFAEMAAPLYPLTKPGTLFNWGPDQQKAFQEIKQALLTAPALGLPDLTKPFELFVDEKQGYAKGVLTQKLGPWRRPVAYLSKKLDPVAAGWPPCLRMVAAIAVLTKDAGKLTMGQPLVILAPHAVEALVKQPPDRWLSNARMTHYQALLLDTDRVQFGPVVALNPATLLPLPEEGLQHDCLDILAEAHGTRSDLMDQPLPDADHTWYTDGSSFLQEGQRKAGAAVTTETEVIWARALPAGTSAQRAELIALTQALKMAEGKKLNVYTDSRYAFATAHIHGEIYRRRGWLTSEGKEIKNKDEILALLKALFLPKRLSIIHCPGHQKGNSAEARGNRMADQAAREVATRETPETSTLLAGKRTADGSEFEKRTADGSEFESPKKKAKVE

SEQ ID NO: 2335 - protein, 2091 aa, synthetic construct
MPAAKRVKLDGGDKKYSIGLDIGTNSVGWAVITDEYKVPSKKFKVLGNTDRHSIKKNLIGALLFDSGETAEATRLKRTARRRYTRRKNRICYLQEIFSNEMAKVDDSFFHRLEESFLVEEDKKHERHPIFGNIVDEVAYHEKYPTIYHLRKKLVDSTDKADLRLIYLALAHMIKFRGHFLIEGDLNPDNSDVDKLFIQLVQTYNQLFEENPINASGVDAKAILSARLSKSRRLENLIAQLPGEKKNGLFGNLIALSLGLTPNFKSNFDLAEDAKLQLSKDTYDDDLDNLLAQIGDQYADLFLAAKNLSDAILLSDILRVNTEITKAPLSASMIKRYDEHHQDLTLLKALVRQQLPEKYKEIFFDQSKNGYAGYIDGGASQEEFYKFIKPILEKMDGTEELLVKLNREDLLRKQRTFDNGSIPHQIHLGELHAILRRQEDFYPFLKDNREKIEKILTFRIPYYVGPLARGNSRFAWMTRKSEETITPWNFEEVVDKGASAQSFIERMTNFDKNLPNEKVLPKHSLLYEYFTVYNELTKVKYVTEGMRKPAFLSGEQKKAIVDLLFKTNRKVTVKQLKEDYFKKIECFDSVEISGVEDRFNASLGTYHDLLKIIKDKDFLDNEENEDILEDIVLTLTLFEDREMIEERLKTYAHLFDDKVMKQLKRRRYTGWGRLSRKLINGIRDKQSGKTILDFLKSDGFANRNFMQLIHDDSLTFKEDIQKAQVSGQGDSLHEHIANLAGSPAIKKGILQTVKVVDELVKVMGRHKPENIVIEMARENQTTQKGQKNSRERMKRIEEGIKELGSQILKEHPVENTQLQNEKLYLYYLQNGRDMYVDQELDINRLSDYDVDHIVPQSFLKDDSIDNKVLTRSDKARGKSDNVPSEEVVKKMKNYWRQLLNAKLITQRKFDNLTKAERGGLSELDKAGFIKRQLVETRQITKHVAQILDSRMNTKYDENDKLIREVKVITLKSKLVSDFRKDFQFYKVREINNYHHAHDAYLNAVVGTALIKKYPKLESEFVYGDYKVYDVRKMIAKSEQEIGKATAKYFFYSNIMNFFKTEITLANGEIRKRPLIETNGETGEIVWDKGRDFATVRKVLSMPQVNIVKKTEVQTGGFSKESILPKRNSDKLIARKKDWDPKKYGGFDSPTVAYSVLVVAKVEKGKSKKLKSVKELLGITIMERSSFEKNPIDFLEAKGYKEVKKDLIIKLPKYSLFELENGRKRMLASAGELQKGNELALPSKYVNFLYLASHYEKLKGSPEDNEQKQLFVEQHKHYLDEIIEQISEFSKRVILADANLDKVLSAYNKHRDKPIREQAENIIHLFTLTNLGAPAAFKYFDTTIDRKRYTSTKEVLDATLIHQSITGLYETRIDLSQLGGDGGGGSGGGGGTLNIEDEYRLHETSKEPDVSLGSTWLSDFPQAWAETGGMGLAVRQAPLIIPLKATSTPVSIKQYPMSQEARLGIKPHIQRLLDQGILVPCQSPWNTPLLPVKKPGTNDYRPVQDLREVNKRVEDIHPTVPNPYNLLSGLPPSHQWYTVLDLKDAFFCLRLHPTSQPLFAFEWRDPEMGISGQLTWTRLPQGFKNSPTLFNEALHRDLAGFRIQHPDLILLQYVDDLLLAATSELDCQQGTRALLQTLGDLGYRASAKKAQICQKQVKYLGYLLKEGQRWLTEARKETVMGQPIPKTPRQLREFLGKAGFCRLFIPGFAEMAAPLYPLTKPGTLFNWGPDQQKAFQEIKQALLTAPALGLPDLTKPFELFVDEKQGYAKGVLTQKLGPWRRPVAYLSKKLDPVAAGWPPCLRMVAAIAVLTKDAGKLTMGQPLVILAPHAVEALVKQPPDRWLSNARMTHYQALLLDTDRVQFGPVVALNPATLLPLPEEGLQHDCLDILAEAHGTRSDLMDQPLPDADHTWYTDGSSFLQEGQRKAGAAVTTETEVIWARALPAGTSAQRAELIALTQALKMAEGKKLNVYTDSRYAFATAHIHGEIYRRRGWLTSEGKEIKNKDEILALLKALFLPKRLSIIHCPGHQKGNSAEARGNRMADQAAREVATRETPETSTLLAGKRTADGSEFEKRTADGSEFESPKKKAKVE

SEQ ID NO: 2336 - protein, 2091 aa, synthetic construct
MPAAKRVKLDGGDKKYSIGLDIGTNSVGWAVITDEYKVPSKKFKVLGNTDRHSIKKNLIGALLFDSGETAEATRLKRTARRRYTRRKNRICYLQEIFSNEMAKVDDSFFHRLEESFLVEEDKKHERHPIFGNIVDEVAYHEKYPTIYHLRKKLVDSTDKADLRLIYLALAHMIKFRGHFLIEGDLNPDNSDVDKLFIQLVQTYNQLFEENPINASGVDAKAILSARLSKSRRLENLIAQLPGEKKNGLFGNLIALSLGLTPNFKSNFDLAEDAKLQLSKDTYDDDLDNLLAQIGDQYADLFLAAKNLSDAILLSDILRVNTEITKAPLSASMIKRYDEHHQDLTLLKALVRQQLPEKYKEIFFDQSKNGYAGYIDGGASQEEFYKFIKPILEKMDGTEELLVKLNREDLLRKQRTFDNGSIPHQIHLGELHAILRRQEDFYPFLKDNREKIEKILTFRIPYYVGPLARGNSRFAWMTRKSEETITPWNFEEVVDKGASAQSFIERMTNFDKNLPNEKVLPKHSLLYEYFTVYNELTKVKYVTEGMRKPAFLSGEQKKAIVDLLFKTNRKVTVKQLKEDYFKKIECFDSVEISGVEDRFNASLGTYHDLLKIIKDKDFLDNEENEDILEDIVLTLTLFEDREMIEERLKTYAHLFDDKVMKQLKRRRYTGWGRLSRKLINGIRDKQSGKTILDFLKSDGFANRNFMQLIHDDSLTFKEDIQKAQVSGQGDSLHEHIANLAGSPAIKKGILQTVKVVDELVKVMGRHKPENIVIEMARENQTTQKGQKNSRERMKRIEEGIKELGSQILKEHPVENTQLQNEKLYLYYLQNGRDMYVDQELDINRLSDYDVDHIVPQSFLKDDSIDNKVLTRSDKARGKSDNVPSEEVVKKMKNYWRQLLNAKLITQRKFDNLTKAERGGLSELDKAGFIKRQLVETRQITKHVAQILDSRMNTKYDENDKLIREVKVITLKSKLVSDFRKDFQFYKVREINNYHHAHDAYLNAVVGTALIKKYPKLESEFVYGDYKVYDVRKMIAKSEQEIGKATAKYFFYSNIMNFFKTEITLANGEIRKRPLIETNGETGEIVWDKGRDFATVRKVLSMPQVNIVKKTEVQTGGFSKESILPKRNSDKLIARKKDWDPKKYGGFDSPTVAYSVLVVAKVEKGKSKKLKSVKELLGITIMERSSFEKNPIDFLEAKGYKEVKKDLIIKLPKYSLFELENGRKRMLASAGELQKGNELALPSKYVNFLYLASHYEKLKGSPEDNEQKQLFVEQHKHYLDEIIEQISEFSKRVILADANLDKVLSAYNKHRDKPIREQAENIIHLFTLTNLGAPAAFKYFDTTIDRKRYTSTKEVLDATLIHQSITGLYETRIDLSQLGGDGGPAPGSSGGTLNIEDEYRLHETSKEPDVSLGSTWLSDFPQAWAETGGMGLAVRQAPLIIPLKATSTPVSIKQYPMSQEARLGIKPHIQRLLDQGILVPCQSPWNTPLLPVKKPGTNDYRPVQDLREVNKRVEDIHPTVPNPYNLLSGLPPSHQWYTVLDLKDAFFCLRLHPTSQPLFAFEWRDPEMGISGQLTWTRLPQGFKNSPTLFNEALHRDLAGFRIQHPDLILLQYVDDLLLAATSELDCQQGTRALLQTLGDLGYRASAKKAQICQKQVKYLGYLLKEGQRWLTEARKETVMGQPIPKTPRQLREFLGKAGFCRLFIPGFAEMAAPLYPLTKPGTLFNWGPDQQKAFQEIKQALLTAPALGLPDLTKPFELFVDEKQGYAKGVLTQKLGPWRRPVAYLSKKLDPVAAGWPPCLRMVAAIAVLTKDAGKLTMGQPLVILAPHAVEALVKQPPDRWLSNARMTHYQALLLDTDRVQFGPVVALNPATLLPLPEEGLQHDCLDILAEAHGTRSDLMDQPLPDADHTWYTDGSSFLQEGQRKAGAAVTTETEVIWARALPAGTSAQRAELIALTQALKMAEGKKLNVYTDSRYAFATAHIHGEIYRRRGWLTSEGKEIKNKDEILALLKALFLPKRLSIIHCPGHQKGNSAEARGNRMADQAAREVATRETPETSTLLAGKRTADGSEFEKRTADGSEFESPKKKAKVE

SEQ ID NO: 2337 - protein, 2093 aa, synthetic construct
MPAAKRVKLDGGDKKYSIGLDIGTNSVGWAVITDEYKVPSKKFKVLGNTDRHSIKKNLIGALLFDSGETAEATRLKRTARRRYTRRKNRICYLQEIFSNEMAKVDDSFFHRLEESFLVEEDKKHERHPIFGNIVDEVAYHEKYPTIYHLRKKLVDSTDKADLRLIYLALAHMIKFRGHFLIEGDLNPDNSDVDKLFIQLVQTYNQLFEENPINASGVDAKAILSARLSKSRRLENLIAQLPGEKKNGLFGNLIALSLGLTPNFKSNFDLAEDAKLQLSKDTYDDDLDNLLAQIGDQYADLFLAAKNLSDAILLSDILRVNTEITKAPLSASMIKRYDEHHQDLTLLKALVRQQLPEKYKEIFFDQSKNGYAGYIDGGASQEEFYKFIKPILEKMDGTEELLVKLNREDLLRKQRTFDNGSIPHQIHLGELHAILRRQEDFYPFLKDNREKIEKILTFRIPYYVGPLARGNSRFAWMTRKSEETITPWNFEEVVDKGASAQSFIERMTNFDKNLPNEKVLPKHSLLYEYFTVYNELTKVKYVTEGMRKPAFLSGEQKKAIVDLLFKTNRKVTVKQLKEDYFKKIECFDSVEISGVEDRFNASLGTYHDLLKIIKDKDFLDNEENEDILEDIVLTLTLFEDREMIEERLKTYAHLFDDKVMKQLKRRRYTGWGRLSRKLINGIRDKQSGKTILDFLKSDGFANRNFMQLIHDDSLTFKEDIQKAQVSGQGDSLHEHIANLAGSPAIKKGILQTVKVVDELVKVMGRHKPENIVIEMARENQTTQKGQKNSRERMKRIEEGIKELGSQILKEHPVENTQLQNEKLYLYYLQNGRDMYVDQELDINRLSDYDVDHIVPQSFLKDDSIDNKVLTRSDKARGKSDNVPSEEVVKKMKNYWRQLLNAKLITQRKFDNLTKAERGGLSELDKAGFIKRQLVETRQITKHVAQILDSRMNTKYDENDKLIREVKVITLKSKLVSDFRKDFQFYKVREINNYHHAHDAYLNAVVGTALIKKYPKLESEFVYGDYKVYDVRKMIAKSEQEIGKATAKYFFYSNIMNFFKTEITLANGEIRKRPLIETNGETGEIVWDKGRDFATVRKVLSMPQVNIVKKTEVQTGGFSKESILPKRNSDKLIARKKDWDPKKYGGFDSPTVAYSVLVVAKVEKGKSKKLKSVKELLGITIMERSSFEKNPIDFLEAKGYKEVKKDLIIKLPKYSLFELENGRKRMLASAGELQKGNELALPSKYVNFLYLASHYEKLKGSPEDNEQKQLFVEQHKHYLDEIIEQISEFSKRVILADANLDKVLSAYNKHRDKPIREQAENIIHLFTLTNLGAPAAFKYFDTTIDRKRYTSTKEVLDATLIHQSITGLYETRIDLSQLGGDGGEAAAKPAPGGTLNIEDEYRLHETSKEPDVSLGSTWLSDFPQAWAETGGMGLAVRQAPLIIPLKATSTPVSIKQYPMSQEARLGIKPHIQRLLDQGILVPCQSPWNTPLLPVKKPGTNDYRPVQDLREVNKRVEDIHPTVPNPYNLLSGLPPSHQWYTVLDLKDAFFCLRLHPTSQPLFAFEWRDPEMGISGQLTWTRLPQGFKNSPTLFNEALHRDLAGFRIQHPDLILLQYVDDLLLAATSELDCQQGTRALLQTLGDLGYRASAKKAQICQKQVKYLGYLLKEGQRWLTEARKETVMGQPIPKTPRQLREFLGKAGFCRLFIPGFAEMAAPLYPLTKPGTLFNWGPDQQKAFQEIKQALLTAPALGLPDLTKPFELFVDEKQGYAKGVLTQKLGPWRRPVAYLSKKLDPVAAGWPPCLRMVAAIAVLTKDAGKLTMGQPLVILAPHAVEALVKQPPDRWLSNARMTHYQALLLDTDRVQFGPVVALNPATLLPLPEEGLQHDCLDILAEAHGTRSDLMDQPLPDADHTWYTDGSSFLQEGQRKAGAAVTTETEVIWARALPAGTSAQRAELIALTQALKMAEGKKLNVYTDSRYAFATAHIHGEIYRRRGWLTSEGKEIKNKDEILALLKALFLPKRLSIIHCPGHQKGNSAEARGNRMADQAAREVATRETPETSTLLAGKRTADGSEFEKRTADGSEFESPKKKAKVE

SEQ ID NO: 2338 - protein, 2096 aa, synthetic construct
MPAAKRVKLDGGDKKYSIGLDIGTNSVGWAVITDEYKVPSKKFKVLGNTDRHSIKKNLIGALLFDSGETAEATRLKRTARRRYTRRKNRICYLQEIFSNEMAKVDDSFFHRLEESFLVEEDKKHERHPIFGNIVDEVAYHEKYPTIYHLRKKLVDSTDKADLRLIYLALAHMIKFRGHFLIEGDLNPDNSDVDKLFIQLVQTYNQLFEENPINASGVDAKAILSARLSKSRRLENLIAQLPGEKKNGLFGNLIALSLGLTPNFKSNFDLAEDAKLQLSKDTYDDDLDNLLAQIGDQYADLFLAAKNLSDAILLSDILRVNTEITKAPLSASMIKRYDEHHQDLTLLKALVRQQLPEKYKEIFFDQSKNGYAGYIDGGASQEEFYKFIKPILEKMDGTEELLVKLNREDLLRKQRTFDNGSIPHQIHLGELHAILRRQEDFYPFLKDNREKIEKILTFRIPYYVGPLARGNSRFAWMTRKSEETITPWNFEEVVDKGASAQSFIERMTNFDKNLPNEKVLPKHSLLYEYFTVYNELTKVKYVTEGMRKPAFLSGEQKKAIVDLLFKTNRKVTVKQLKEDYFKKIECFDSVEISGVEDRFNASLGTYHDLLKIIKDKDFLDNEENEDILEDIVLTLTLFEDREMIEERLKTYAHLFDDKVMKQLKRRRYTGWGRLSRKLINGIRDKQSGKTILDFLKSDGFANRNFMQLIHDDSLTFKEDIQKAQVSGQGDSLHEHIANLAGSPAIKKGILQTVKVVDELVKVMGRHKPENIVIEMARENQTTQKGQKNSRERMKRIEEGIKELGSQILKEHPVENTQLQNEKLYLYYLQNGRDMYVDQELDINRLSDYDVDHIVPQSFLKDDSIDNKVLTRSDKARGKSDNVPSEEVVKKMKNYWRQLLNAKLITQRKFDNLTKAERGGLSELDKAGFIKRQLVETRQITKHVAQILDSRMNTKYDENDKLIREVKVITLKSKLVSDFRKDFQFYKVREINNYHHAHDAYLNAVVGTALIKKYPKLESEFVYGDYKVYDVRKMIAKSEQEIGKATAKYFFYSNIMNFFKTEITLANGEIRKRPLIETNGETGEIVWDKGRDFATVRKVLSMPQVNIVKKTEVQTGGFSKESILPKRNSDKLIARKKDWDPKKYGGFDSPTVAYSVLVVAKVEKGKSKKLKSVKELLGITIMERSSFEKNPIDFLEAKGYKEVKKDLIIKLPKYSLFELENGRKRMLASAGELQKGNELALPSKYVNFLYLASHYEKLKGSPEDNEQKQLFVEQHKHYLDEIIEQISEFSKRVILADANLDKVLSAYNKHRDKPIREQAENIIHLFTLTNLGAPAAFKYFDTTIDRKRYTSTKEVLDATLIHQSITGLYETRIDLSQLGGDGGGGSPAPEAAAKGGTLNIEDEYRLHETSKEPDVSLGSTWLSDFPQAWAETGGMGLAVRQAPLIIPLKATSTPVSIKQYPMSQEARLGIKPHIQRLLDQGILVPCQSPWNTPLLPVKKPGTNDYRPVQDLREVNKRVEDIHPTVPNPYNLLSGLPPSHQWYTVLDLKDAFFCLRLHPTSQPLFAFEWRDPEMGISGQLTWTRLPQGFKNSPTLFNEALHRDLAGFRIQHPDLILLQYVDDLLLAATSELDCQQGTRALLQTLGDLGYRASAKKAQICQKQVKYLGYLLKEGQRWLTEARKETVMGQPIPKTPRQLREFLGKAGFCRLFIPGFAEMAAPLYPLTKPGTLFNWGPDQQKAFQEIKQALLTAPALGLPDLTKPFELFVDEKQGYAKGVLTQKLGPWRRPVAYLSKKLDPVAAGWPPCLRMVAAIAVLTKDAGKLTMGQPLVILAPHAVEALVKQPPDRWLSNARMTHYQALLLDTDRVQFGPVVALNPATLLPLPEEGLQHDCLDILAEAHGTRSDLMDQPLPDADHTWYTDGSSFLQEGQRKAGAAVTTETEVIWARALPAGTSAQRAELIALTQALKMAEGKKLNVYTDSRYAFATAHIHGEIYRRRGWLTSEGKEIKNKDEILALLKALFLPKRLSIIHCPGHQKGNSAEARGNRMADQAAREVATRETPETSTLLAGKRTADGSEFEKRTADGSEFESPKKKAKVE

SEQ ID NO: 2339 - protein, 2094 aa, synthetic construct
MPAAKRVKLDGGDKKYSIGLDIGTNSVGWAVITDEYKVPSKKFKVLGNTDRHSIKKNLIGALLFDSGETAEATRLKRTARRRYTRRKNRICYLQEIFSNEMAKVDDSFFHRLEESFLVEEDKKHERHPIFGNIVDEVAYHEKYPTIYHLRKKLVDSTDKADLRLIYLALAHMIKFRGHFLIEGDLNPDNSDVDKLFIQLVQTYNQLFEENPINASGVDAKAILSARLSKSRRLENLIAQLPGEKKNGLFGNLIALSLGLTPNFKSNFDLAEDAKLQLSKDTYDDDLDNLLAQIGDQYADLFLAAKNLSDAILLSDILRVNTEITKAPLSASMIKRYDEHHQDLTLLKALVRQQLPEKYKEIFFDQSKNGYAGYIDGGASQEEFYKFIKPILEKMDGTEELLVKLNREDLLRKQRTFDNGSIPHQIHLGELHAILRRQEDFYPFLKDNREKIEKILTFRIPYYVGPLARGNSRFAWMTRKSEETITPWNFEEVVDKGASAQSFIERMTNFDKNLPNEKVLPKHSLLYEYFTVYNELTKVKYVTEGMRKPAFLSGEQKKAIVDLLFKTNRKVTVKQLKEDYFKKIECFDSVEISGVEDRFNASLGTYHDLLKIIKDKDFLDNEENEDILEDIVLTLTLFEDREMIEERLKTYAHLFDDKVMKQLKRRRYTGWGRLSRKLINGIRDKQSGKTILDFLKSDGFANRNFMQLIHDDSLTFKEDIQKAQVSGQGDSLHEHIANLAGSPAIKKGILQTVKVVDELVKVMGRHKPENIVIEMARENQTTQKGQKNSRERMKRIEEGIKELGSQILKEHPVENTQLQNEKLYLYYLQNGRDMYVDQELDINRLSDYDVDHIVPQSFLKDDSIDNKVLTRSDKARGKSDNVPSEEVVKKMKNYWRQLLNAKLITQRKFDNLTKAERGGLSELDKAGFIKRQLVETRQITKHVAQILDSRMNTKYDENDKLIREVKVITLKSKLVSDFRKDFQFYKVREINNYHHAHDAYLNAVVGTALIKKYPKLESEFVYGDYKVYDVRKMIAKSEQEIGKATAKYFFYSNIMNFFKTEITLANGEIRKRPLIETNGETGEIVWDKGRDFATVRKVLSMPQVNIVKKTEVQTGGFSKESILPKRNSDKLIARKKDWDPKKYGGFDSPTVAYSVLVVAKVEKGKSKKLKSVKELLGITIMERSSFEKNPIDFLEAKGYKEVKKDLIIKLPKYSLFELENGRKRMLASAGELQKGNELALPSKYVNFLYLASHYEKLKGSPEDNEQKQLFVEQHKHYLDEIIEQISEFSKRVILADANLDKVLSAYNKHRDKPIREQAENIIHLFTLTNLGAPAAFKYFDTTIDRKRYTSTKEVLDATLIHQSITGLYETRIDLSQLGGDGGGGSGSSPAPGGTLNIEDEYRLHETSKEPDVSLGSTWLSDFPQAWAETGGMGLAVRQAPLIIPLKATSTPVSIKQYPMSQEARLGIKPHIQRLLDQGILVPCQSPWNTPLLPVKKPGTNDYRPVQDLREVNKRVEDIHPTVPNPYNLLSGLPPSHQWYTVLDLKDAFFCLRLHPTSQPLFAFEWRDPEMGISGQLTWTRLPQGFKNSPTLFNEALHRDLAGFRIQHPDLILLQYVDDLLLAATSELDCQQGTRALLQTLGDLGYRASAKKAQICQKQVKYLGYLLKEGQRWLTEARKETVMGQPIPKTPRQLREFLGKAGFCRLFIPGFAEMAAPLYPLTKPGTLFNWGPDQQKAFQEIKQALLTAPALGLPDLTKPFELFVDEKQGYAKGVLTQKLGPWRRPVAYLSKKLDPVAAGWPPCLRMVAAIAVLTKDAGKLTMGQPLVILAPHAVEALVKQPPDRWLSNARMTHYQALLLDTDRVQFGPVVALNPATLLPLPEEGLQHDCLDILAEAHGTRSDLMDQPLPDADHTWYTDGSSFLQEGQRKAGAAVTTETEVIWARALPAGTSAQRAELIALTQALKMAEGKKLNVYTDSRYAFATAHIHGEIYRRRGWLTSEGKEIKNKDEILALLKALFLPKRLSIIHCPGHQKGNSAEARGNRMADQAAREVATRETPETSTLLAGKRTADGSEFEKRTADGSEFESPKKKAKVE

SEQ ID NO: 2340 - protein, 2091 aa, synthetic construct
MPAAKRVKLDGGDKKYSIGLDIGTNSVGWAVITDEYKVPSKKFKVLGNTDRHSIKKNLIGALLFDSGETAEATRLKRTARRRYTRRKNRICYLQEIFSNEMAKVDDSFFHRLEESFLVEEDKKHERHPIFGNIVDEVAYHEKYPTIYHLRKKLVDSTDKADLRLIYLALAHMIKFRGHFLIEGDLNPDNSDVDKLFIQLVQTYNQLFEENPINASGVDAKAILSARLSKSRRLENLIAQLPGEKKNGLFGNLIALSLGLTPNFKSNFDLAEDAKLQLSKDTYDDDLDNLLAQIGDQYADLFLAAKNLSDAILLSDILRVNTEITKAPLSASMIKRYDEHHQDLTLLKALVRQQLPEKYKEIFFDQSKNGYAGYIDGGASQEEFYKFIKPILEKMDGTEELLVKLNREDLLRKQRTFDNGSIPHQIHLGELHAILRRQEDFYPFLKDNREKIEKILTFRIPYYVGPLARGNSRFAWMTRKSEETITPWNFEEVVDKGASAQSFIERMTNFDKNLPNEKVLPKHSLLYEYFTVYNELTKVKYVTEGMRKPAFLSGEQKKAIVDLLFKTNRKVTVKQLKEDYFKKIECFDSVEISGVEDRFNASLGTYHDLLKIIKDKDFLDNEENEDILEDIVLTLTLFEDREMIEERLKTYAHLFDDKVMKQLKRRRYTGWGRLSRKLINGIRDKQSGKTILDFLKSDGFANRNFMQLIHDDSLTFKEDIQKAQVSGQGDSLHEHIANLAGSPAIKKGILQTVKVVDELVKVMGRHKPENIVIEMARENQTTQKGQKNSRERMKRIEEGIKELGSQILKEHPVENTQLQNEKLYLYYLQNGRDMYVDQELDINRLSDYDVDHIVPQSFLKDDSIDNKVLTRSDKARGKSDNVPSEEVVKKMKNYWRQLLNAKLITQRKFDNLTKAERGGLSELDKAGFIKRQLVETRQITKHVAQILDSRMNTKYDENDKLIREVKVITLKSKLVSDFRKDFQFYKVREINNYHHAHDAYLNAVVGTALIKKYPKLESEFVYGDYKVYDVRKMIAKSEQEIGKATAKYFFYSNIMNFFKTEITLANGEIRKRPLIETNGETGEIVWDKGRDFATVRKVLSMPQVNIVKKTEVQTGGFSKESILPKRNSDKLIARKKDWDPKKYGGFDSPTVAYSVLVVAKVEKGKSKKLKSVKELLGITIMERSSFEKNPIDFLEAKGYKEVKKDLIIKLPKYSLFELENGRKRMLASAGELQKGNELALPSKYVNFLYLASHYEKLKGSPEDNEQKQLFVEQHKHYLDEIIEQISEFSKRVILADANLDKVLSAYNKHRDKPIREQAENIIHLFTLTNLGAPAAFKYFDTTIDRKRYTSTKEVLDATLIHQSITGLYETRIDLSQLGGDGGPAPGGSGGTLNIEDEYRLHETSKEPDVSLGSTWLSDFPQAWAETGGMGLAVRQAPLIIPLKATSTPVSIKQYPMSQEARLGIKPHIQRLLDQGILVPCQSPWNTPLLPVKKPGTNDYRPVQDLREVNKRVEDIHPTVPNPYNLLSGLPPSHQWYTVLDLKDAFFCLRLHPTSQPLFAFEWRDPEMGISGQLTWTRLPQGFKNSPTLFNEALHRDLAGFRIQHPDLILLQYVDDLLLAATSELDCQQGTRALLQTLGDLGYRASAKKAQICQKQVKYLGYLLKEGQRWLTEARKETVMGQPIPKTPRQLREFLGKAGFCRLFIPGFAEMAAPLYPLTKPGTLFNWGPDQQKAFQEIKQALLTAPALGLPDLTKPFELFVDEKQGYAKGVLTQKLGPWRRPVAYLSKKLDPVAAGWPPCLRMVAAIAVLTKDAGKLTMGQPLVILAPHAVEALVKQPPDRWLSNARMTHYQALLLDTDRVQFGPVVALNPATLLPLPEEGLQHDCLDILAEAHGTRSDLMDQPLPDADHTWYTDGSSFLQEGQRKAGAAVTTETEVIWARALPAGTSAQRAELIALTQALKMAEGKKLNVYTDSRYAFATAHIHGEIYRRRGWLTSEGKEIKNKDEILALLKALFLPKRLSIIHCPGHQKGNSAEARGNRMADQAAREVATRETPETSTLLAGKRTADGSEFEKRTADGSEFESPKKKAKVE

SEQ ID NO: 2341 - protein, 2093 aa, synthetic construct
MPAAKRVKLDGGDKKYSIGLDIGTNSVGWAVITDEYKVPSKKFKVLGNTDRHSIKKNLIGALLFDSGETAEATRLKRTARRRYTRRKNRICYLQEIFSNEMAKVDDSFFHRLEESFLVEEDKKHERHPIFGNIVDEVAYHEKYPTIYHLRKKLVDSTDKADLRLIYLALAHMIKFRGHFLIEGDLNPDNSDVDKLFIQLVQTYNQLFEENPINASGVDAKAILSARLSKSRRLENLIAQLPGEKKNGLFGNLIALSLGLTPNFKSNFDLAEDAKLQLSKDTYDDDLDNLLAQIGDQYADLFLAAKNLSDAILLSDILRVNTEITKAPLSASMIKRYDEHHQDLTLLKALVRQQLPEKYKEIFFDQSKNGYAGYIDGGASQEEFYKFIKPILEKMDGTEELLVKLNREDLLRKQRTFDNGSIPHQIHLGELHAILRRQEDFYPFLKDNREKIEKILTFRIPYYVGPLARGNSRFAWMTRKSEETITPWNFEEVVDKGASAQSFIERMTNFDKNLPNEKVLPKHSLLYEYFTVYNELTKVKYVTEGMRKPAFLSGEQKKAIVDLLFKTNRKVTVKQLKEDYFKKIECFDSVEISGVEDRFNASLGTYHDLLKIIKDKDFLDNEENEDILEDIVLTLTLFEDREMIEERLKTYAHLFDDKVMKQLKRRRYTGWGRLSRKLINGIRDKQSGKTILDFLKSDGFANRNFMQLIHDDSLTFKEDIQKAQVSGQGDSLHEHIANLAGSPAIKKGILQTVKVVDELVKVMGRHKPENIVIEMARENQTTQKGQKNSRERMKRIEEGIKELGSQILKEHPVENTQLQNEKLYLYYLQNGRDMYVDQELDINRLSDYDVDHIVPQSFLKDDSIDNKVLTRSDKARGKSDNVPSEEVVKKMKNYWRQLLNAKLITQRKFDNLTKAERGGLSELDKAGFIKRQLVETRQITKHVAQILDSRMNTKYDENDKLIREVKVITLKSKLVSDFRKDFQFYKVREINNYHHAHDAYLNAVVGTALIKKYPKLESEFVYGDYKVYDVRKMIAKSEQEIGKATAKYFFYSNIMNFFKTEITLANGEIRKRPLIETNGETGEIVWDKGRDFATVRKVLSMPQVNIVKKTEVQTGGFSKESILPKRNSDKLIARKKDWDPKKYGGFDSPTVAYSVLVVAKVEKGKSKKLKSVKELLGITIMERSSFEKNPIDFLEAKGYKEVKKDLIIKLPKYSLFELENGRKRMLASAGELQKGNELALPSKYVNFLYLASHYEKLKGSPEDNEQKQLFVEQHKHYLDEIIEQISEFSKRVILADANLDKVLSAYNKHRDKPIREQAENIIHLFTLTNLGAPAAFKYFDTTIDRKRYTSTKEVLDATLIHQSITGLYETRIDLSQLGGDGGEAAAKGGSGGTLNIEDEYRLHETSKEPDVSLGSTWLSDFPQAWAETGGMGLAVRQAPLIIPLKATSTPVSIKQYPMSQEARLGIKPHIQRLLDQGILVPCQSPWNTPLLPVKKPGTNDYRPVQDLREVNKRVEDIHPTVPNPYNLLSGLPPSHQWYTVLDLKDAFFCLRLHPTSQPLFAFEWRDPEMGISGQLTWTRLPQGFKNSPTLFNEALHRDLAGFRIQHPDLILLQYVDDLLLAATSELDCQQGTRALLQTLGDLGYRASAKKAQICQKQVKYLGYLLKEGQRWLTEARKETVMGQPIPKTPRQLREFLGKAGFCRLFIPGFAEMAAPLYPLTKPGTLFNWGPDQQKAFQEIKQALLTAPALGLPDLTKPFELFVDEKQGYAKGVLTQKLGPWRRPVAYLSKKLDPVAAGWPPCLRMVAAIAVLTKDAGKLTMGQPLVILAPHAVEALVKQPPDRWLSNARMTHYQALLLDTDRVQFGPVVALNPATLLPLPEEGLQHDCLDILAEAHGTRSDLMDQPLPDADHTWYTDGSSFLQEGQRKAGAAVTTETEVIWARALPAGTSAQRAELIALTQALKMAEGKKLNVYTDSRYAFATAHIHGEIYRRRGWLTSEGKEIKNKDEILALLKALFLPKRLSIIHCPGHQKGNSAEARGNRMADQAAREVATRETPETSTLLAGKRTADGSEFEKRTADGSEFESPKKKAKVE

SEQ ID NO: 2342 - protein, 2093 aa, synthetic construct
MPAAKRVKLDGGDKKYSIGLDIGTNSVGWAVITDEYKVPSKKFKVLGNTDRHSIKKNLIGALLFDSGETAEATRLKRTARRRYTRRKNRICYLQEIFSNEMAKVDDSFFHRLEESFLVEEDKKHERHPIFGNIVDEVAYHEKYPTIYHLRKKLVDSTDKADLRLIYLALAHMIKFRGHFLIEGDLNPDNSDVDKLFIQLVQTYNQLFEENPINASGVDAKAILSARLSKSRRLENLIAQLPGEKKNGLFGNLIALSLGLTPNFKSNFDLAEDAKLQLSKDTYDDDLDNLLAQIGDQYADLFLAAKNLSDAILLSDILRVNTEITKAPLSASMIKRYDEHHQDLTLLKALVRQQLPEKYKEIFFDQSKNGYAGYIDGGASQEEFYKFIKPILEKMDGTEELLVKLNREDLLRKQRTFDNGSIPHQIHLGELHAILRRQEDFYPFLKDNREKIEKILTFRIPYYVGPLARGNSRFAWMTRKSEETITPWNFEEVVDKGASAQSFIERMTNFDKNLPNEKVLPKHSLLYEYFTVYNELTKVKYVTEGMRKPAFLSGEQKKAIVDLLFKTNRKVTVKQLKEDYFKKIECFDSVEISGVEDRFNASLGTYHDLLKIIKDKDFLDNEENEDILEDIVLTLTLFEDREMIEERLKTYAHLFDDKVMKQLKRRRYTGWGRLSRKLINGIRDKQSGKTILDFLKSDGFANRNFMQLIHDDSLTFKEDIQKAQVSGQGDSLHEHIANLAGSPAIKKGILQTVKVVDELVKVMGRHKPENIVIEMARENQTTQKGQKNSRERMKRIEEGIKELGSQILKEHPVENTQLQNEKLYLYYLQNGRDMYVDQELDINRLSDYDVDHIVPQSFLKDDSIDNKVLTRSDKARGKSDNVPSEEVVKKMKNYWRQLLNAKLITQRKFDNLTKAERGGLSELDKAGFIKRQLVETRQITKHVAQILDSRMNTKYDENDKLIREVKVITLKSKLVSDFRKDFQFYKVREINNYHHAHDAYLNAVVGTALIKKYPKLESEFVYGDYKVYDVRKMIAKSEQEIGKATAKYFFYSNIMNFFKTEITLANGEIRKRPLIETNGETGEIVWDKGRDFATVRKVLSMPQVNIVKKTEVQTGGFSKESILPKRNSDKLIARKKDWDPKKYGGFDSPTVAYSVLVVAKVEKGKSKKLKSVKELLGITIMERSSFEKNPIDFLEAKGYKEVKKDLIIKLPKYSLFELENGRKRMLASAGELQKGNELALPSKYVNFLYLASHYEKLKGSPEDNEQKQLFVEQHKHYLDEIIEQISEFSKRVILADANLDKVLSAYNKHRDKPIREQAENIIHLFTLTNLGAPAAFKYFDTTIDRKRYTSTKEVLDATLIHQSITGLYETRIDLSQLGGDGGGGGEAAAKGGTLNIEDEYRLHETSKEPDVSLGSTWLSDFPQAWAETGGMGLAVRQAPLIIPLKATSTPVSIKQYPMSQEARLGIKPHIQRLLDQGILVPCQSPWNTPLLPVKKPGTNDYRPVQDLREVNKRVEDIHPTVPNPYNLLSGLPPSHQWYTVLDLKDAFFCLRLHPTSQPLFAFEWRDPEMGISGQLTWTRLPQGFKNSPTLFNEALHRDLAGFRIQHPDLILLQYVDDLLLAATSELDCQQGTRALLQTLGDLGYRASAKKAQICQKQVKYLGYLLKEGQRWLTEARKETVMGQPIPKTPRQLREFLGKAGFCRLFIPGFAEMAAPLYPLTKPGTLFNWGPDQQKAFQEIKQALLTAPALGLPDLTKPFELFVDEKQGYAKGVLTQKLGPWRRPVAYLSKKLDPVAAGWPPCLRMVAAIAVLTKDAGKLTMGQPLVILAPHAVEALVKQPPDRWLSNARMTHYQALLLDTDRVQFGPVVALNPATLLPLPEEGLQHDCLDILAEAHGTRSDLMDQPLPDADHTWYTDGSSFLQEGQRKAGAAVTTETEVIWARALPAGTSAQRAELIALTQALKMAEGKKLNVYTDSRYAFATAHIHGEIYRRRGWLTSEGKEIKNKDEILALLKALFLPKRLSIIHCPGHQKGNSAEARGNRMADQAAREVATRETPETSTLLAGKRTADGSEFEKRTADGSEFESPKKKAKVE

SEQ ID NO: 2343 - protein, 2131 aa, synthetic construct
MPAAKRVKLDGGDKKYSIGLDIGTNSVGWAVITDEYKVPSKKFKVLGNTDRHSIKKNLIGALLFDSGETAEATRLKRTARRRYTRRKNRICYLQEIFSNEMAKVDDSFFHRLEESFLVEEDKKHERHPIFGNIVDEVAYHEKYPTIYHLRKKLVDSTDKADLRLIYLALAHMIKFRGHFLIEGDLNPDNSDVDKLFIQLVQTYNQLFEENPINASGVDAKAILSARLSKSRRLENLIAQLPGEKKNGLFGNLIALSLGLTPNFKSNFDLAEDAKLQLSKDTYDDDLDNLLAQIGDQYADLFLAAKNLSDAILLSDILRVNTEITKAPLSASMIKRYDEHHQDLTLLKALVRQQLPEKYKEIFFDQSKNGYAGYIDGGASQEEFYKFIKPILEKMDGTEELLVKLNREDLLRKQRTFDNGSIPHQIHLGELHAILRRQEDFYPFLKDNREKIEKILTFRIPYYVGPLARGNSRFAWMTRKSEETITPWNFEEVVDKGASAQSFIERMTNFDKNLPNEKVLPKHSLLYEYFTVYNELTKVKYVTEGMRKPAFLSGEQKKAIVDLLFKTNRKVTVKQLKEDYFKKIECFDSVEISGVEDRFNASLGTYHDLLKIIKDKDFLDNEENEDILEDIVLTLTLFEDREMIEERLKTYAHLFDDKVMKQLKRRRYTGWGRLSRKLINGIRDKQSGKTILDFLKSDGFANRNFMQLIHDDSLTFKEDIQKAQVSGQGDSLHEHIANLAGSPAIKKGILQTVKVVDELVKVMGRHKPENIVIEMARENQTTQKGQKNSRERMKRIEEGIKELGSQILKEHPVENTQLQNEKLYLYYLQNGRDMYVDQELDINRLSDYDVDHIVPQSFLKDDSIDNKVLTRSDKARGKSDNVPSEEVVKKMKNYWRQLLNAKLITQRKFDNLTKAERGGLSELDKAGFIKRQLVETRQITKHVAQILDSRMNTKYDENDKLIREVKVITLKSKLVSDFRKDFQFYKVREINNYHHAHDAYLNAVVGTALIKKYPKLESEFVYGDYKVYDVRKMIAKSEQEIGKATAKYFFYSNIMNFFKTEITLANGEIRKRPLIETNGETGEIVWDKGRDFATVRKVLSMPQVNIVKKTEVQTGGFSKESILPKRNSDKLIARKKDWDPKKYGGFDSPTVAYSVLVVAKVEKGKSKKLKSVKELLGITIMERSSFEKNPIDFLEAKGYKEVKKDLIIKLPKYSLFELENGRKRMLASAGELQKGNELALPSKYVNFLYLASHYEKLKGSPEDNEQKQLFVEQHKHYLDEIIEQISEFSKRVILADANLDKVLSAYNKHRDKPIREQAENIIHLFTLTNLGAPAAFKYFDTTIDRKRYTSTKEVLDATLIHQSITGLYETRIDLSQLGGDGGAEAAAKEAAAKEAAAKEAAAKALEAEAAAKEAAAKEAAAKEAAAKAGGTLNIEDEYRLHETSKEPDVSLGSTWLSDFPQAWAETGGMGLAVRQAPLIIPLKATSTPVSIKQYPMSQEARLGIKPHIQRLLDQGILVPCQSPWNTPLLPVKKPGTNDYRPVQDLREVNKRVEDIHPTVPNPYNLLSGLPPSHQWYTVLDLKDAFFCLRLHPTSQPLFAFEWRDPEMGISGQLTWTRLPQGFKNSPTLFNEALHRDLAGFRIQHPDLILLQYVDDLLLAATSELDCQQGTRALLQTLGDLGYRASAKKAQICQKQVKYLGYLLKEGQRWLTEARKETVMGQPIPKTPRQLREFLGKAGFCRLFIPGFAEMAAPLYPLTKPGTLFNWGPDQQKAFQEIKQALLTAPALGLPDLTKPFELFVDEKQGYAKGVLTQKLGPWRRPVAYLSKKLDPVAAGWPPCLRMVAAIAVLTKDAGKLTMGQPLVILAPHAVEALVKQPPDRWLSNARMTHYQALLLDTDRVQFGPVVALNPATLLPLPEEGLQHDCLDILAEAHGTRSDLMDQPLPDADHTWYTDGSSFLQEGQRKAGAAVTTETEVIWARALPAGTSAQRAELIALTQALKMAEGKKLNVYTDSRYAFATAHIHGEIYRRRGWLTSEGKEIKNKDEILALLKALFLPKRLSIIHCPGHQKGNSAEARGNRMADQAAREVATRETPETSTLLAGKRTADGSEFEKRTADGSEFESPKKKAKVE

SEQ ID NO: 2344 - protein, 2096 aa, synthetic construct
MPAAKRVKLDGGDKKYSIGLDIGTNSVGWAVITDEYKVPSKKFKVLGNTDRHSIKKNLIGALLFDSGETAEATRLKRTARRRYTRRKNRICYLQEIFSNEMAKVDDSFFHRLEESFLVEEDKKHERHPIFGNIVDEVAYHEKYPTIYHLRKKLVDSTDKADLRLIYLALAHMIKFRGHFLIEGDLNPDNSDVDKLFIQLVQTYNQLFEENPINASGVDAKAILSARLSKSRRLENLIAQLPGEKKNGLFGNLIALSLGLTPNFKSNFDLAEDAKLQLSKDTYDDDLDNLLAQIGDQYADLFLAAKNLSDAILLSDILRVNTEITKAPLSASMIKRYDEHHQDLTLLKALVRQQLPEKYKEIFFDQSKNGYAGYIDGGASQEEFYKFIKPILEKMDGTEELLVKLNREDLLRKQRTFDNGSIPHQIHLGELHAILRRQEDFYPFLKDNREKIEKILTFRIPYYVGPLARGNSRFAWMTRKSEETITPWNFEEVVDKGASAQSFIERMTNFDKNLPNEKVLPKHSLLYEYFTVYNELTKVKYVTEGMRKPAFLSGEQKKAIVDLLFKTNRKVTVKQLKEDYFKKIECFDSVEISGVEDRFNASLGTYHDLLKIIKDKDFLDNEENEDILEDIVLTLTLFEDREMIEERLKTYAHLFDDKVMKQLKRRRYTGWGRLSRKLINGIRDKQSGKTILDFLKSDGFANRNFMQLIHDDSLTFKEDIQKAQVSGQGDSLHEHIANLAGSPAIKKGILQTVKVVDELVKVMGRHKPENIVIEMARENQTTQKGQKNSRERMKRIEEGIKELGSQILKEHPVENTQLQNEKLYLYYLQNGRDMYVDQELDINRLSDYDVDHIVPQSFLKDDSIDNKVLTRSDKARGKSDNVPSEEVVKKMKNYWRQLLNAKLITQRKFDNLTKAERGGLSELDKAGFIKRQLVETRQITKHVAQILDSRMNTKYDENDKLIREVKVITLKSKLVSDFRKDFQFYKVREINNYHHAHDAYLNAVVGTALIKKYPKLESEFVYGDYKVYDVRKMIAKSEQEIGKATAKYFFYSNIMNFFKTEITLANGEIRKRPLIETNGETGEIVWDKGRDFATVRKVLSMPQVNIVKKTEVQTGGFSKESILPKRNSDKLIARKKDWDPKKYGGFDSPTVAYSVLVVAKVEKGKSKKLKSVKELLGITIMERSSFEKNPIDFLEAKGYKEVKKDLIIKLPKYSLFELENGRKRMLASAGELQKGNELALPSKYVNFLYLASHYEKLKGSPEDNEQKQLFVEQHKHYLDEIIEQISEFSKRVILADANLDKVLSAYNKHRDKPIREQAENIIHLFTLTNLGAPAAFKYFDTTIDRKRYTSTKEVLDATLIHQSITGLYETRIDLSQLGGDGGEAAAKGGGGGSGGTLNIEDEYRLHETSKEPDVSLGSTWLSDFPQAWAETGGMGLAVRQAPLIIPLKATSTPVSIKQYPMSQEARLGIKPHIQRLLDQGILVPCQSPWNTPLLPVKKPGTNDYRPVQDLREVNKRVEDIHPTVPNPYNLLSGLPPSHQWYTVLDLKDAFFCLRLHPTSQPLFAFEWRDPEMGISGQLTWTRLPQGFKNSPTLFNEALHRDLAGFRIQHPDLILLQYVDDLLLAATSELDCQQGTRALLQTLGDLGYRASAKKAQICQKQVKYLGYLLKEGQRWLTEARKETVMGQPIPKTPRQLREFLGKAGFCRLFIPGFAEMAAPLYPLTKPGTLFNWGPDQQKAFQEIKQALLTAPALGLPDLTKPFELFVDEKQGYAKGVLTQKLGPWRRPVAYLSKKLDPVAAGWPPCLRMVAAIAVLTKDAGKLTMGQPLVILAPHAVEALVKQPPDRWLSNARMTHYQALLLDTDRVQFGPVVALNPATLLPLPEEGLQHDCLDILAEAHGTRSDLMDQPLPDADHTWYTDGSSFLQEGQRKAGAAVTTETEVIWARALPAGTSAQRAELIALTQALKMAEGKKLNVYTDSRYAFATAHIHGEIYRRRGWLTSEGKEIKNKDEILALLKALFLPKRLSIIHCPGHQKGNSAEARGNRMADQAAREVATRETPETSTLLAGKRTADGSEFEKRTADGSEFESPKKKAKVE

SEQ ID NO: 2345 - protein, 2096 aa, synthetic construct
MPAAKRVKLDGGDKKYSIGLDIGTNSVGWAVITDEYKVPSKKFKVLGNTDRHSIKKNLIGALLFDSGETAEATRLKRTARRRYTRRKNRICYLQEIFSNEMAKVDDSFFHRLEESFLVEEDKKHERHPIFGNIVDEVAYHEKYPTIYHLRKKLVDSTDKADLRLIYLALAHMIKFRGHFLIEGDLNPDNSDVDKLFIQLVQTYNQLFEENPINASGVDAKAILSARLSKSRRLENLIAQLPGEKKNGLFGNLIALSLGLTPNFKSNFDLAEDAKLQLSKDTYDDDLDNLLAQIGDQYADLFLAAKNLSDAILLSDILRVNTEITKAPLSASMIKRYDEHHQDLTLLKALVRQQLPEKYKEIFFDQSKNGYAGYIDGGASQEEFYKFIKPILEKMDGTEELLVKLNREDLLRKQRTFDNGSIPHQIHLGELHAILRRQEDFYPFLKDNREKIEKILTFRIPYYVGPLARGNSRFAWMTRKSEETITPWNFEEVVDKGASAQSFIERMTNFDKNLPNEKVLPKHSLLYEYFTVYNELTKVKYVTEGMRKPAFLSGEQKKAIVDLLFKTNRKVTVKQLKEDYFKKIECFDSVEISGVEDRFNASLGTYHDLLKIIKDKDFLDNEENEDILEDIVLTLTLFEDREMIEERLKTYAHLFDDKVMKQLKRRRYTGWGRLSRKLINGIRDKQSGKTILDFLKSDGFANRNFMQLIHDDSLTFKEDIQKAQVSGQGDSLHEHIANLAGSPAIKKGILQTVKVVDELVKVMGRHKPENIVIEMARENQTTQKGQKNSRERMKRIEEGIKELGSQILKEHPVENTQLQNEKLYLYYLQNGRDMYVDQELDINRLSDYDVDHIVPQSFLKDDSIDNKVLTRSDKARGKSDNVPSEEVVKKMKNYWRQLLNAKLITQRKFDNLTKAERGGLSELDKAGFIKRQLVETRQITKHVAQILDSRMNTKYDENDKLIREVKVITLKSKLVSDFRKDFQFYKVREINNYHHAHDAYLNAVVGTALIKKYPKLESEFVYGDYKVYDVRKMIAKSEQEIGKATAKYFFYSNIMNFFKTEITLANGEIRKRPLIETNGETGEIVWDKGRDFATVRKVLSMPQVNIVKKTEVQTGGFSKESILPKRNSDKLIARKKDWDPKKYGGFDSPTVAYSVLVVAKVEKGKSKKLKSVKELLGITIMERSSFEKNPIDFLEAKGYKEVKKDLIIKLPKYSLFELENGRKRMLASAGELQKGNELALPSKYVNFLYLASHYEKLKGSPEDNEQKQLFVEQHKHYLDEIIEQISEFSKRVILADANLDKVLSAYNKHRDKPIREQAENIIHLFTLTNLGAPAAFKYFDTTIDRKRYTSTKEVLDATLIHQSITGLYETRIDLSQLGGDGGGSSPAPEAAAKGGTLNIEDEYRLHETSKEPDVSLGSTWLSDFPQAWAETGGMGLAVRQAPLIIPLKATSTPVSIKQYPMSQEARLGIKPHIQRLLDQGILVPCQSPWNTPLLPVKKPGTNDYRPVQDLREVNKRVEDIHPTVPNPYNLLSGLPPSHQWYTVLDLKDAFFCLRLHPTSQPLFAFEWRDPEMGISGQLTWTRLPQGFKNSPTLFNEALHRDLAGFRIQHPDLILLQYVDDLLLAATSELDCQQGTRALLQTLGDLGYRASAKKAQICQKQVKYLGYLLKEGQRWLTEARKETVMGQPIPKTPRQLREFLGKAGFCRLFIPGFAEMAAPLYPLTKPGTLFNWGPDQQKAFQEIKQALLTAPALGLPDLTKPFELFVDEKQGYAKGVLTQKLGPWRRPVAYLSKKLDPVAAGWPPCLRMVAAIAVLTKDAGKLTMGQPLVILAPHAVEALVKQPPDRWLSNARMTHYQALLLDTDRVQFGPVVALNPATLLPLPEEGLQHDCLDILAEAHGTRSDLMDQPLPDADHTWYTDGSSFLQEGQRKAGAAVTTETEVIWARALPAGTSAQRAELIALTQALKMAEGKKLNVYTDSRYAFATAHIHGEIYRRRGWLTSEGKEIKNKDEILALLKALFLPKRLSIIHCPGHQKGNSAEARGNRMADQAAREVATRETPETSTLLAGKRTADGSEFEKRTADGSEFESPKKKAKVE

SEQ ID NO: 2346 - protein, 2094 aa, synthetic construct
MPAAKRVKLDGGDKKYSIGLDIGTNSVGWAVITDEYKVPSKKFKVLGNTDRHSIKKNLIGALLFDSGETAEATRLKRTARRRYTRRKNRICYLQEIFSNEMAKVDDSFFHRLEESFLVEEDKKHERHPIFGNIVDEVAYHEKYPTIYHLRKKLVDSTDKADLRLIYLALAHMIKFRGHFLIEGDLNPDNSDVDKLFIQLVQTYNQLFEENPINASGVDAKAILSARLSKSRRLENLIAQLPGEKKNGLFGNLIALSLGLTPNFKSNFDLAEDAKLQLSKDTYDDDLDNLLAQIGDQYADLFLAAKNLSDAILLSDILRVNTEITKAPLSASMIKRYDEHHQDLTLLKALVRQQLPEKYKEIFFDQSKNGYAGYIDGGASQEEFYKFIKPILEKMDGTEELLVKLNREDLLRKQRTFDNGSIPHQIHLGELHAILRRQEDFYPFLKDNREKIEKILTFRIPYYVGPLARGNSRFAWMTRKSEETITPWNFEEVVDKGASAQSFIERMTNFDKNLPNEKVLPKHSLLYEYFTVYNELTKVKYVTEGMRKPAFLSGEQKKAIVDLLFKTNRKVTVKQLKEDYFKKIECFDSVEISGVEDRFNASLGTYHDLLKIIKDKDFLDNEENEDILEDIVLTLTLFEDREMIEERLKTYAHLFDDKVMKQLKRRRYTGWGRLSRKLINGIRDKQSGKTILDFLKSDGFANRNFMQLIHDDSLTFKEDIQKAQVSGQGDSLHEHIANLAGSPAIKKGILQTVKVVDELVKVMGRHKPENIVIEMARENQTTQKGQKNSRERMKRIEEGIKELGSQILKEHPVENTQLQNEKLYLYYLQNGRDMYVDQELDINRLSDYDVDHIVPQSFLKDDSIDNKVLTRSDKARGKSDNVPSEEVVKKMKNYWRQLLNAKLITQRKFDNLTKAERGGLSELDKAGFIKRQLVETRQITKHVAQILDSRMNTKYDENDKLIREVKVITLKSKLVSDFRKDFQFYKVREINNYHHAHDAYLNAVVGTALIKKYPKLESEFVYGDYKVYDVRKMIAKSEQEIGKATAKYFFYSNIMNFFKTEITLANGEIRKRPLIETNGETGEIVWDKGRDFATVRKVLSMPQVNIVKKTEVQTGGFSKESILPKRNSDKLIARKKDWDPKKYGGFDSPTVAYSVLVVAKVEKGKSKKLKSVKELLGITIMERSSFEKNPIDFLEAKGYKEVKKDLIIKLPKYSLFELENGRKRMLASAGELQKGNELALPSKYVNFLYLASHYEKLKGSPEDNEQKQLFVEQHKHYLDEIIEQISEFSKRVILADANLDKVLSAYNKHRDKPIREQAENIIHLFTLTNLGAPAAFKYFDTTIDRKRYTSTKEVLDATLIHQSITGLYETRIDLSQLGGDGGGGGGSSPAPGGTLNIEDEYRLHETSKEPDVSLGSTWLSDFPQAWAETGGMGLAVRQAPLIIPLKATSTPVSIKQYPMSQEARLGIKPHIQRLLDQGILVPCQSPWNTPLLPVKKPGTNDYRPVQDLREVNKRVEDIHPTVPNPYNLLSGLPPSHQWYTVLDLKDAFFCLRLHPTSQPLFAFEWRDPEMGISGQLTWTRLPQGFKNSPTLFNEALHRDLAGFRIQHPDLILLQYVDDLLLAATSELDCQQGTRALLQTLGDLGYRASAKKAQICQKQVKYLGYLLKEGQRWLTEARKETVMGQPIPKTPRQLREFLGKAGFCRLFIPGFAEMAAPLYPLTKPGTLFNWGPDQQKAFQEIKQALLTAPALGLPDLTKPFELFVDEKQGYAKGVLTQKLGPWRRPVAYLSKKLDPVAAGWPPCLRMVAAIAVLTKDAGKLTMGQPLVILAPHAVEALVKQPPDRWLSNARMTHYQALLLDTDRVQFGPVVALNPATLLPLPEEGLQHDCLDILAEAHGTRSDLMDQPLPDADHTWYTDGSSFLQEGQRKAGAAVTTETEVIWARALPAGTSAQRAELIALTQALKMAEGKKLNVYTDSRYAFATAHIHGEIYRRRGWLTSEGKEIKNKDEILALLKALFLPKRLSIIHCPGHQKGNSAEARGNRMADQAAREVATRETPETSTLLAGKRTADGSEFEKRTADGSEFESPKKKAKVE

SEQ ID NO: 2347 - protein, 2096 aa, synthetic construct
MPAAKRVKLDGGDKKYSIGLDIGTNSVGWAVITDEYKVPSKKFKVLGNTDRHSIKKNLIGALLFDSGETAEATRLKRTARRRYTRRKNRICYLQEIFSNEMAKVDDSFFHRLEESFLVEEDKKHERHPIFGNIVDEVAYHEKYPTIYHLRKKLVDSTDKADLRLIYLALAHMIKFRGHFLIEGDLNPDNSDVDKLFIQLVQTYNQLFEENPINASGVDAKAILSARLSKSRRLENLIAQLPGEKKNGLFGNLIALSLGLTPNFKSNFDLAEDAKLQLSKDTYDDDLDNLLAQIGDQYADLFLAAKNLSDAILLSDILRVNTEITKAPLSASMIKRYDEHHQDLTLLKALVRQQLPEKYKEIFFDQSKNGYAGYIDGGASQEEFYKFIKPILEKMDGTEELLVKLNREDLLRKQRTFDNGSIPHQIHLGELHAILRRQEDFYPFLKDNREKIEKILTFRIPYYVGPLARGNSRFAWMTRKSEETITPWNFEEVVDKGASAQSFIERMTNFDKNLPNEKVLPKHSLLYEYFTVYNELTKVKYVTEGMRKPAFLSGEQKKAIVDLLFKTNRKVTVKQLKEDYFKKIECFDSVEISGVEDRFNASLGTYHDLLKIIKDKDFLDNEENEDILEDIVLTLTLFEDREMIEERLKTYAHLFDDKVMKQLKRRRYTGWGRLSRKLINGIRDKQSGKTILDFLKSDGFANRNFMQLIHDDSLTFKEDIQKAQVSGQGDSLHEHIANLAGSPAIKKGILQTVKVVDELVKVMGRHKPENIVIEMARENQTTQKGQKNSRERMKRIEEGIKELGSQILKEHPVENTQLQNEKLYLYYLQNGRDMYVDQELDINRLSDYDVDHIVPQSFLKDDSIDNKVLTRSDKARGKSDNVPSEEVVKKMKNYWRQLLNAKLITQRKFDNLTKAERGGLSELDKAGFIKRQLVETRQITKHVAQILDSRMNTKYDENDKLIREVKVITLKSKLVSDFRKDFQFYKVREINNYHHAHDAYLNAVVGTALIKKYPKLESEFVYGDYKVYDVRKMIAKSEQEIGKATAKYFFYSNIMNFFKTEITLANGEIRKRPLIETNGETGEIVWDKGRDFATVRKVLSMPQVNIVKKTEVQTGGFSKESILPKRNSDKLIARKKDWDPKKYGGFDSPTVAYSVLVVAKVEKGKSKKLKSVKELLGITIMERSSFEKNPIDFLEAKGYKEVKKDLIIKLPKYSLFELENGRKRMLASAGELQKGNELALPSKYVNFLYLASHYEKLKGSPEDNEQKQLFVEQHKHYLDEIIEQISEFSKRVILADANLDKVLSAYNKHRDKPIREQAENIIHLFTLTNLGAPAAFKYFDTTIDRKRYTSTKEVLDATLIHQSITGLYETRIDLSQLGGDGGPAPEAAAKGSSGGTLNIEDEYRLHETSKEPDVSLGSTWLSDFPQAWAETGGMGLAVRQAPLIIPLKATSTPVSIKQYPMSQEARLGIKPHIQRLLDQGILVPCQSPWNTPLLPVKKPGTNDYRPVQDLREVNKRVEDIHPTVPNPYNLLSGLPPSHQWYTVLDLKDAFFCLRLHPTSQPLFAFEWRDPEMGISGQLTWTRLPQGFKNSPTLFNEALHRDLAGFRIQHPDLILLQYVDDLLLAATSELDCQQGTRALLQTLGDLGYRASAKKAQICQKQVKYLGYLLKEGQRWLTEARKETVMGQPIPKTPRQLREFLGKAGFCRLFIPGFAEMAAPLYPLTKPGTLFNWGPDQQKAFQEIKQALLTAPALGLPDLTKPFELFVDEKQGYAKGVLTQKLGPWRRPVAYLSKKLDPVAAGWPPCLRMVAAIAVLTKDAGKLTMGQPLVILAPHAVEALVKQPPDRWLSNARMTHYQALLLDTDRVQFGPVVALNPATLLPLPEEGLQHDCLDILAEAHGTRSDLMDQPLPDADHTWYTDGSSFLQEGQRKAGAAVTTETEVIWARALPAGTSAQRAELIALTQALKMAEGKKLNVYTDSRYAFATAHIHGEIYRRRGWLTSEGKEIKNKDEILALLKALFLPKRLSIIHCPGHQKGNSAEARGNRMADQAAREVATRETPETSTLLAGKRTADGSEFEKRTADGSEFESPKKKAKVE

SEQ ID NO: 2348 - protein, 2093 aa, synthetic construct
MPAAKRVKLDGGDKKYSIGLDIGTNSVGWAVITDEYKVPSKKFKVLGNTDRHSIKKNLIGALLFDSGETAEATRLKRTARRRYTRRKNRICYLQEIFSNEMAKVDDSFFHRLEESFLVEEDKKHERHPIFGNIVDEVAYHEKYPTIYHLRKKLVDSTDKADLRLIYLALAHMIKFRGHFLIEGDLNPDNSDVDKLFIQLVQTYNQLFEENPINASGVDAKAILSARLSKSRRLENLIAQLPGEKKNGLFGNLIALSLGLTPNFKSNFDLAEDAKLQLSKDTYDDDLDNLLAQIGDQYADLFLAAKNLSDAILLSDILRVNTEITKAPLSASMIKRYDEHHQDLTLLKALVRQQLPEKYKEIFFDQSKNGYAGYIDGGASQEEFYKFIKPILEKMDGTEELLVKLNREDLLRKQRTFDNGSIPHQIHLGELHAILRRQEDFYPFLKDNREKIEKILTFRIPYYVGPLARGNSRFAWMTRKSEETITPWNFEEVVDKGASAQSFIERMTNFDKNLPNEKVLPKHSLLYEYFTVYNELTKVKYVTEGMRKPAFLSGEQKKAIVDLLFKTNRKVTVKQLKEDYFKKIECFDSVEISGVEDRFNASLGTYHDLLKIIKDKDFLDNEENEDILEDIVLTLTLFEDREMIEERLKTYAHLFDDKVMKQLKRRRYTGWGRLSRKLINGIRDKQSGKTILDFLKSDGFANRNFMQLIHDDSLTFKEDIQKAQVSGQGDSLHEHIANLAGSPAIKKGILQTVKVVDELVKVMGRHKPENIVIEMARENQTTQKGQKNSRERMKRIEEGIKELGSQILKEHPVENTQLQNEKLYLYYLQNGRDMYVDQELDINRLSDYDVDHIVPQSFLKDDSIDNKVLTRSDKARGKSDNVPSEEVVKKMKNYWRQLLNAKLITQRKFDNLTKAERGGLSELDKAGFIKRQLVETRQITKHVAQILDSRMNTKYDENDKLIREVKVITLKSKLVSDFRKDFQFYKVREINNYHHAHDAYLNAVVGTALIKKYPKLESEFVYGDYKVYDVRKMIAKSEQEIGKATAKYFFYSNIMNFFKTEITLANGEIRKRPLIETNGETGEIVWDKGRDFATVRKVLSMPQVNIVKKTEVQTGGFSKESILPKRNSDKLIARKKDWDPKKYGGFDSPTVAYSVLVVAKVEKGKSKKLKSVKELLGITIMERSSFEKNPIDFLEAKGYKEVKKDLIIKLPKYSLFELENGRKRMLASAGELQKGNELALPSKYVNFLYLASHYEKLKGSPEDNEQKQLFVEQHKHYLDEIIEQISEFSKRVILADANLDKVLSAYNKHRDKPIREQAENIIHLFTLTNLGAPAAFKYFDTTIDRKRYTSTKEVLDATLIHQSITGLYETRIDLSQLGGDGGEAAAKGGGGGTLNIEDEYRLHETSKEPDVSLGSTWLSDFPQAWAETGGMGLAVRQAPLIIPLKATSTPVSIKQYPMSQEARLGIKPHIQRLLDQGILVPCQSPWNTPLLPVKKPGTNDYRPVQDLREVNKRVEDIHPTVPNPYNLLSGLPPSHQWYTVLDLKDAFFCLRLHPTSQPLFAFEWRDPEMGISGQLTWTRLPQGFKNSPTLFNEALHRDLAGFRIQHPDLILLQYVDDLLLAATSELDCQQGTRALLQTLGDLGYRASAKKAQICQKQVKYLGYLLKEGQRWLTEARKETVMGQPIPKTPRQLREFLGKAGFCRLFIPGFAEMAAPLYPLTKPGTLFNWGPDQQKAFQEIKQALLTAPALGLPDLTKPFELFVDEKQGYAKGVLTQKLGPWRRPVAYLSKKLDPVAAGWPPCLRMVAAIAVLTKDAGKLTMGQPLVILAPHAVEALVKQPPDRWLSNARMTHYQALLLDTDRVQFGPVVALNPATLLPLPEEGLQHDCLDILAEAHGTRSDLMDQPLPDADHTWYTDGSSFLQEGQRKAGAAVTTETEVIWARALPAGTSAQRAELIALTQALKMAEGKKLNVYTDSRYAFATAHIHGEIYRRRGWLTSEGKEIKNKDEILALLKALFLPKRLSIIHCPGHQKGNSAEARGNRMADQAAREVATRETPETSTLLAGKRTADGSEFEKRTADGSEFESPKKKAKVE

SEQ ID NO: 2349 - protein, 2093 aa, synthetic construct
MPAAKRVKLDGGDKKYSIGLDIGTNSVGWAVITDEYKVPSKKFKVLGNTDRHSIKKNLIGALLFDSGETAEATRLKRTARRRYTRRKNRICYLQEIFSNEMAKVDDSFFHRLEESFLVEEDKKHERHPIFGNIVDEVAYHEKYPTIYHLRKKLVDSTDKADLRLIYLALAHMIKFRGHFLIEGDLNPDNSDVDKLFIQLVQTYNQLFEENPINASGVDAKAILSARLSKSRRLENLIAQLPGEKKNGLFGNLIALSLGLTPNFKSNFDLAEDAKLQLSKDTYDDDLDNLLAQIGDQYADLFLAAKNLSDAILLSDILRVNTEITKAPLSASMIKRYDEHHQDLTLLKALVRQQLPEKYKEIFFDQSKNGYAGYIDGGASQEEFYKFIKPILEKMDGTEELLVKLNREDLLRKQRTFDNGSIPHQIHLGELHAILRRQEDFYPFLKDNREKIEKILTFRIPYYVGPLARGNSRFAWMTRKSEETITPWNFEEVVDKGASAQSFIERMTNFDKNLPNEKVLPKHSLLYEYFTVYNELTKVKYVTEGMRKPAFLSGEQKKAIVDLLFKTNRKVTVKQLKEDYFKKIECFDSVEISGVEDRFNASLGTYHDLLKIIKDKDFLDNEENEDILEDIVLTLTLFEDREMIEERLKTYAHLFDDKVMKQLKRRRYTGWGRLSRKLINGIRDKQSGKTILDFLKSDGFANRNFMQLIHDDSLTFKEDIQKAQVSGQGDSLHEHIANLAGSPAIKKGILQTVKVVDELVKVMGRHKPENIVIEMARENQTTQKGQKNSRERMKRIEEGIKELGSQILKEHPVENTQLQNEKLYLYYLQNGRDMYVDQELDINRLSDYDVDHIVPQSFLKDDSIDNKVLTRSDKARGKSDNVPSEEVVKKMKNYWRQLLNAKLITQRKFDNLTKAERGGLSELDKAGFIKRQLVETRQITKHVAQILDSRMNTKYDENDKLIREVKVITLKSKLVSDFRKDFQFYKVREINNYHHAHDAYLNAVVGTALIKKYPKLESEFVYGDYKVYDVRKMIAKSEQEIGKATAKYFFYSNIMNFFKTEITLANGEIRKRPLIETNGETGEIVWDKGRDFATVRKVLSMPQVNIVKKTEVQTGGFSKESILPKRNSDKLIARKKDWDPKKYGGFDSPTVAYSVLVVAKVEKGKSKKLKSVKELLGITIMERSSFEKNPIDFLEAKGYKEVKKDLIIKLPKYSLFELENGRKRMLASAGELQKGNELALPSKYVNFLYLASHYEKLKGSPEDNEQKQLFVEQHKHYLDEIIEQISEFSKRVILADANLDKVLSAYNKHRDKPIREQAENIIHLFTLTNLGAPAAFKYFDTTIDRKRYTSTKEVLDATLIHQSITGLYETRIDLSQLGGDGGGGGGGGGGGGTLNIEDEYRLHETSKEPDVSLGSTWLSDFPQAWAETGGMGLAVRQAPLIIPLKATSTPVSIKQYPMSQEARLGIKPHIQRLLDQGILVPCQSPWNTPLLPVKKPGTNDYRPVQDLREVNKRVEDIHPTVPNPYNLLSGLPPSHQWYTVLDLKDAFFCLRLHPTSQPLFAFEWRDPEMGISGQLTWTRLPQGFKNSPTLFNEALHRDLAGFRIQHPDLILLQYVDDLLLAATSELDCQQGTRALLQTLGDLGYRASAKKAQICQKQVKYLGYLLKEGQRWLTEARKETVMGQPIPKTPRQLREFLGKAGFCRLFIPGFAEMAAPLYPLTKPGTLFNWGPDQQKAFQEIKQALLTAPALGLPDLTKPFELFVDEKQGYAKGVLTQKLGPWRRPVAYLSKKLDPVAAGWPPCLRMVAAIAVLTKDAGKLTMGQPLVILAPHAVEALVKQPPDRWLSNARMTHYQALLLDTDRVQFGPVVALNPATLLPLPEEGLQHDCLDILAEAHGTRSDLMDQPLPDADHTWYTDGSSFLQEGQRKAGAAVTTETEVIWARALPAGTSAQRAELIALTQALKMAEGKKLNVYTDSRYAFATAHIHGEIYRRRGWLTSEGKEIKNKDEILALLKALFLPKRLSIIHCPGHQKGNSAEARGNRMADQAAREVATRETPETSTLLAGKRTADGSEFEKRTADGSEFESPKKKAKVE

SEQ ID NO: 2350 - protein, 2093 aa, synthetic construct
MPAAKRVKLDGGDKKYSIGLDIGTNSVGWAVITDEYKVPSKKFKVLGNTDRHSIKKNLIGALLFDSGETAEATRLKRTARRRYTRRKNRICYLQEIFSNEMAKVDDSFFHRLEESFLVEEDKKHERHPIFGNIVDEVAYHEKYPTIYHLRKKLVDSTDKADLRLIYLALAHMIKFRGHFLIEGDLNPDNSDVDKLFIQLVQTYNQLFEENPINASGVDAKAILSARLSKSRRLENLIAQLPGEKKNGLFGNLIALSLGLTPNFKSNFDLAEDAKLQLSKDTYDDDLDNLLAQIGDQYADLFLAAKNLSDAILLSDILRVNTEITKAPLSASMIKRYDEHHQDLTLLKALVRQQLPEKYKEIFFDQSKNGYAGYIDGGASQEEFYKFIKPILEKMDGTEELLVKLNREDLLRKQRTFDNGSIPHQIHLGELHAILRRQEDFYPFLKDNREKIEKILTFRIPYYVGPLARGNSRFAWMTRKSEETITPWNFEEVVDKGASAQSFIERMTNFDKNLPNEKVLPKHSLLYEYFTVYNELTKVKYVTEGMRKPAFLSGEQKKAIVDLLFKTNRKVTVKQLKEDYFKKIECFDSVEISGVEDRFNASLGTYHDLLKIIKDKDFLDNEENEDILEDIVLTLTLFEDREMIEERLKTYAHLFDDKVMKQLKRRRYTGWGRLSRKLINGIRDKQSGKTILDFLKSDGFANRNFMQLIHDDSLTFKEDIQKAQVSGQGDSLHEHIANLAGSPAIKKGILQTVKVVDELVKVMGRHKPENIVIEMARENQTTQKGQKNSRERMKRIEEGIKELGSQILKEHPVENTQLQNEKLYLYYLQNGRDMYVDQELDINRLSDYDVDHIVPQSFLKDDSIDNKVLTRSDKARGKSDNVPSEEVVKKMKNYWRQLLNAKLITQRKFDNLTKAERGGLSELDKAGFIKRQLVETRQITKHVAQILDSRMNTKYDENDKLIREVKVITLKSKLVSDFRKDFQFYKVREINNYHHAHDAYLNAVVGTALIKKYPKLESEFVYGDYKVYDVRKMIAKSEQEIGKATAKYFFYSNIMNFFKTEITLANGEIRKRPLIETNGETGEIVWDKGRDFATVRKVLSMPQVNIVKKTEVQTGGFSKESILPKRNSDKLIARKKDWDPKKYGGFDSPTVAYSVLVVAKVEKGKSKKLKSVKELLGITIMERSSFEKNPIDFLEAKGYKEVKKDLIIKLPKYSLFELENGRKRMLASAGELQKGNELALPSKYVNFLYLASHYEKLKGSPEDNEQKQLFVEQHKHYLDEIIEQISEFSKRVILADANLDKVLSAYNKHRDKPIREQAENIIHLFTLTNLGAPAAFKYFDTTIDRKRYTSTKEVLDATLIHQSITGLYETRIDLSQLGGDGGEAAAKGSSGGTLNIEDEYRLHETSKEPDVSLGSTWLSDFPQAWAETGGMGLAVRQAPLIIPLKATSTPVSIKQYPMSQEARLGIKPHIQRLLDQGILVPCQSPWNTPLLPVKKPGTNDYRPVQDLREVNKRVEDIHPTVPNPYNLLSGLPPSHQWYTVLDLKDAFFCLRLHPTSQPLFAFEWRDPEMGISGQLTWTRLPQGFKNSPTLFNEALHRDLAGFRIQHPDLILLQYVDDLLLAATSELDCQQGTRALLQTLGDLGYRASAKKAQICQKQVKYLGYLLKEGQRWLTEARKETVMGQPIPKTPRQLREFLGKAGFCRLFIPGFAEMAAPLYPLTKPGTLFNWGPDQQKAFQEIKQALLTAPALGLPDLTKPFELFVDEKQGYAKGVLTQKLGPWRRPVAYLSKKLDPVAAGWPPCLRMVAAIAVLTKDAGKLTMGQPLVILAPHAVEALVKQPPDRWLSNARMTHYQALLLDTDRVQFGPVVALNPATLLPLPEEGLQHDCLDILAEAHGTRSDLMDQPLPDADHTWYTDGSSFLQEGQRKAGAAVTTETEVIWARALPAGTSAQRAELIALTQALKMAEGKKLNVYTDSRYAFATAHIHGEIYRRRGWLTSEGKEIKNKDEILALLKALFLPKRLSIIHCPGHQKGNSAEARGNRMADQAAREVATRETPETSTLLAGKRTADGSEFEKRTADGSEFESPKKKAKVE

SEQ ID NO: 2351 - protein, 2096 aa, synthetic construct
MPAAKRVKLDGGDKKYSIGLDIGTNSVGWAVITDEYKVPSKKFKVLGNTDRHSIKKNLIGALLFDSGETAEATRLKRTARRRYTRRKNRICYLQEIFSNEMAKVDDSFFHRLEESFLVEEDKKHERHPIFGNIVDEVAYHEKYPTIYHLRKKLVDSTDKADLRLIYLALAHMIKFRGHFLIEGDLNPDNSDVDKLFIQLVQTYNQLFEENPINASGVDAKAILSARLSKSRRLENLIAQLPGEKKNGLFGNLIALSLGLTPNFKSNFDLAEDAKLQLSKDTYDDDLDNLLAQIGDQYADLFLAAKNLSDAILLSDILRVNTEITKAPLSASMIKRYDEHHQDLTLLKALVRQQLPEKYKEIFFDQSKNGYAGYIDGGASQEEFYKFIKPILEKMDGTEELLVKLNREDLLRKQRTFDNGSIPHQIHLGELHAILRRQEDFYPFLKDNREKIEKILTFRIPYYVGPLARGNSRFAWMTRKSEETITPWNFEEVVDKGASAQSFIERMTNFDKNLPNEKVLPKHSLLYEYFTVYNELTKVKYVTEGMRKPAFLSGEQKKAIVDLLFKTNRKVTVKQLKEDYFKKIECFDSVEISGVEDRFNASLGTYHDLLKIIKDKDFLDNEENEDILEDIVLTLTLFEDREMIEERLKTYAHLFDDKVMKQLKRRRYTGWGRLSRKLINGIRDKQSGKTILDFLKSDGFANRNFMQLIHDDSLTFKEDIQKAQVSGQGDSLHEHIANLAGSPAIKKGILQTVKVVDELVKVMGRHKPENIVIEMARENQTTQKGQKNSRERMKRIEEGIKELGSQILKEHPVENTQLQNEKLYLYYLQNGRDMYVDQELDINRLSDYDVDHIVPQSFLKDDSIDNKVLTRSDKARGKSDNVPSEEVVKKMKNYWRQLLNAKLITQRKFDNLTKAERGGLSELDKAGFIKRQLVETRQITKHVAQILDSRMNTKYDENDKLIREVKVITLKSKLVSDFRKDFQFYKVREINNYHHAHDAYLNAVVGTALIKKYPKLESEFVYGDYKVYDVRKMIAKSEQEIGKATAKYFFYSNIMNFFKTEITLANGEIRKRPLIETNGETGEIVWDKGRDFATVRKVLSMPQVNIVKKTEVQTGGFSKESILPKRNSDKLIARKKDWDPKKYGGFDSPTVAYSVLVVAKVEKGKSKKLKSVKELLGITIMERSSFEKNPIDFLEAKGYKEVKKDLIIKLPKYSLFELENGRKRMLASAGELQKGNELALPSKYVNFLYLASHYEKLKGSPEDNEQKQLFVEQHKHYLDEIIEQISEFSKRVILADANLDKVLSAYNKHRDKPIREQAENIIHLFTLTNLGAPAAFKYFDTTIDRKRYTSTKEVLDATLIHQSITGLYETRIDLSQLGGDGGGGGGGSEAAAKGGTLNIEDEYRLHETSKEPDVSLGSTWLSDFPQAWAETGGMGLAVRQAPLIIPLKATSTPVSIKQYPMSQEARLGIKPHIQRLLDQGILVPCQSPWNTPLLPVKKPGTNDYRPVQDLREVNKRVEDIHPTVPNPYNLLSGLPPSHQWYTVLDLKDAFFCLRLHPTSQPLFAFEWRDPEMGISGQLTWTRLPQGFKNSPTLFNEALHRDLAGFRIQHPDLILLQYVDDLLLAATSELDCQQGTRALLQTLGDLGYRASAKKAQICQKQVKYLGYLLKEGQRWLTEARKETVMGQPIPKTPRQLREFLGKAGFCRLFIPGFAEMAAPLYPLTKPGTLFNWGPDQQKAFQEIKQALLTAPALGLPDLTKPFELFVDEKQGYAKGVLTQKLGPWRRPVAYLSKKLDPVAAGWPPCLRMVAAIAVLTKDAGKLTMGQPLVILAPHAVEALVKQPPDRWLSNARMTHYQALLLDTDRVQFGPVVALNPATLLPLPEEGLQHDCLDILAEAHGTRSDLMDQPLPDADHTWYTDGSSFLQEGQRKAGAAVTTETEVIWARALPAGTSAQRAELIALTQALKMAEGKKLNVYTDSRYAFATAHIHGEIYRRRGWLTSEGKEIKNKDEILALLKALFLPKRLSIIHCPGHQKGNSAEARGNRMADQAAREVATRETPETSTLLAGKRTADGSEFEKRTADGSEFESPKKKAKVE

SEQ ID NO: 2352 - protein, 2096 aa, synthetic construct
MPAAKRVKLDGGDKKYSIGLDIGTNSVGWAVITDEYKVPSKKFKVLGNTDRHSIKKNLIGALLFDSGETAEATRLKRTARRRYTRRKNRICYLQEIFSNEMAKVDDSFFHRLEESFLVEEDKKHERHPIFGNIVDEVAYHEKYPTIYHLRKKLVDSTDKADLRLIYLALAHMIKFRGHFLIEGDLNPDNSDVDKLFIQLVQTYNQLFEENPINASGVDAKAILSARLSKSRRLENLIAQLPGEKKNGLFGNLIALSLGLTPNFKSNFDLAEDAKLQLSKDTYDDDLDNLLAQIGDQYADLFLAAKNLSDAILLSDILRVNTEITKAPLSASMIKRYDEHHQDLTLLKALVRQQLPEKYKEIFFDQSKNGYAGYIDGGASQEEFYKFIKPILEKMDGTEELLVKLNREDLLRKQRTFDNGSIPHQIHLGELHAILRRQEDFYPFLKDNREKIEKILTFRIPYYVGPLARGNSRFAWMTRKSEETITPWNFEEVVDKGASAQSFIERMTNFDKNLPNEKVLPKHSLLYEYFTVYNELTKVKYVTEGMRKPAFLSGEQKKAIVDLLFKTNRKVTVKQLKEDYFKKIECFDSVEISGVEDRFNASLGTYHDLLKIIKDKDFLDNEENEDILEDIVLTLTLFEDREMIEERLKTYAHLFDDKVMKQLKRRRYTGWGRLSRKLINGIRDKQSGKTILDFLKSDGFANRNFMQLIHDDSLTFKEDIQKAQVSGQGDSLHEHIANLAGSPAIKKGILQTVKVVDELVKVMGRHKPENIVIEMARENQTTQKGQKNSRERMKRIEEGIKELGSQILKEHPVENTQLQNEKLYLYYLQNGRDMYVDQELDINRLSDYDVDHIVPQSFLKDDSIDNKVLTRSDKARGKSDNVPSEEVVKKMKNYWRQLLNAKLITQRKFDNLTKAERGGLSELDKAGFIKRQLVETRQITKHVAQILDSRMNTKYDENDKLIREVKVITLKSKLVSDFRKDFQFYKVREINNYHHAHDAYLNAVVGTALIKKYPKLESEFVYGDYKVYDVRKMIAKSEQEIGKATAKYFFYSNIMNFFKTEITLANGEIRKRPLIETNGETGEIVWDKGRDFATVRKVLSMPQVNIVKKTEVQTGGFSKESILPKRNSDKLIARKKDWDPKKYGGFDSPTVAYSVLVVAKVEKGKSKKLKSVKELLGITIMERSSFEKNPIDFLEAKGYKEVKKDLIIKLPKYSLFELENGRKRMLASAGELQKGNELALPSKYVNFLYLASHYEKLKGSPEDNEQKQLFVEQHKHYLDEIIEQISEFSKRVILADANLDKVLSAYNKHRDKPIREQAENIIHLFTLTNLGAPAAFKYFDTTIDRKRYTSTKEVLDATLIHQSITGLYETRIDLSQLGGDGGGSSEAAAKGGSGGTLNIEDEYRLHETSKEPDVSLGSTWLSDFPQAWAETGGMGLAVRQAPLIIPLKATSTPVSIKQYPMSQEARLGIKPHIQRLLDQGILVPCQSPWNTPLLPVKKPGTNDYRPVQDLREVNKRVEDIHPTVPNPYNLLSGLPPSHQWYTVLDLKDAFFCLRLHPTSQPLFAFEWRDPEMGISGQLTWTRLPQGFKNSPTLFNEALHRDLAGFRIQHPDLILLQYVDDLLLAATSELDCQQGTRALLQTLGDLGYRASAKKAQICQKQVKYLGYLLKEGQRWLTEARKETVMGQPIPKTPRQLREFLGKAGFCRLFIPGFAEMAAPLYPLTKPGTLFNWGPDQQKAFQEIKQALLTAPALGLPDLTKPFELFVDEKQGYAKGVLTQKLGPWRRPVAYLSKKLDPVAAGWPPCLRMVAAIAVLTKDAGKLTMGQPLVILAPHAVEALVKQPPDRWLSNARMTHYQALLLDTDRVQFGPVVALNPATLLPLPEEGLQHDCLDILAEAHGTRSDLMDQPLPDADHTWYTDGSSFLQEGQRKAGAAVTTETEVIWARALPAGTSAQRAELIALTQALKMAEGKKLNVYTDSRYAFATAHIHGEIYRRRGWLTSEGKEIKNKDEILALLKALFLPKRLSIIHCPGHQKGNSAEARGNRMADQAAREVATRETPETSTLLAGKRTADGSEFEKRTADGSEFESPKKKAKVE

SEQ ID NO: 2353 - protein, 2091 aa, synthetic construct
MPAAKRVKLDGGDKKYSIGLDIGTNSVGWAVITDEYKVPSKKFKVLGNTDRHSIKKNLIGALLFDSGETAEATRLKRTARRRYTRRKNRICYLQEIFSNEMAKVDDSFFHRLEESFLVEEDKKHERHPIFGNIVDEVAYHEKYPTIYHLRKKLVDSTDKADLRLIYLALAHMIKFRGHFLIEGDLNPDNSDVDKLFIQLVQTYNQLFEENPINASGVDAKAILSARLSKSRRLENLIAQLPGEKKNGLFGNLIALSLGLTPNFKSNFDLAEDAKLQLSKDTYDDDLDNLLAQIGDQYADLFLAAKNLSDAILLSDILRVNTEITKAPLSASMIKRYDEHHQDLTLLKALVRQQLPEKYKEIFFDQSKNGYAGYIDGGASQEEFYKFIKPILEKMDGTEELLVKLNREDLLRKQRTFDNGSIPHQIHLGELHAILRRQEDFYPFLKDNREKIEKILTFRIPYYVGPLARGNSRFAWMTRKSEETITPWNFEEVVDKGASAQSFIERMTNFDKNLPNEKVLPKHSLLYEYFTVYNELTKVKYVTEGMRKPAFLSGEQKKAIVDLLFKTNRKVTVKQLKEDYFKKIECFDSVEISGVEDRFNASLGTYHDLLKIIKDKDFLDNEENEDILEDIVLTLTLFEDREMIEERLKTYAHLFDDKVMKQLKRRRYTGWGRLSRKLINGIRDKQSGKTILDFLKSDGFANRNFMQLIHDDSLTFKEDIQKAQVSGQGDSLHEHIANLAGSPAIKKGILQTVKVVDELVKVMGRHKPENIVIEMARENQTTQKGQKNSRERMKRIEEGIKELGSQILKEHPVENTQLQNEKLYLYYLQNGRDMYVDQELDINRLSDYDVDHIVPQSFLKDDSIDNKVLTRSDKARGKSDNVPSEEVVKKMKNYWRQLLNAKLITQRKFDNLTKAERGGLSELDKAGFIKRQLVETRQITKHVAQILDSRMNTKYDENDKLIREVKVITLKSKLVSDFRKDFQFYKVREINNYHHAHDAYLNAVVGTALIKKYPKLESEFVYGDYKVYDVRKMIAKSEQEIGKATAKYFFYSNIMNFFKTEITLANGEIRKRPLIETNGETGEIVWDKGRDFATVRKVLSMPQVNIVKKTEVQTGGFSKESILPKRNSDKLIARKKDWDPKKYGGFDSPTVAYSVLVVAKVEKGKSKKLKSVKELLGITIMERSSFEKNPIDFLEAKGYKEVKKDLIIKLPKYSLFELENGRKRMLASAGELQKGNELALPSKYVNFLYLASHYEKLKGSPEDNEQKQLFVEQHKHYLDEIIEQISEFSKRVILADANLDKVLSAYNKHRDKPIREQAENIIHLFTLTNLGAPAAFKYFDTTIDRKRYTSTKEVLDATLIHQSITGLYETRIDLSQLGGDGGGGSGSSGGTLNIEDEYRLHETSKEPDVSLGSTWLSDFPQAWAETGGMGLAVRQAPLIIPLKATSTPVSIKQYPMSQEARLGIKPHIQRLLDQGILVPCQSPWNTPLLPVKKPGTNDYRPVQDLREVNKRVEDIHPTVPNPYNLLSGLPPSHQWYTVLDLKDAFFCLRLHPTSQPLFAFEWRDPEMGISGQLTWTRLPQGFKNSPTLFNEALHRDLAGFRIQHPDLILLQYVDDLLLAATSELDCQQGTRALLQTLGDLGYRASAKKAQICQKQVKYLGYLLKEGQRWLTEARKETVMGQPIPKTPRQLREFLGKAGFCRLFIPGFAEMAAPLYPLTKPGTLFNWGPDQQKAFQEIKQALLTAPALGLPDLTKPFELFVDEKQGYAKGVLTQKLGPWRRPVAYLSKKLDPVAAGWPPCLRMVAAIAVLTKDAGKLTMGQPLVILAPHAVEALVKQPPDRWLSNARMTHYQALLLDTDRVQFGPVVALNPATLLPLPEEGLQHDCLDILAEAHGTRSDLMDQPLPDADHTWYTDGSSFLQEGQRKAGAAVTTETEVIWARALPAGTSAQRAELIALTQALKMAEGKKLNVYTDSRYAFATAHIHGEIYRRRGWLTSEGKEIKNKDEILALLKALFLPKRLSIIHCPGHQKGNSAEARGNRMADQAAREVATRETPETSTLLAGKRTADGSEFEKRTADGSEFESPKKKAKVE

SEQ ID NO: 2354 - protein, 2091 aa, synthetic construct
MPAAKRVKLDGGDKKYSIGLDIGTNSVGWAVITDEYKVPSKKFKVLGNTDRHSIKKNLIGALLFDSGETAEATRLKRTARRRYTRRKNRICYLQEIFSNEMAKVDDSFFHRLEESFLVEEDKKHERHPIFGNIVDEVAYHEKYPTIYHLRKKLVDSTDKADLRLIYLALAHMIKFRGHFLIEGDLNPDNSDVDKLFIQLVQTYNQLFEENPINASGVDAKAILSARLSKSRRLENLIAQLPGEKKNGLFGNLIALSLGLTPNFKSNFDLAEDAKLQLSKDTYDDDLDNLLAQIGDQYADLFLAAKNLSDAILLSDILRVNTEITKAPLSASMIKRYDEHHQDLTLLKALVRQQLPEKYKEIFFDQSKNGYAGYIDGGASQEEFYKFIKPILEKMDGTEELLVKLNREDLLRKQRTFDNGSIPHQIHLGELHAILRRQEDFYPFLKDNREKIEKILTFRIPYYVGPLARGNSRFAWMTRKSEETITPWNFEEVVDKGASAQSFIERMTNFDKNLPNEKVLPKHSLLYEYFTVYNELTKVKYVTEGMRKPAFLSGEQKKAIVDLLFKTNRKVTVKQLKEDYFKKIECFDSVEISGVEDRFNASLGTYHDLLKIIKDKDFLDNEENEDILEDIVLTLTLFEDREMIEERLKTYAHLFDDKVMKQLKRRRYTGWGRLSRKLINGIRDKQSGKTILDFLKSDGFANRNFMQLIHDDSLTFKEDIQKAQVSGQGDSLHEHIANLAGSPAIKKGILQTVKVVDELVKVMGRHKPENIVIEMARENQTTQKGQKNSRERMKRIEEGIKELGSQILKEHPVENTQLQNEKLYLYYLQNGRDMYVDQELDINRLSDYDVDHIVPQSFLKDDSIDNKVLTRSDKARGKSDNVPSEEVVKKMKNYWRQLLNAKLITQRKFDNLTKAERGGLSELDKAGFIKRQLVETRQITKHVAQILDSRMNTKYDENDKLIREVKVITLKSKLVSDFRKDFQFYKVREINNYHHAHDAYLNAVVGTALIKKYPKLESEFVYGDYKVYDVRKMIAKSEQEIGKATAKYFFYSNIMNFFKTEITLANGEIRKRPLIETNGETGEIVWDKGRDFATVRKVLSMPQVNIVKKTEVQTGGFSKESILPKRNSDKLIARKKDWDPKKYGGFDSPTVAYSVLVVAKVEKGKSKKLKSVKELLGITIMERSSFEKNPIDFLEAKGYKEVKKDLIIKLPKYSLFELENGRKRMLASAGELQKGNELALPSKYVNFLYLASHYEKLKGSPEDNEQKQLFVEQHKHYLDEIIEQISEFSKRVILADANLDKVLSAYNKHRDKPIREQAENIIHLFTLTNLGAPAAFKYFDTTIDRKRYTSTKEVLDATLIHQSITGLYETRIDLSQLGGDGGGGGGGGGGTLNIEDEYRLHETSKEPDVSLGSTWLSDFPQAWAETGGMGLAVRQAPLIIPLKATSTPVSIKQYPMSQEARLGIKPHIQRLLDQGILVPCQSPWNTPLLPVKKPGTNDYRPVQDLREVNKRVEDIHPTVPNPYNLLSGLPPSHQWYTVLDLKDAFFCLRLHPTSQPLFAFEWRDPEMGISGQLTWTRLPQGFKNSPTLFNEALHRDLAGFRIQHPDLILLQYVDDLLLAATSELDCQQGTRALLQTLGDLGYRASAKKAQICQKQVKYLGYLLKEGQRWLTEARKETVMGQPIPKTPRQLREFLGKAGFCRLFIPGFAEMAAPLYPLTKPGTLFNWGPDQQKAFQEIKQALLTAPALGLPDLTKPFELFVDEKQGYAKGVLTQKLGPWRRPVAYLSKKLDPVAAGWPPCLRMVAAIAVLTKDAGKLTMGQPLVILAPHAVEALVKQPPDRWLSNARMTHYQALLLDTDRVQFGPVVALNPATLLPLPEEGLQHDCLDILAEAHGTRSDLMDQPLPDADHTWYTDGSSFLQEGQRKAGAAVTTETEVIWARALPAGTSAQRAELIALTQALKMAEGKKLNVYTDSRYAFATAHIHGEIYRRRGWLTSEGKEIKNKDEILALLKALFLPKRLSIIHCPGHQKGNSAEARGNRMADQAAREVATRETPETSTLLAGKRTADGSEFEKRTADGSEFESPKKKAKVE

SEQ ID NO: 2355 - protein, 2096 aa, synthetic construct
MPAAKRVKLDGGDKKYSIGLDIGTNSVGWAVITDEYKVPSKKFKVLGNTDRHSIKKNLIGALLFDSGETAEATRLKRTARRRYTRRKNRICYLQEIFSNEMAKVDDSFFHRLEESFLVEEDKKHERHPIFGNIVDEVAYHEKYPTIYHLRKKLVDSTDKADLRLIYLALAHMIKFRGHFLIEGDLNPDNSDVDKLFIQLVQTYNQLFEENPINASGVDAKAILSARLSKSRRLENLIAQLPGEKKNGLFGNLIALSLGLTPNFKSNFDLAEDAKLQLSKDTYDDDLDNLLAQIGDQYADLFLAAKNLSDAILLSDILRVNTEITKAPLSASMIKRYDEHHQDLTLLKALVRQQLPEKYKEIFFDQSKNGYAGYIDGGASQEEFYKFIKPILEKMDGTEELLVKLNREDLLRKQRTFDNGSIPHQIHLGELHAILRRQEDFYPFLKDNREKIEKILTFRIPYYVGPLARGNSRFAWMTRKSEETITPWNFEEVVDKGASAQSFIERMTNFDKNLPNEKVLPKHSLLYEYFTVYNELTKVKYVTEGMRKPAFLSGEQKKAIVDLLFKTNRKVTVKQLKEDYFKKIECFDSVEISGVEDRFNASLGTYHDLLKIIKDKDFLDNEENEDILEDIVLTLTLFEDREMIEERLKTYAHLFDDKVMKQLKRRRYTGWGRLSRKLINGIRDKQSGKTILDFLKSDGFANRNFMQLIHDDSLTFKEDIQKAQVSGQGDSLHEHIANLAGSPAIKKGILQTVKVVDELVKVMGRHKPENIVIEMARENQTTQKGQKNSRERMKRIEEGIKELGSQILKEHPVENTQLQNEKLYLYYLQNGRDMYVDQELDINRLSDYDVDHIVPQSFLKDDSIDNKVLTRSDKARGKSDNVPSEEVVKKMKNYWRQLLNAKLITQRKFDNLTKAERGGLSELDKAGFIKRQLVETRQITKHVAQILDSRMNTKYDENDKLIREVKVITLKSKLVSDFRKDFQFYKVREINNYHHAHDAYLNAVVGTALIKKYPKLESEFVYGDYKVYDVRKMIAKSEQEIGKATAKYFFYSNIMNFFKTEITLANGEIRKRPLIETNGETGEIVWDKGRDFATVRKVLSMPQVNIVKKTEVQTGGFSKESILPKRNSDKLIARKKDWDPKKYGGFDSPTVAYSVLVVAKVEKGKSKKLKSVKELLGITIMERSSFEKNPIDFLEAKGYKEVKKDLIIKLPKYSLFELENGRKRMLASAGELQKGNELALPSKYVNFLYLASHYEKLKGSPEDNEQKQLFVEQHKHYLDEIIEQISEFSKRVILADANLDKVLSAYNKHRDKPIREQAENIIHLFTLTNLGAPAAFKYFDTTIDRKRYTSTKEVLDATLIHQSITGLYETRIDLSQLGGDGGPAPGSSEAAAKGGTLNIEDEYRLHETSKEPDVSLGSTWLSDFPQAWAETGGMGLAVRQAPLIIPLKATSTPVSIKQYPMSQEARLGIKPHIQRLLDQGILVPCQSPWNTPLLPVKKPGTNDYRPVQDLREVNKRVEDIHPTVPNPYNLLSGLPPSHQWYTVLDLKDAFFCLRLHPTSQPLFAFEWRDPEMGISGQLTWTRLPQGFKNSPTLFNEALHRDLAGFRIQHPDLILLQYVDDLLLAATSELDCQQGTRALLQTLGDLGYRASAKKAQICQKQVKYLGYLLKEGQRWLTEARKETVMGQPIPKTPRQLREFLGKAGFCRLFIPGFAEMAAPLYPLTKPGTLFNWGPDQQKAFQEIKQALLTAPALGLPDLTKPFELFVDEKQGYAKGVLTQKLGPWRRPVAYLSKKLDPVAAGWPPCLRMVAAIAVLTKDAGKLTMGQPLVILAPHAVEALVKQPPDRWLSNARMTHYQALLLDTDRVQFGPVVALNPATLLPLPEEGLQHDCLDILAEAHGTRSDLMDQPLPDADHTWYTDGSSFLQEGQRKAGAAVTTETEVIWARALPAGTSAQRAELIALTQALKMAEGKKLNVYTDSRYAFATAHIHGEIYRRRGWLTSEGKEIKNKDEILALLKALFLPKRLSIIHCPGHQKGNSAEARGNRMADQAAREVATRETPETSTLLAGKRTADGSEFEKRTADGSEFESPKKKAKVE

SEQ ID NO: 2356 - protein, 2093 aa, synthetic construct
MPAAKRVKLDGGDKKYSIGLDIGTNSVGWAVITDEYKVPSKKFKVLGNTDRHSIKKNLIGALLFDSGETAEATRLKRTARRRYTRRKNRICYLQEIFSNEMAKVDDSFFHRLEESFLVEEDKKHERHPIFGNIVDEVAYHEKYPTIYHLRKKLVDSTDKADLRLIYLALAHMIKFRGHFLIEGDLNPDNSDVDKLFIQLVQTYNQLFEENPINASGVDAKAILSARLSKSRRLENLIAQLPGEKKNGLFGNLIALSLGLTPNFKSNFDLAEDAKLQLSKDTYDDDLDNLLAQIGDQYADLFLAAKNLSDAILLSDILRVNTEITKAPLSASMIKRYDEHHQDLTLLKALVRQQLPEKYKEIFFDQSKNGYAGYIDGGASQEEFYKFIKPILEKMDGTEELLVKLNREDLLRKQRTFDNGSIPHQIHLGELHAILRRQEDFYPFLKDNREKIEKILTFRIPYYVGPLARGNSRFAWMTRKSEETITPWNFEEVVDKGASAQSFIERMTNFDKNLPNEKVLPKHSLLYEYFTVYNELTKVKYVTEGMRKPAFLSGEQKKAIVDLLFKTNRKVTVKQLKEDYFKKIECFDSVEISGVEDRFNASLGTYHDLLKIIKDKDFLDNEENEDILEDIVLTLTLFEDREMIEERLKTYAHLFDDKVMKQLKRRRYTGWGRLSRKLINGIRDKQSGKTILDFLKSDGFANRNFMQLIHDDSLTFKEDIQKAQVSGQGDSLHEHIANLAGSPAIKKGILQTVKVVDELVKVMGRHKPENIVIEMARENQTTQKGQKNSRERMKRIEEGIKELGSQILKEHPVENTQLQNEKLYLYYLQNGRDMYVDQELDINRLSDYDVDHIVPQSFLKDDSIDNKVLTRSDKARGKSDNVPSEEVVKKMKNYWRQLLNAKLITQRKFDNLTKAERGGLSELDKAGFIKRQLVETRQITKHVAQILDSRMNTKYDENDKLIREVKVITLKSKLVSDFRKDFQFYKVREINNYHHAHDAYLNAVVGTALIKKYPKLESEFVYGDYKVYDVRKMIAKSEQEIGKATAKYFFYSNIMNFFKTEITLANGEIRKRPLIETNGETGEIVWDKGRDFATVRKVLSMPQVNIVKKTEVQTGGFSKESILPKRNSDKLIARKKDWDPKKYGGFDSPTVAYSVLVVAKVEKGKSKKLKSVKELLGITIMERSSFEKNPIDFLEAKGYKEVKKDLIIKLPKYSLFELENGRKRMLASAGELQKGNELALPSKYVNFLYLASHYEKLKGSPEDNEQKQLFVEQHKHYLDEIIEQISEFSKRVILADANLDKVLSAYNKHRDKPIREQAENIIHLFTLTNLGAPAAFKYFDTTIDRKRYTSTKEVLDATLIHQSITGLYETRIDLSQLGGDGGPAPEAAAKGGTLNIEDEYRLHETSKEPDVSLGSTWLSDFPQAWAETGGMGLAVRQAPLIIPLKATSTPVSIKQYPMSQEARLGIKPHIQRLLDQGILVPCQSPWNTPLLPVKKPGTNDYRPVQDLREVNKRVEDIHPTVPNPYNLLSGLPPSHQWYTVLDLKDAFFCLRLHPTSQPLFAFEWRDPEMGISGQLTWTRLPQGFKNSPTLFNEALHRDLAGFRIQHPDLILLQYVDDLLLAATSELDCQQGTRALLQTLGDLGYRASAKKAQICQKQVKYLGYLLKEGQRWLTEARKETVMGQPIPKTPRQLREFLGKAGFCRLFIPGFAEMAAPLYPLTKPGTLFNWGPDQQKAFQEIKQALLTAPALGLPDLTKPFELFVDEKQGYAKGVLTQKLGPWRRPVAYLSKKLDPVAAGWPPCLRMVAAIAVLTKDAGKLTMGQPLVILAPHAVEALVKQPPDRWLSNARMTHYQALLLDTDRVQFGPVVALNPATLLPLPEEGLQHDCLDILAEAHGTRSDLMDQPLPDADHTWYTDGSSFLQEGQRKAGAAVTTETEVIWARALPAGTSAQRAELIALTQALKMAEGKKLNVYTDSRYAFATAHIHGEIYRRRGWLTSEGKEIKNKDEILALLKALFLPKRLSIIHCPGHQKGNSAEARGNRMADQAAREVATRETPETSTLLAGKRTADGSEFEKRTADGSEFESPKKKAKVE

SEQ ID NO: 2357 - protein, 2096 aa, synthetic construct
MPAAKRVKLDGGDKKYSIGLDIGTNSVGWAVITDEYKVPSKKFKVLGNTDRHSIKKNLIGALLFDSGETAEATRLKRTARRRYTRRKNRICYLQEIFSNEMAKVDDSFFHRLEESFLVEEDKKHERHPIFGNIVDEVAYHEKYPTIYHLRKKLVDSTDKADLRLIYLALAHMIKFRGHFLIEGDLNPDNSDVDKLFIQLVQTYNQLFEENPINASGVDAKAILSARLSKSRRLENLIAQLPGEKKNGLFGNLIALSLGLTPNFKSNFDLAEDAKLQLSKDTYDDDLDNLLAQIGDQYADLFLAAKNLSDAILLSDILRVNTEITKAPLSASMIKRYDEHHQDLTLLKALVRQQLPEKYKEIFFDQSKNGYAGYIDGGASQEEFYKFIKPILEKMDGTEELLVKLNREDLLRKQRTFDNGSIPHQIHLGELHAILRRQEDFYPFLKDNREKIEKILTFRIPYYVGPLARGNSRFAWMTRKSEETITPWNFEEVVDKGASAQSFIERMTNFDKNLPNEKVLPKHSLLYEYFTVYNELTKVKYVTEGMRKPAFLSGEQKKAIVDLLFKTNRKVTVKQLKEDYFKKIECFDSVEISGVEDRFNASLGTYHDLLKIIKDKDFLDNEENEDILEDIVLTLTLFEDREMIEERLKTYAHLFDDKVMKQLKRRRYTGWGRLSRKLINGIRDKQSGKTILDFLKSDGFANRNFMQLIHDDSLTFKEDIQKAQVSGQGDSLHEHIANLAGSPAIKKGILQTVKVVDELVKVMGRHKPENIVIEMARENQTTQKGQKNSRERMKRIEEGIKELGSQILKEHPVENTQLQNEKLYLYYLQNGRDMYVDQELDINRLSDYDVDHIVPQSFLKDDSIDNKVLTRSDKARGKSDNVPSEEVVKKMKNYWRQLLNAKLITQRKFDNLTKAERGGLSELDKAGFIKRQLVETRQITKHVAQILDSRMNTKYDENDKLIREVKVITLKSKLVSDFRKDFQFYKVREINNYHHAHDAYLNAVVGTALIKKYPKLESEFVYGDYKVYDVRKMIAKSEQEIGKATAKYFFYSNIMNFFKTEITLANGEIRKRPLIETNGETGEIVWDKGRDFATVRKVLSMPQVNIVKKTEVQTGGFSKESILPKRNSDKLIARKKDWDPKKYGGFDSPTVAYSVLVVAKVEKGKSKKLKSVKELLGITIMERSSFEKNPIDFLEAKGYKEVKKDLIIKLPKYSLFELENGRKRMLASAGELQKGNELALPSKYVNFLYLASHYEKLKGSPEDNEQKQLFVEQHKHYLDEIIEQISEFSKRVILADANLDKVLSAYNKHRDKPIREQAENIIHLFTLTNLGAPAAFKYFDTTIDRKRYTSTKEVLDATLIHQSITGLYETRIDLSQLGGDGGEAAAKPAPGSSGGTLNIEDEYRLHETSKEPDVSLGSTWLSDFPQAWAETGGMGLAVRQAPLIIPLKATSTPVSIKQYPMSQEARLGIKPHIQRLLDQGILVPCQSPWNTPLLPVKKPGTNDYRPVQDLREVNKRVEDIHPTVPNPYNLLSGLPPSHQWYTVLDLKDAFFCLRLHPTSQPLFAFEWRDPEMGISGQLTWTRLPQGFKNSPTLFNEALHRDLAGFRIQHPDLILLQYVDDLLLAATSELDCQQGTRALLQTLGDLGYRASAKKAQICQKQVKYLGYLLKEGQRWLTEARKETVMGQPIPKTPRQLREFLGKAGFCRLFIPGFAEMAAPLYPLTKPGTLFNWGPDQQKAFQEIKQALLTAPALGLPDLTKPFELFVDEKQGYAKGVLTQKLGPWRRPVAYLSKKLDPVAAGWPPCLRMVAAIAVLTKDAGKLTMGQPLVILAPHAVEALVKQPPDRWLSNARMTHYQALLLDTDRVQFGPVVALNPATLLPLPEEGLQHDCLDILAEAHGTRSDLMDQPLPDADHTWYTDGSSFLQEGQRKAGAAVTTETEVIWARALPAGTSAQRAELIALTQALKMAEGKKLNVYTDSRYAFATAHIHGEIYRRRGWLTSEGKEIKNKDEILALLKALFLPKRLSIIHCPGHQKGNSAEARGNRMADQAAREVATRETPETSTLLAGKRTADGSEFEKRTADGSEFESPKKKAKVE

SEQ ID NO: 2358 - protein, 2096 aa, synthetic construct
MPAAKRVKLDGGDKKYSIGLDIGTNSVGWAVITDEYKVPSKKFKVLGNTDRHSIKKNLIGALLFDSGETAEATRLKRTARRRYTRRKNRICYLQEIFSNEMAKVDDSFFHRLEESFLVEEDKKHERHPIFGNIVDEVAYHEKYPTIYHLRKKLVDSTDKADLRLIYLALAHMIKFRGHFLIEGDLNPDNSDVDKLFIQLVQTYNQLFEENPINASGVDAKAILSARLSKSRRLENLIAQLPGEKKNGLFGNLIALSLGLTPNFKSNFDLAEDAKLQLSKDTYDDDLDNLLAQIGDQYADLFLAAKNLSDAILLSDILRVNTEITKAPLSASMIKRYDEHHQDLTLLKALVRQQLPEKYKEIFFDQSKNGYAGYIDGGASQEEFYKFIKPILEKMDGTEELLVKLNREDLLRKQRTFDNGSIPHQIHLGELHAILRRQEDFYPFLKDNREKIEKILTFRIPYYVGPLARGNSRFAWMTRKSEETITPWNFEEVVDKGASAQSFIERMTNFDKNLPNEKVLPKHSLLYEYFTVYNELTKVKYVTEGMRKPAFLSGEQKKAIVDLLFKTNRKVTVKQLKEDYFKKIECFDSVEISGVEDRFNASLGTYHDLLKIIKDKDFLDNEENEDILEDIVLTLTLFEDREMIEERLKTYAHLFDDKVMKQLKRRRYTGWGRLSRKLINGIRDKQSGKTILDFLKSDGFANRNFMQLIHDDSLTFKEDIQKAQVSGQGDSLHEHIANLAGSPAIKKGILQTVKVVDELVKVMGRHKPENIVIEMARENQTTQKGQKNSRERMKRIEEGIKELGSQILKEHPVENTQLQNEKLYLYYLQNGRDMYVDQELDINRLSDYDVDHIVPQSFLKDDSIDNKVLTRSDKARGKSDNVPSEEVVKKMKNYWRQLLNAKLITQRKFDNLTKAERGGLSELDKAGFIKRQLVETRQITKHVAQILDSRMNTKYDENDKLIREVKVITLKSKLVSDFRKDFQFYKVREINNYHHAHDAYLNAVVGTALIKKYPKLESEFVYGDYKVYDVRKMIAKSEQEIGKATAKYFFYSNIMNFFKTEITLANGEIRKRPLIETNGETGEIVWDKGRDFATVRKVLSMPQVNIVKKTEVQTGGFSKESILPKRNSDKLIARKKDWDPKKYGGFDSPTVAYSVLVVAKVEKGKSKKLKSVKELLGITIMERSSFEKNPIDFLEAKGYKEVKKDLIIKLPKYSLFELENGRKRMLASAGELQKGNELALPSKYVNFLYLASHYEKLKGSPEDNEQKQLFVEQHKHYLDEIIEQISEFSKRVILADANLDKVLSAYNKHRDKPIREQAENIIHLFTLTNLGAPAAFKYFDTTIDRKRYTSTKEVLDATLIHQSITGLYETRIDLSQLGGDGGGGSEAAAKGGGGGTLNIEDEYRLHETSKEPDVSLGSTWLSDFPQAWAETGGMGLAVRQAPLIIPLKATSTPVSIKQYPMSQEARLGIKPHIQRLLDQGILVPCQSPWNTPLLPVKKPGTNDYRPVQDLREVNKRVEDIHPTVPNPYNLLSGLPPSHQWYTVLDLKDAFFCLRLHPTSQPLFAFEWRDPEMGISGQLTWTRLPQGFKNSPTLFNEALHRDLAGFRIQHPDLILLQYVDDLLLAATSELDCQQGTRALLQTLGDLGYRASAKKAQICQKQVKYLGYLLKEGQRWLTEARKETVMGQPIPKTPRQLREFLGKAGFCRLFIPGFAEMAAPLYPLTKPGTLFNWGPDQQKAFQEIKQALLTAPALGLPDLTKPFELFVDEKQGYAKGVLTQKLGPWRRPVAYLSKKLDPVAAGWPPCLRMVAAIAVLTKDAGKLTMGQPLVILAPHAVEALVKQPPDRWLSNARMTHYQALLLDTDRVQFGPVVALNPATLLPLPEEGLQHDCLDILAEAHGTRSDLMDQPLPDADHTWYTDGSSFLQEGQRKAGAAVTTETEVIWARALPAGTSAQRAELIALTQALKMAEGKKLNVYTDSRYAFATAHIHGEIYRRRGWLTSEGKEIKNKDEILALLKALFLPKRLSIIHCPGHQKGNSAEARGNRMADQAAREVATRETPETSTLLAGKRTADGSEFEKRTADGSEFESPKKKAKVE

SEQ ID NO: 2359 - protein, 2096 aa, synthetic construct
MPAAKRVKLDGGDKKYSIGLDIGTNSVGWAVITDEYKVPSKKFKVLGNTDRHSIKKNLIGALLFDSGETAEATRLKRTARRRYTRRKNRICYLQEIFSNEMAKVDDSFFHRLEESFLVEEDKKHERHPIFGNIVDEVAYHEKYPTIYHLRKKLVDSTDKADLRLIYLALAHMIKFRGHFLIEGDLNPDNSDVDKLFIQLVQTYNQLFEENPINASGVDAKAILSARLSKSRRLENLIAQLPGEKKNGLFGNLIALSLGLTPNFKSNFDLAEDAKLQLSKDTYDDDLDNLLAQIGDQYADLFLAAKNLSDAILLSDILRVNTEITKAPLSASMIKRYDEHHQDLTLLKALVRQQLPEKYKEIFFDQSKNGYAGYIDGGASQEEFYKFIKPILEKMDGTEELLVKLNREDLLRKQRTFDNGSIPHQIHLGELHAILRRQEDFYPFLKDNREKIEKILTFRIPYYVGPLARGNSRFAWMTRKSEETITPWNFEEVVDKGASAQSFIERMTNFDKNLPNEKVLPKHSLLYEYFTVYNELTKVKYVTEGMRKPAFLSGEQKKAIVDLLFKTNRKVTVKQLKEDYFKKIECFDSVEISGVEDRFNASLGTYHDLLKIIKDKDFLDNEENEDILEDIVLTLTLFEDREMIEERLKTYAHLFDDKVMKQLKRRRYTGWGRLSRKLINGIRDKQSGKTILDFLKSDGFANRNFMQLIHDDSLTFKEDIQKAQVSGQGDSLHEHIANLAGSPAIKKGILQTVKVVDELVKVMGRHKPENIVIEMARENQTTQKGQKNSRERMKRIEEGIKELGSQILKEHPVENTQLQNEKLYLYYLQNGRDMYVDQELDINRLSDYDVDHIVPQSFLKDDSIDNKVLTRSDKARGKSDNVPSEEVVKKMKNYWRQLLNAKLITQRKFDNLTKAERGGLSELDKAGFIKRQLVETRQITKHVAQILDSRMNTKYDENDKLIREVKVITLKSKLVSDFRKDFQFYKVREINNYHHAHDAYLNAVVGTALIKKYPKLESEFVYGDYKVYDVRKMIAKSEQEIGKATAKYFFYSNIMNFFKTEITLANGEIRKRPLIETNGETGEIVWDKGRDFATVRKVLSMPQVNIVKKTEVQTGGFSKESILPKRNSDKLIARKKDWDPKKYGGFDSPTVAYSVLVVAKVEKGKSKKLKSVKELLGITIMERSSFEKNPIDFLEAKGYKEVKKDLIIKLPKYSLFELENGRKRMLASAGELQKGNELALPSKYVNFLYLASHYEKLKGSPEDNEQKQLFVEQHKHYLDEIIEQISEFSKRVILADANLDKVLSAYNKHRDKPIREQAENIIHLFTLTNLGAPAAFKYFDTTIDRKRYTSTKEVLDATLIHQSITGLYETRIDLSQLGGDGGGSSEAAAKPAPGGTLNIEDEYRLHETSKEPDVSLGSTWLSDFPQAWAETGGMGLAVRQAPLIIPLKATSTPVSIKQYPMSQEARLGIKPHIQRLLDQGILVPCQSPWNTPLLPVKKPGTNDYRPVQDLREVNKRVEDIHPTVPNPYNLLSGLPPSHQWYTVLDLKDAFFCLRLHPTSQPLFAFEWRDPEMGISGQLTWTRLPQGFKNSPTLFNEALHRDLAGFRIQHPDLILLQYVDDLLLAATSELDCQQGTRALLQTLGDLGYRASAKKAQICQKQVKYLGYLLKEGQRWLTEARKETVMGQPIPKTPRQLREFLGKAGFCRLFIPGFAEMAAPLYPLTKPGTLFNWGPDQQKAFQEIKQALLTAPALGLPDLTKPFELFVDEKQGYAKGVLTQKLGPWRRPVAYLSKKLDPVAAGWPPCLRMVAAIAVLTKDAGKLTMGQPLVILAPHAVEALVKQPPDRWLSNARMTHYQALLLDTDRVQFGPVVALNPATLLPLPEEGLQHDCLDILAEAHGTRSDLMDQPLPDADHTWYTDGSSFLQEGQRKAGAAVTTETEVIWARALPAGTSAQRAELIALTQALKMAEGKKLNVYTDSRYAFATAHIHGEIYRRRGWLTSEGKEIKNKDEILALLKALFLPKRLSIIHCPGHQKGNSAEARGNRMADQAAREVATRETPETSTLLAGKRTADGSEFEKRTADGSEFESPKKKAKVE

SEQ ID NO: 2360 - protein, 2094 aa, synthetic construct
MPAAKRVKLDGGDKKYSIGLDIGTNSVGWAVITDEYKVPSKKFKVLGNTDRHSIKKNLIGALLFDSGETAEATRLKRTARRRYTRRKNRICYLQEIFSNEMAKVDDSFFHRLEESFLVEEDKKHERHPIFGNIVDEVAYHEKYPTIYHLRKKLVDSTDKADLRLIYLALAHMIKFRGHFLIEGDLNPDNSDVDKLFIQLVQTYNQLFEENPINASGVDAKAILSARLSKSRRLENLIAQLPGEKKNGLFGNLIALSLGLTPNFKSNFDLAEDAKLQLSKDTYDDDLDNLLAQIGDQYADLFLAAKNLSDAILLSDILRVNTEITKAPLSASMIKRYDEHHQDLTLLKALVRQQLPEKYKEIFFDQSKNGYAGYIDGGASQEEFYKFIKPILEKMDGTEELLVKLNREDLLRKQRTFDNGSIPHQIHLGELHAILRRQEDFYPFLKDNREKIEKILTFRIPYYVGPLARGNSRFAWMTRKSEETITPWNFEEVVDKGASAQSFIERMTNFDKNLPNEKVLPKHSLLYEYFTVYNELTKVKYVTEGMRKPAFLSGEQKKAIVDLLFKTNRKVTVKQLKEDYFKKIECFDSVEISGVEDRFNASLGTYHDLLKIIKDKDFLDNEENEDILEDIVLTLTLFEDREMIEERLKTYAHLFDDKVMKQLKRRRYTGWGRLSRKLINGIRDKQSGKTILDFLKSDGFANRNFMQLIHDDSLTFKEDIQKAQVSGQGDSLHEHIANLAGSPAIKKGILQTVKVVDELVKVMGRHKPENIVIEMARENQTTQKGQKNSRERMKRIEEGIKELGSQILKEHPVENTQLQNEKLYLYYLQNGRDMYVDQELDINRLSDYDVDHIVPQSFLKDDSIDNKVLTRSDKARGKSDNVPSEEVVKKMKNYWRQLLNAKLITQRKFDNLTKAERGGLSELDKAGFIKRQLVETRQITKHVAQILDSRMNTKYDENDKLIREVKVITLKSKLVSDFRKDFQFYKVREINNYHHAHDAYLNAVVGTALIKKYPKLESEFVYGDYKVYDVRKMIAKSEQEIGKATAKYFFYSNIMNFFKTEITLANGEIRKRPLIETNGETGEIVWDKGRDFATVRKVLSMPQVNIVKKTEVQTGGFSKESILPKRNSDKLIARKKDWDPKKYGGFDSPTVAYSVLVVAKVEKGKSKKLKSVKELLGITIMERSSFEKNPIDFLEAKGYKEVKKDLIIKLPKYSLFELENGRKRMLASAGELQKGNELALPSKYVNFLYLASHYEKLKGSPEDNEQKQLFVEQHKHYLDEIIEQISEFSKRVILADANLDKVLSAYNKHRDKPIREQAENIIHLFTLTNLGAPAAFKYFDTTIDRKRYTSTKEVLDATLIHQSITGLYETRIDLSQLGGDGGGGSGGSGGSGGTLNIEDEYRLHETSKEPDVSLGSTWLSDFPQAWAETGGMGLAVRQAPLIIPLKATSTPVSIKQYPMSQEARLGIKPHIQRLLDQGILVPCQSPWNTPLLPVKKPGTNDYRPVQDLREVNKRVEDIHPTVPNPYNLLSGLPPSHQWYTVLDLKDAFFCLRLHPTSQPLFAFEWRDPEMGISGQLTWTRLPQGFKNSPTLFNEALHRDLAGFRIQHPDLILLQYVDDLLLAATSELDCQQGTRALLQTLGDLGYRASAKKAQICQKQVKYLGYLLKEGQRWLTEARKETVMGQPIPKTPRQLREFLGKAGFCRLFIPGFAEMAAPLYPLTKPGTLFNWGPDQQKAFQEIKQALLTAPALGLPDLTKPFELFVDEKQGYAKGVLTQKLGPWRRPVAYLSKKLDPVAAGWPPCLRMVAAIAVLTKDAGKLTMGQPLVILAPHAVEALVKQPPDRWLSNARMTHYQALLLDTDRVQFGPVVALNPATLLPLPEEGLQHDCLDILAEAHGTRSDLMDQPLPDADHTWYTDGSSFLQEGQRKAGAAVTTETEVIWARALPAGTSAQRAELIALTQALKMAEGKKLNVYTDSRYAFATAHIHGEIYRRRGWLTSEGKEIKNKDEILALLKALFLPKRLSIIHCPGHQKGNSAEARGNRMADQAAREVATRETPETSTLLAGKRTADGSEFEKRTADGSEFESPKKKAKVE

SEQ ID NO: 2361 - protein, 2095 aa, synthetic construct
MPAAKRVKLDGGDKKYSIGLDIGTNSVGWAVITDEYKVPSKKFKVLGNTDRHSIKKNLIGALLFDSGETAEATRLKRTARRRYTRRKNRICYLQEIFSNEMAKVDDSFFHRLEESFLVEEDKKHERHPIFGNIVDEVAYHEKYPTIYHLRKKLVDSTDKADLRLIYLALAHMIKFRGHFLIEGDLNPDNSDVDKLFIQLVQTYNQLFEENPINASGVDAKAILSARLSKSRRLENLIAQLPGEKKNGLFGNLIALSLGLTPNFKSNFDLAEDAKLQLSKDTYDDDLDNLLAQIGDQYADLFLAAKNLSDAILLSDILRVNTEITKAPLSASMIKRYDEHHQDLTLLKALVRQQLPEKYKEIFFDQSKNGYAGYIDGGASQEEFYKFIKPILEKMDGTEELLVKLNREDLLRKQRTFDNGSIPHQIHLGELHAILRRQEDFYPFLKDNREKIEKILTFRIPYYVGPLARGNSRFAWMTRKSEETITPWNFEEVVDKGASAQSFIERMTNFDKNLPNEKVLPKHSLLYEYFTVYNELTKVKYVTEGMRKPAFLSGEQKKAIVDLLFKTNRKVTVKQLKEDYFKKIECFDSVEISGVEDRFNASLGTYHDLLKIIKDKDFLDNEENEDILEDIVLTLTLFEDREMIEERLKTYAHLFDDKVMKQLKRRRYTGWGRLSRKLINGIRDKQSGKTILDFLKSDGFANRNFMQLIHDDSLTFKEDIQKAQVSGQGDSLHEHIANLAGSPAIKKGILQTVKVVDELVKVMGRHKPENIVIEMARENQTTQKGQKNSRERMKRIEEGIKELGSQILKEHPVENTQLQNEKLYLYYLQNGRDMYVDQELDINRLSDYDVDHIVPQSFLKDDSIDNKVLTRSDKARGKSDNVPSEEVVKKMKNYWRQLLNAKLITQRKFDNLTKAERGGLSELDKAGFIKRQLVETRQITKHVAQILDSRMNTKYDENDKLIREVKVITLKSKLVSDFRKDFQFYKVREINNYHHAHDAYLNAVVGTALIKKYPKLESEFVYGDYKVYDVRKMIAKSEQEIGKATAKYFFYSNIMNFFKTEITLANGEIRKRPLIETNGETGEIVWDKGRDFATVRKVLSMPQVNIVKKTEVQTGGFSKESILPKRNSDKLIARKKDWDPKKYGGFDSPTVAYSVLVVAKVEKGKSKKLKSVKELLGITIMERSSFEKNPIDFLEAKGYKEVKKDLIIKLPKYSLFELENGRKRMLASAGELQKGNELALPSKYVNFLYLASHYEKLKGSPEDNEQKQLFVEQHKHYLDEIIEQISEFSKRVILADANLDKVLSAYNKHRDKPIREQAENIIHLFTLTNLGAPAAFKYFDTTIDRKRYTSTKEVLDATLIHQSITGLYETRIDLSQLGGDGGEAAAKEAAAKGGTLNIEDEYRLHETSKEPDVSLGSTWLSDFPQAWAETGGMGLAVRQAPLIIPLKATSTPVSIKQYPMSQEARLGIKPHIQRLLDQGILVPCQSPWNTPLLPVKKPGTNDYRPVQDLREVNKRVEDIHPTVPNPYNLLSGLPPSHQWYTVLDLKDAFFCLRLHPTSQPLFAFEWRDPEMGISGQLTWTRLPQGFKNSPTLFNEALHRDLAGFRIQHPDLILLQYVDDLLLAATSELDCQQGTRALLQTLGDLGYRASAKKAQICQKQVKYLGYLLKEGQRWLTEARKETVMGQPIPKTPRQLREFLGKAGFCRLFIPGFAEMAAPLYPLTKPGTLFNWGPDQQKAFQEIKQALLTAPALGLPDLTKPFELFVDEKQGYAKGVLTQKLGPWRRPVAYLSKKLDPVAAGWPPCLRMVAAIAVLTKDAGKLTMGQPLVILAPHAVEALVKQPPDRWLSNARMTHYQALLLDTDRVQFGPVVALNPATLLPLPEEGLQHDCLDILAEAHGTRSDLMDQPLPDADHTWYTDGSSFLQEGQRKAGAAVTTETEVIWARALPAGTSAQRAELIALTQALKMAEGKKLNVYTDSRYAFATAHIHGEIYRRRGWLTSEGKEIKNKDEILALLKALFLPKRLSIIHCPGHQKGNSAEARGNRMADQAAREVATRETPETSTLLAGKRTADGSEFEKRTADGSEFESPKKKAKVE

SEQ ID NO: 2362 - protein, 2091 aa, synthetic construct
MPAAKRVKLDGGDKKYSIGLDIGTNSVGWAVITDEYKVPSKKFKVLGNTDRHSIKKNLIGALLFDSGETAEATRLKRTARRRYTRRKNRICYLQEIFSNEMAKVDDSFFHRLEESFLVEEDKKHERHPIFGNIVDEVAYHEKYPTIYHLRKKLVDSTDKADLRLIYLALAHMIKFRGHFLIEGDLNPDNSDVDKLFIQLVQTYNQLFEENPINASGVDAKAILSARLSKSRRLENLIAQLPGEKKNGLFGNLIALSLGLTPNFKSNFDLAEDAKLQLSKDTYDDDLDNLLAQIGDQYADLFLAAKNLSDAILLSDILRVNTEITKAPLSASMIKRYDEHHQDLTLLKALVRQQLPEKYKEIFFDQSKNGYAGYIDGGASQEEFYKFIKPILEKMDGTEELLVKLNREDLLRKQRTFDNGSIPHQIHLGELHAILRRQEDFYPFLKDNREKIEKILTFRIPYYVGPLARGNSRFAWMTRKSEETITPWNFEEVVDKGASAQSFIERMTNFDKNLPNEKVLPKHSLLYEYFTVYNELTKVKYVTEGMRKPAFLSGEQKKAIVDLLFKTNRKVTVKQLKEDYFKKIECFDSVEISGVEDRFNASLGTYHDLLKIIKDKDFLDNEENEDILEDIVLTLTLFEDREMIEERLKTYAHLFDDKVMKQLKRRRYTGWGRLSRKLINGIRDKQSGKTILDFLKSDGFANRNFMQLIHDDSLTFKEDIQKAQVSGQGDSLHEHIANLAGSPAIKKGILQTVKVVDELVKVMGRHKPENIVIEMARENQTTQKGQKNSRERMKRIEEGIKELGSQILKEHPVENTQLQNEKLYLYYLQNGRDMYVDQELDINRLSDYDVDHIVPQSFLKDDSIDNKVLTRSDKARGKSDNVPSEEVVKKMKNYWRQLLNAKLITQRKFDNLTKAERGGLSELDKAGFIKRQLVETRQITKHVAQILDSRMNTKYDENDKLIREVKVITLKSKLVSDFRKDFQFYKVREINNYHHAHDAYLNAVVGTALIKKYPKLESEFVYGDYKVYDVRKMIAKSEQEIGKATAKYFFYSNIMNFFKTEITLANGEIRKRPLIETNGETGEIVWDKGRDFATVRKVLSMPQVNIVKKTEVQTGGFSKESILPKRNSDKLIARKKDWDPKKYGGFDSPTVAYSVLVVAKVEKGKSKKLKSVKELLGITIMERSSFEKNPIDFLEAKGYKEVKKDLIIKLPKYSLFELENGRKRMLASAGELQKGNELALPSKYVNFLYLASHYEKLKGSPEDNEQKQLFVEQHKHYLDEIIEQISEFSKRVILADANLDKVLSAYNKHRDKPIREQAENIIHLFTLTNLGAPAAFKYFDTTIDRKRYTSTKEVLDATLIHQSITGLYETRIDLSQLGGDGGGSSGGGGGTLNIEDEYRLHETSKEPDVSLGSTWLSDFPQAWAETGGMGLAVRQAPLIIPLKATSTPVSIKQYPMSQEARLGIKPHIQRLLDQGILVPCQSPWNTPLLPVKKPGTNDYRPVQDLREVNKRVEDIHPTVPNPYNLLSGLPPSHQWYTVLDLKDAFFCLRLHPTSQPLFAFEWRDPEMGISGQLTWTRLPQGFKNSPTLFNEALHRDLAGFRIQHPDLILLQYVDDLLLAATSELDCQQGTRALLQTLGDLGYRASAKKAQICQKQVKYLGYLLKEGQRWLTEARKETVMGQPIPKTPRQLREFLGKAGFCRLFIPGFAEMAAPLYPLTKPGTLFNWGPDQQKAFQEIKQALLTAPALGLPDLTKPFELFVDEKQGYAKGVLTQKLGPWRRPVAYLSKKLDPVAAGWPPCLRMVAAIAVLTKDAGKLTMGQPLVILAPHAVEALVKQPPDRWLSNARMTHYQALLLDTDRVQFGPVVALNPATLLPLPEEGLQHDCLDILAEAHGTRSDLMDQPLPDADHTWYTDGSSFLQEGQRKAGAAVTTETEVIWARALPAGTSAQRAELIALTQALKMAEGKKLNVYTDSRYAFATAHIHGEIYRRRGWLTSEGKEIKNKDEILALLKALFLPKRLSIIHCPGHQKGNSAEARGNRMADQAAREVATRETPETSTLLAGKRTADGSEFEKRTADGSEFESPKKKAKVE

SEQ ID NO: 2363 - protein, 2093 aa, synthetic construct
MPAAKRVKLDGGDKKYSIGLDIGTNSVGWAVITDEYKVPSKKFKVLGNTDRHSIKKNLIGALLFDSGETAEATRLKRTARRRYTRRKNRICYLQEIFSNEMAKVDDSFFHRLEESFLVEEDKKHERHPIFGNIVDEVAYHEKYPTIYHLRKKLVDSTDKADLRLIYLALAHMIKFRGHFLIEGDLNPDNSDVDKLFIQLVQTYNQLFEENPINASGVDAKAILSARLSKSRRLENLIAQLPGEKKNGLFGNLIALSLGLTPNFKSNFDLAEDAKLQLSKDTYDDDLDNLLAQIGDQYADLFLAAKNLSDAILLSDILRVNTEITKAPLSASMIKRYDEHHQDLTLLKALVRQQLPEKYKEIFFDQSKNGYAGYIDGGASQEEFYKFIKPILEKMDGTEELLVKLNREDLLRKQRTFDNGSIPHQIHLGELHAILRRQEDFYPFLKDNREKIEKILTFRIPYYVGPLARGNSRFAWMTRKSEETITPWNFEEVVDKGASAQSFIERMTNFDKNLPNEKVLPKHSLLYEYFTVYNELTKVKYVTEGMRKPAFLSGEQKKAIVDLLFKTNRKVTVKQLKEDYFKKIECFDSVEISGVEDRFNASLGTYHDLLKIIKDKDFLDNEENEDILEDIVLTLTLFEDREMIEERLKTYAHLFDDKVMKQLKRRRYTGWGRLSRKLINGIRDKQSGKTILDFLKSDGFANRNFMQLIHDDSLTFKEDIQKAQVSGQGDSLHEHIANLAGSPAIKKGILQTVKVVDELVKVMGRHKPENIVIEMARENQTTQKGQKNSRERMKRIEEGIKELGSQILKEHPVENTQLQNEKLYLYYLQNGRDMYVDQELDINRLSDYDVDHIVPQSFLKDDSIDNKVLTRSDKARGKSDNVPSEEVVKKMKNYWRQLLNAKLITQRKFDNLTKAERGGLSELDKAGFIKRQLVETRQITKHVAQILDSRMNTKYDENDKLIREVKVITLKSKLVSDFRKDFQFYKVREINNYHHAHDAYLNAVVGTALIKKYPKLESEFVYGDYKVYDVRKMIAKSEQEIGKATAKYFFYSNIMNFFKTEITLANGEIRKRPLIETNGETGEIVWDKGRDFATVRKVLSMPQVNIVKKTEVQTGGFSKESILPKRNSDKLIARKKDWDPKKYGGFDSPTVAYSVLVVAKVEKGKSKKLKSVKELLGITIMERSSFEKNPIDFLEAKGYKEVKKDLIIKLPKYSLFELENGRKRMLASAGELQKGNELALPSKYVNFLYLASHYEKLKGSPEDNEQKQLFVEQHKHYLDEIIEQISEFSKRVILADANLDKVLSAYNKHRDKPIREQAENIIHLFTLTNLGAPAAFKYFDTTIDRKRYTSTKEVLDATLIHQSITGLYETRIDLSQLGGDGGGGSEAAAKGGTLNIEDEYRLHETSKEPDVSLGSTWLSDFPQAWAETGGMGLAVRQAPLIIPLKATSTPVSIKQYPMSQEARLGIKPHIQRLLDQGILVPCQSPWNTPLLPVKKPGTNDYRPVQDLREVNKRVEDIHPTVPNPYNLLSGLPPSHQWYTVLDLKDAFFCLRLHPTSQPLFAFEWRDPEMGISGQLTWTRLPQGFKNSPTLFNEALHRDLAGFRIQHPDLILLQYVDDLLLAATSELDCQQGTRALLQTLGDLGYRASAKKAQICQKQVKYLGYLLKEGQRWLTEARKETVMGQPIPKTPRQLREFLGKAGFCRLFIPGFAEMAAPLYPLTKPGTLFNWGPDQQKAFQEIKQALLTAPALGLPDLTKPFELFVDEKQGYAKGVLTQKLGPWRRPVAYLSKKLDPVAAGWPPCLRMVAAIAVLTKDAGKLTMGQPLVILAPHAVEALVKQPPDRWLSNARMTHYQALLLDTDRVQFGPVVALNPATLLPLPEEGLQHDCLDILAEAHGTRSDLMDQPLPDADHTWYTDGSSFLQEGQRKAGAAVTTETEVIWARALPAGTSAQRAELIALTQALKMAEGKKLNVYTDSRYAFATAHIHGEIYRRRGWLTSEGKEIKNKDEILALLKALFLPKRLSIIHCPGHQKGNSAEARGNRMADQAAREVATRETPETSTLLAGKRTADGSEFEKRTADGSEFESPKKKAKVE

SEQ ID NO: 2364 - protein, 2090 aa, synthetic construct
MPAAKRVKLDGGDKKYSIGLDIGTNSVGWAVITDEYKVPSKKFKVLGNTDRHSIKKNLIGALLFDSGETAEATRLKRTARRRYTRRKNRICYLQEIFSNEMAKVDDSFFHRLEESFLVEEDKKHERHPIFGNIVDEVAYHEKYPTIYHLRKKLVDSTDKADLRLIYLALAHMIKFRGHFLIEGDLNPDNSDVDKLFIQLVQTYNQLFEENPINASGVDAKAILSARLSKSRRLENLIAQLPGEKKNGLFGNLIALSLGLTPNFKSNFDLAEDAKLQLSKDTYDDDLDNLLAQIGDQYADLFLAAKNLSDAILLSDILRVNTEITKAPLSASMIKRYDEHHQDLTLLKALVRQQLPEKYKEIFFDQSKNGYAGYIDGGASQEEFYKFIKPILEKMDGTEELLVKLNREDLLRKQRTFDNGSIPHQIHLGELHAILRRQEDFYPFLKDNREKIEKILTFRIPYYVGPLARGNSRFAWMTRKSEETITPWNFEEVVDKGASAQSFIERMTNFDKNLPNEKVLPKHSLLYEYFTVYNELTKVKYVTEGMRKPAFLSGEQKKAIVDLLFKTNRKVTVKQLKEDYFKKIECFDSVEISGVEDRFNASLGTYHDLLKIIKDKDFLDNEENEDILEDIVLTLTLFEDREMIEERLKTYAHLFDDKVMKQLKRRRYTGWGRLSRKLINGIRDKQSGKTILDFLKSDGFANRNFMQLIHDDSLTFKEDIQKAQVSGQGDSLHEHIANLAGSPAIKKGILQTVKVVDELVKVMGRHKPENIVIEMARENQTTQKGQKNSRERMKRIEEGIKELGSQILKEHPVENTQLQNEKLYLYYLQNGRDMYVDQELDINRLSDYDVDHIVPQSFLKDDSIDNKVLTRSDKARGKSDNVPSEEVVKKMKNYWRQLLNAKLITQRKFDNLTKAERGGLSELDKAGFIKRQLVETRQITKHVAQILDSRMNTKYDENDKLIREVKVITLKSKLVSDFRKDFQFYKVREINNYHHAHDAYLNAVVGTALIKKYPKLESEFVYGDYKVYDVRKMIAKSEQEIGKATAKYFFYSNIMNFFKTEITLANGEIRKRPLIETNGETGEIVWDKGRDFATVRKVLSMPQVNIVKKTEVQTGGFSKESILPKRNSDKLIARKKDWDPKKYGGFDSPTVAYSVLVVAKVEKGKSKKLKSVKELLGITIMERSSFEKNPIDFLEAKGYKEVKKDLIIKLPKYSLFELENGRKRMLASAGELQKGNELALPSKYVNFLYLASHYEKLKGSPEDNEQKQLFVEQHKHYLDEIIEQISEFSKRVILADANLDKVLSAYNKHRDKPIREQAENIIHLFTLTNLGAPAAFKYFDTTIDRKRYTSTKEVLDATLIHQSITGLYETRIDLSQLGGDGGPAPAPGGTLNIEDEYRLHETSKEPDVSLGSTWLSDFPQAWAETGGMGLAVRQAPLIIPLKATSTPVSIKQYPMSQEARLGIKPHIQRLLDQGILVPCQSPWNTPLLPVKKPGTNDYRPVQDLREVNKRVEDIHPTVPNPYNLLSGLPPSHQWYTVLDLKDAFFCLRLHPTSQPLFAFEWRDPEMGISGQLTWTRLPQGFKNSPTLFNEALHRDLAGFRIQHPDLILLQYVDDLLLAATSELDCQQGTRALLQTLGDLGYRASAKKAQICQKQVKYLGYLLKEGQRWLTEARKETVMGQPIPKTPRQLREFLGKAGFCRLFIPGFAEMAAPLYPLTKPGTLFNWGPDQQKAFQEIKQALLTAPALGLPDLTKPFELFVDEKQGYAKGVLTQKLGPWRRPVAYLSKKLDPVAAGWPPCLRMVAAIAVLTKDAGKLTMGQPLVILAPHAVEALVKQPPDRWLSNARMTHYQALLLDTDRVQFGPVVALNPATLLPLPEEGLQHDCLDILAEAHGTRSDLMDQPLPDADHTWYTDGSSFLQEGQRKAGAAVTTETEVIWARALPAGTSAQRAELIALTQALKMAEGKKLNVYTDSRYAFATAHIHGEIYRRRGWLTSEGKEIKNKDEILALLKALFLPKRLSIIHCPGHQKGNSAEARGNRMADQAAREVATRETPETSTLLAGKRTADGSEFEKRTADGSEFESPKKKAKVE

SEQ ID NO: 2365 - protein, 2094 aa, synthetic construct
MPAAKRVKLDGGDKKYSIGLDIGTNSVGWAVITDEYKVPSKKFKVLGNTDRHSIKKNLIGALLFDSGETAEATRLKRTARRRYTRRKNRICYLQEIFSNEMAKVDDSFFHRLEESFLVEEDKKHERHPIFGNIVDEVAYHEKYPTIYHLRKKLVDSTDKADLRLIYLALAHMIKFRGHFLIEGDLNPDNSDVDKLFIQLVQTYNQLFEENPINASGVDAKAILSARLSKSRRLENLIAQLPGEKKNGLFGNLIALSLGLTPNFKSNFDLAEDAKLQLSKDTYDDDLDNLLAQIGDQYADLFLAAKNLSDAILLSDILRVNTEITKAPLSASMIKRYDEHHQDLTLLKALVRQQLPEKYKEIFFDQSKNGYAGYIDGGASQEEFYKFIKPILEKMDGTEELLVKLNREDLLRKQRTFDNGSIPHQIHLGELHAILRRQEDFYPFLKDNREKIEKILTFRIPYYVGPLARGNSRFAWMTRKSEETITPWNFEEVVDKGASAQSFIERMTNFDKNLPNEKVLPKHSLLYEYFTVYNELTKVKYVTEGMRKPAFLSGEQKKAIVDLLFKTNRKVTVKQLKEDYFKKIECFDSVEISGVEDRFNASLGTYHDLLKIIKDKDFLDNEENEDILEDIVLTLTLFEDREMIEERLKTYAHLFDDKVMKQLKRRRYTGWGRLSRKLINGIRDKQSGKTILDFLKSDGFANRNFMQLIHDDSLTFKEDIQKAQVSGQGDSLHEHIANLAGSPAIKKGILQTVKVVDELVKVMGRHKPENIVIEMARENQTTQKGQKNSRERMKRIEEGIKELGSQILKEHPVENTQLQNEKLYLYYLQNGRDMYVDQELDINRLSDYDVDHIVPQSFLKDDSIDNKVLTRSDKARGKSDNVPSEEVVKKMKNYWRQLLNAKLITQRKFDNLTKAERGGLSELDKAGFIKRQLVETRQITKHVAQILDSRMNTKYDENDKLIREVKVITLKSKLVSDFRKDFQFYKVREINNYHHAHDAYLNAVVGTALIKKYPKLESEFVYGDYKVYDVRKMIAKSEQEIGKATAKYFFYSNIMNFFKTEITLANGEIRKRPLIETNGETGEIVWDKGRDFATVRKVLSMPQVNIVKKTEVQTGGFSKESILPKRNSDKLIARKKDWDPKKYGGFDSPTVAYSVLVVAKVEKGKSKKLKSVKELLGITIMERSSFEKNPIDFLEAKGYKEVKKDLIIKLPKYSLFELENGRKRMLASAGELQKGNELALPSKYVNFLYLASHYEKLKGSPEDNEQKQLFVEQHKHYLDEIIEQISEFSKRVILADANLDKVLSAYNKHRDKPIREQAENIIHLFTLTNLGAPAAFKYFDTTIDRKRYTSTKEVLDATLIHQSITGLYETRIDLSQLGGDGGGGSPAPGGGGGTLNIEDEYRLHETSKEPDVSLGSTWLSDFPQAWAETGGMGLAVRQAPLIIPLKATSTPVSIKQYPMSQEARLGIKPHIQRLLDQGILVPCQSPWNTPLLPVKKPGTNDYRPVQDLREVNKRVEDIHPTVPNPYNLLSGLPPSHQWYTVLDLKDAFFCLRLHPTSQPLFAFEWRDPEMGISGQLTWTRLPQGFKNSPTLFNEALHRDLAGFRIQHPDLILLQYVDDLLLAATSELDCQQGTRALLQTLGDLGYRASAKKAQICQKQVKYLGYLLKEGQRWLTEARKETVMGQPIPKTPRQLREFLGKAGFCRLFIPGFAEMAAPLYPLTKPGTLFNWGPDQQKAFQEIKQALLTAPALGLPDLTKPFELFVDEKQGYAKGVLTQKLGPWRRPVAYLSKKLDPVAAGWPPCLRMVAAIAVLTKDAGKLTMGQPLVILAPHAVEALVKQPPDRWLSNARMTHYQALLLDTDRVQFGPVVALNPATLLPLPEEGLQHDCLDILAEAHGTRSDLMDQPLPDADHTWYTDGSSFLQEGQRKAGAAVTTETEVIWARALPAGTSAQRAELIALTQALKMAEGKKLNVYTDSRYAFATAHIHGEIYRRRGWLTSEGKEIKNKDEILALLKALFLPKRLSIIHCPGHQKGNSAEARGNRMADQAAREVATRETPETSTLLAGKRTADGSEFEKRTADGSEFESPKKKAKVE

SEQ ID NO: 2366 - protein, 2091 aa, synthetic construct
MPAAKRVKLDGGDKKYSIGLDIGTNSVGWAVITDEYKVPSKKFKVLGNTDRHSIKKNLIGALLFDSGETAEATRLKRTARRRYTRRKNRICYLQEIFSNEMAKVDDSFFHRLEESFLVEEDKKHERHPIFGNIVDEVAYHEKYPTIYHLRKKLVDSTDKADLRLIYLALAHMIKFRGHFLIEGDLNPDNSDVDKLFIQLVQTYNQLFEENPINASGVDAKAILSARLSKSRRLENLIAQLPGEKKNGLFGNLIALSLGLTPNFKSNFDLAEDAKLQLSKDTYDDDLDNLLAQIGDQYADLFLAAKNLSDAILLSDILRVNTEITKAPLSASMIKRYDEHHQDLTLLKALVRQQLPEKYKEIFFDQSKNGYAGYIDGGASQEEFYKFIKPILEKMDGTEELLVKLNREDLLRKQRTFDNGSIPHQIHLGELHAILRRQEDFYPFLKDNREKIEKILTFRIPYYVGPLARGNSRFAWMTRKSEETITPWNFEEVVDKGASAQSFIERMTNFDKNLPNEKVLPKHSLLYEYFTVYNELTKVKYVTEGMRKPAFLSGEQKKAIVDLLFKTNRKVTVKQLKEDYFKKIECFDSVEISGVEDRFNASLGTYHDLLKIIKDKDFLDNEENEDILEDIVLTLTLFEDREMIEERLKTYAHLFDDKVMKQLKRRRYTGWGRLSRKLINGIRDKQSGKTILDFLKSDGFANRNFMQLIHDDSLTFKEDIQKAQVSGQGDSLHEHIANLAGSPAIKKGILQTVKVVDELVKVMGRHKPENIVIEMARENQTTQKGQKNSRERMKRIEEGIKELGSQILKEHPVENTQLQNEKLYLYYLQNGRDMYVDQELDINRLSDYDVDHIVPQSFLKDDSIDNKVLTRSDKARGKSDNVPSEEVVKKMKNYWRQLLNAKLITQRKFDNLTKAERGGLSELDKAGFIKRQLVETRQITKHVAQILDSRMNTKYDENDKLIREVKVITLKSKLVSDFRKDFQFYKVREINNYHHAHDAYLNAVVGTALIKKYPKLESEFVYGDYKVYDVRKMIAKSEQEIGKATAKYFFYSNIMNFFKTEITLANGEIRKRPLIETNGETGEIVWDKGRDFATVRKVLSMPQVNIVKKTEVQTGGFSKESILPKRNSDKLIARKKDWDPKKYGGFDSPTVAYSVLVVAKVEKGKSKKLKSVKELLGITIMERSSFEKNPIDFLEAKGYKEVKKDLIIKLPKYSLFELENGRKRMLASAGELQKGNELALPSKYVNFLYLASHYEKLKGSPEDNEQKQLFVEQHKHYLDEIIEQISEFSKRVILADANLDKVLSAYNKHRDKPIREQAENIIHLFTLTNLGAPAAFKYFDTTIDRKRYTSTKEVLDATLIHQSITGLYETRIDLSQLGGDGGGSSPAPGGTLNIEDEYRLHETSKEPDVSLGSTWLSDFPQAWAETGGMGLAVRQAPLIIPLKATSTPVSIKQYPMSQEARLGIKPHIQRLLDQGILVPCQSPWNTPLLPVKKPGTNDYRPVQDLREVNKRVEDIHPTVPNPYNLLSGLPPSHQWYTVLDLKDAFFCLRLHPTSQPLFAFEWRDPEMGISGQLTWTRLPQGFKNSPTLFNEALHRDLAGFRIQHPDLILLQYVDDLLLAATSELDCQQGTRALLQTLGDLGYRASAKKAQICQKQVKYLGYLLKEGQRWLTEARKETVMGQPIPKTPRQLREFLGKAGFCRLFIPGFAEMAAPLYPLTKPGTLFNWGPDQQKAFQEIKQALLTAPALGLPDLTKPFELFVDEKQGYAKGVLTQKLGPWRRPVAYLSKKLDPVAAGWPPCLRMVAAIAVLTKDAGKLTMGQPLVILAPHAVEALVKQPPDRWLSNARMTHYQALLLDTDRVQFGPVVALNPATLLPLPEEGLQHDCLDILAEAHGTRSDLMDQPLPDADHTWYTDGSSFLQEGQRKAGAAVTTETEVIWARALPAGTSAQRAELIALTQALKMAEGKKLNVYTDSRYAFATAHIHGEIYRRRGWLTSEGKEIKNKDEILALLKALFLPKRLSIIHCPGHQKGNSAEARGNRMADQAAREVATRETPETSTLLAGKRTADGSEFEKRTADGSEFESPKKKAKVE

SEQ ID NO: 2367 - protein, 2096 aa, synthetic construct
MPAAKRVKLDGGDKKYSIGLDIGTNSVGWAVITDEYKVPSKKFKVLGNTDRHSIKKNLIGALLFDSGETAEATRLKRTARRRYTRRKNRICYLQEIFSNEMAKVDDSFFHRLEESFLVEEDKKHERHPIFGNIVDEVAYHEKYPTIYHLRKKLVDSTDKADLRLIYLALAHMIKFRGHFLIEGDLNPDNSDVDKLFIQLVQTYNQLFEENPINASGVDAKAILSARLSKSRRLENLIAQLPGEKKNGLFGNLIALSLGLTPNFKSNFDLAEDAKLQLSKDTYDDDLDNLLAQIGDQYADLFLAAKNLSDAILLSDILRVNTEITKAPLSASMIKRYDEHHQDLTLLKALVRQQLPEKYKEIFFDQSKNGYAGYIDGGASQEEFYKFIKPILEKMDGTEELLVKLNREDLLRKQRTFDNGSIPHQIHLGELHAILRRQEDFYPFLKDNREKIEKILTFRIPYYVGPLARGNSRFAWMTRKSEETITPWNFEEVVDKGASAQSFIERMTNFDKNLPNEKVLPKHSLLYEYFTVYNELTKVKYVTEGMRKPAFLSGEQKKAIVDLLFKTNRKVTVKQLKEDYFKKIECFDSVEISGVEDRFNASLGTYHDLLKIIKDKDFLDNEENEDILEDIVLTLTLFEDREMIEERLKTYAHLFDDKVMKQLKRRRYTGWGRLSRKLINGIRDKQSGKTILDFLKSDGFANRNFMQLIHDDSLTFKEDIQKAQVSGQGDSLHEHIANLAGSPAIKKGILQTVKVVDELVKVMGRHKPENIVIEMARENQTTQKGQKNSRERMKRIEEGIKELGSQILKEHPVENTQLQNEKLYLYYLQNGRDMYVDQELDINRLSDYDVDHIVPQSFLKDDSIDNKVLTRSDKARGKSDNVPSEEVVKKMKNYWRQLLNAKLITQRKFDNLTKAERGGLSELDKAGFIKRQLVETRQITKHVAQILDSRMNTKYDENDKLIREVKVITLKSKLVSDFRKDFQFYKVREINNYHHAHDAYLNAVVGTALIKKYPKLESEFVYGDYKVYDVRKMIAKSEQEIGKATAKYFFYSNIMNFFKTEITLANGEIRKRPLIETNGETGEIVWDKGRDFATVRKVLSMPQVNIVKKTEVQTGGFSKESILPKRNSDKLIARKKDWDPKKYGGFDSPTVAYSVLVVAKVEKGKSKKLKSVKELLGITIMERSSFEKNPIDFLEAKGYKEVKKDLIIKLPKYSLFELENGRKRMLASAGELQKGNELALPSKYVNFLYLASHYEKLKGSPEDNEQKQLFVEQHKHYLDEIIEQISEFSKRVILADANLDKVLSAYNKHRDKPIREQAENIIHLFTLTNLGAPAAFKYFDTTIDRKRYTSTKEVLDATLIHQSITGLYETRIDLSQLGGDGGEAAAKGSSGGGGGTLNIEDEYRLHETSKEPDVSLGSTWLSDFPQAWAETGGMGLAVRQAPLIIPLKATSTPVSIKQYPMSQEARLGIKPHIQRLLDQGILVPCQSPWNTPLLPVKKPGTNDYRPVQDLREVNKRVEDIHPTVPNPYNLLSGLPPSHQWYTVLDLKDAFFCLRLHPTSQPLFAFEWRDPEMGISGQLTWTRLPQGFKNSPTLFNEALHRDLAGFRIQHPDLILLQYVDDLLLAATSELDCQQGTRALLQTLGDLGYRASAKKAQICQKQVKYLGYLLKEGQRWLTEARKETVMGQPIPKTPRQLREFLGKAGFCRLFIPGFAEMAAPLYPLTKPGTLFNWGPDQQKAFQEIKQALLTAPALGLPDLTKPFELFVDEKQGYAKGVLTQKLGPWRRPVAYLSKKLDPVAAGWPPCLRMVAAIAVLTKDAGKLTMGQPLVILAPHAVEALVKQPPDRWLSNARMTHYQALLLDTDRVQFGPVVALNPATLLPLPEEGLQHDCLDILAEAHGTRSDLMDQPLPDADHTWYTDGSSFLQEGQRKAGAAVTTETEVIWARALPAGTSAQRAELIALTQALKMAEGKKLNVYTDSRYAFATAHIHGEIYRRRGWLTSEGKEIKNKDEILALLKALFLPKRLSIIHCPGHQKGNSAEARGNRMADQAAREVATRETPETSTLLAGKRTADGSEFEKRTADGSEFESPKKKAKVE

SEQ ID NO: 2368 - protein, 2096 aa, synthetic construct
MPAAKRVKLDGGDKKYSIGLDIGTNSVGWAVITDEYKVPSKKFKVLGNTDRHSIKKNLIGALLFDSGETAEATRLKRTARRRYTRRKNRICYLQEIFSNEMAKVDDSFFHRLEESFLVEEDKKHERHPIFGNIVDEVAYHEKYPTIYHLRKKLVDSTDKADLRLIYLALAHMIKFRGHFLIEGDLNPDNSDVDKLFIQLVQTYNQLFEENPINASGVDAKAILSARLSKSRRLENLIAQLPGEKKNGLFGNLIALSLGLTPNFKSNFDLAEDAKLQLSKDTYDDDLDNLLAQIGDQYADLFLAAKNLSDAILLSDILRVNTEITKAPLSASMIKRYDEHHQDLTLLKALVRQQLPEKYKEIFFDQSKNGYAGYIDGGASQEEFYKFIKPILEKMDGTEELLVKLNREDLLRKQRTFDNGSIPHQIHLGELHAILRRQEDFYPFLKDNREKIEKILTFRIPYYVGPLARGNSRFAWMTRKSEETITPWNFEEVVDKGASAQSFIERMTNFDKNLPNEKVLPKHSLLYEYFTVYNELTKVKYVTEGMRKPAFLSGEQKKAIVDLLFKTNRKVTVKQLKEDYFKKIECFDSVEISGVEDRFNASLGTYHDLLKIIKDKDFLDNEENEDILEDIVLTLTLFEDREMIEERLKTYAHLFDDKVMKQLKRRRYTGWGRLSRKLINGIRDKQSGKTILDFLKSDGFANRNFMQLIHDDSLTFKEDIQKAQVSGQGDSLHEHIANLAGSPAIKKGILQTVKVVDELVKVMGRHKPENIVIEMARENQTTQKGQKNSRERMKRIEEGIKELGSQILKEHPVENTQLQNEKLYLYYLQNGRDMYVDQELDINRLSDYDVDHIVPQSFLKDDSIDNKVLTRSDKARGKSDNVPSEEVVKKMKNYWRQLLNAKLITQRKFDNLTKAERGGLSELDKAGFIKRQLVETRQITKHVAQILDSRMNTKYDENDKLIREVKVITLKSKLVSDFRKDFQFYKVREINNYHHAHDAYLNAVVGTALIKKYPKLESEFVYGDYKVYDVRKMIAKSEQEIGKATAKYFFYSNIMNFFKTEITLANGEIRKRPLIETNGETGEIVWDKGRDFATVRKVLSMPQVNIVKKTEVQTGGFSKESILPKRNSDKLIARKKDWDPKKYGGFDSPTVAYSVLVVAKVEKGKSKKLKSVKELLGITIMERSSFEKNPIDFLEAKGYKEVKKDLIIKLPKYSLFELENGRKRMLASAGELQKGNELALPSKYVNFLYLASHYEKLKGSPEDNEQKQLFVEQHKHYLDEIIEQISEFSKRVILADANLDKVLSAYNKHRDKPIREQAENIIHLFTLTNLGAPAAFKYFDTTIDRKRYTSTKEVLDATLIHQSITGLYETRIDLSQLGGDGGEAAAKGSSGGSGGTLNIEDEYRLHETSKEPDVSLGSTWLSDFPQAWAETGGMGLAVRQAPLIIPLKATSTPVSIKQYPMSQEARLGIKPHIQRLLDQGILVPCQSPWNTPLLPVKKPGTNDYRPVQDLREVNKRVEDIHPTVPNPYNLLSGLPPSHQWYTVLDLKDAFFCLRLHPTSQPLFAFEWRDPEMGISGQLTWTRLPQGFKNSPTLFNEALHRDLAGFRIQHPDLILLQYVDDLLLAATSELDCQQGTRALLQTLGDLGYRASAKKAQICQKQVKYLGYLLKEGQRWLTEARKETVMGQPIPKTPRQLREFLGKAGFCRLFIPGFAEMAAPLYPLTKPGTLFNWGPDQQKAFQEIKQALLTAPALGLPDLTKPFELFVDEKQGYAKGVLTQKLGPWRRPVAYLSKKLDPVAAGWPPCLRMVAAIAVLTKDAGKLTMGQPLVILAPHAVEALVKQPPDRWLSNARMTHYQALLLDTDRVQFGPVVALNPATLLPLPEEGLQHDCLDILAEAHGTRSDLMDQPLPDADHTWYTDGSSFLQEGQRKAGAAVTTETEVIWARALPAGTSAQRAELIALTQALKMAEGKKLNVYTDSRYAFATAHIHGEIYRRRGWLTSEGKEIKNKDEILALLKALFLPKRLSIIHCPGHQKGNSAEARGNRMADQAAREVATRETPETSTLLAGKRTADGSEFEKRTADGSEFESPKKKAKVE

SEQ ID NO: 2369 - protein, 2095 aa, synthetic construct
MPAAKRVKLDGGDKKYSIGLDIGTNSVGWAVITDEYKVPSKKFKVLGNTDRHSIKKNLIGALLFDSGETAEATRLKRTARRRYTRRKNRICYLQEIFSNEMAKVDDSFFHRLEESFLVEEDKKHERHPIFGNIVDEVAYHEKYPTIYHLRKKLVDSTDKADLRLIYLALAHMIKFRGHFLIEGDLNPDNSDVDKLFIQLVQTYNQLFEENPINASGVDAKAILSARLSKSRRLENLIAQLPGEKKNGLFGNLIALSLGLTPNFKSNFDLAEDAKLQLSKDTYDDDLDNLLAQIGDQYADLFLAAKNLSDAILLSDILRVNTEITKAPLSASMIKRYDEHHQDLTLLKALVRQQLPEKYKEIFFDQSKNGYAGYIDGGASQEEFYKFIKPILEKMDGTEELLVKLNREDLLRKQRTFDNGSIPHQIHLGELHAILRRQEDFYPFLKDNREKIEKILTFRIPYYVGPLARGNSRFAWMTRKSEETITPWNFEEVVDKGASAQSFIERMTNFDKNLPNEKVLPKHSLLYEYFTVYNELTKVKYVTEGMRKPAFLSGEQKKAIVDLLFKTNRKVTVKQLKEDYFKKIECFDSVEISGVEDRFNASLGTYHDLLKIIKDKDFLDNEENEDILEDIVLTLTLFEDREMIEERLKTYAHLFDDKVMKQLKRRRYTGWGRLSRKLINGIRDKQSGKTILDFLKSDGFANRNFMQLIHDDSLTFKEDIQKAQVSGQGDSLHEHIANLAGSPAIKKGILQTVKVVDELVKVMGRHKPENIVIEMARENQTTQKGQKNSRERMKRIEEGIKELGSQILKEHPVENTQLQNEKLYLYYLQNGRDMYVDQELDINRLSDYDVDHIVPQSFLKDDSIDNKVLTRSDKARGKSDNVPSEEVVKKMKNYWRQLLNAKLITQRKFDNLTKAERGGLSELDKAGFIKRQLVETRQITKHVAQILDSRMNTKYDENDKLIREVKVITLKSKLVSDFRKDFQFYKVREINNYHHAHDAYLNAVVGTALIKKYPKLESEFVYGDYKVYDVRKMIAKSEQEIGKATAKYFFYSNIMNFFKTEITLANGEIRKRPLIETNGETGEIVWDKGRDFATVRKVLSMPQVNIVKKTEVQTGGFSKESILPKRNSDKLIARKKDWDPKKYGGFDSPTVAYSVLVVAKVEKGKSKKLKSVKELLGITIMERSSFEKNPIDFLEAKGYKEVKKDLIIKLPKYSLFELENGRKRMLASAGELQKGNELALPSKYVNFLYLASHYEKLKGSPEDNEQKQLFVEQHKHYLDEIIEQISEFSKRVILADANLDKVLSAYNKHRDKPIREQAENIIHLFTLTNLGAPAAFKYFDTTIDRKRYTSTKEVLDATLIHQSITGLYETRIDLSQLGGDGGGGGGSGGGGSGGTLNIEDEYRLHETSKEPDVSLGSTWLSDFPQAWAETGGMGLAVRQAPLIIPLKATSTPVSIKQYPMSQEARLGIKPHIQRLLDQGILVPCQSPWNTPLLPVKKPGTNDYRPVQDLREVNKRVEDIHPTVPNPYNLLSGLPPSHQWYTVLDLKDAFFCLRLHPTSQPLFAFEWRDPEMGISGQLTWTRLPQGFKNSPTLFNEALHRDLAGFRIQHPDLILLQYVDDLLLAATSELDCQQGTRALLQTLGDLGYRASAKKAQICQKQVKYLGYLLKEGQRWLTEARKETVMGQPIPKTPRQLREFLGKAGFCRLFIPGFAEMAAPLYPLTKPGTLFNWGPDQQKAFQEIKQALLTAPALGLPDLTKPFELFVDEKQGYAKGVLTQKLGPWRRPVAYLSKKLDPVAAGWPPCLRMVAAIAVLTKDAGKLTMGQPLVILAPHAVEALVKQPPDRWLSNARMTHYQALLLDTDRVQFGPVVALNPATLLPLPEEGLQHDCLDILAEAHGTRSDLMDQPLPDADHTWYTDGSSFLQEGQRKAGAAVTTETEVIWARALPAGTSAQRAELIALTQALKMAEGKKLNVYTDSRYAFATAHIHGEIYRRRGWLTSEGKEIKNKDEILALLKALFLPKRLSIIHCPGHQKGNSAEARGNRMADQAAREVATRETPETSTLLAGKRTADGSEFEKRTADGSEFESPKKKAKVE

SEQ ID NO: 2370 - protein, 2096 aa, synthetic construct
MPAAKRVKLDGGDKKYSIGLDIGTNSVGWAVITDEYKVPSKKFKVLGNTDRHSIKKNLIGALLFDSGETAEATRLKRTARRRYTRRKNRICYLQEIFSNEMAKVDDSFFHRLEESFLVEEDKKHERHPIFGNIVDEVAYHEKYPTIYHLRKKLVDSTDKADLRLIYLALAHMIKFRGHFLIEGDLNPDNSDVDKLFIQLVQTYNQLFEENPINASGVDAKAILSARLSKSRRLENLIAQLPGEKKNGLFGNLIALSLGLTPNFKSNFDLAEDAKLQLSKDTYDDDLDNLLAQIGDQYADLFLAAKNLSDAILLSDILRVNTEITKAPLSASMIKRYDEHHQDLTLLKALVRQQLPEKYKEIFFDQSKNGYAGYIDGGASQEEFYKFIKPILEKMDGTEELLVKLNREDLLRKQRTFDNGSIPHQIHLGELHAILRRQEDFYPFLKDNREKIEKILTFRIPYYVGPLARGNSRFAWMTRKSEETITPWNFEEVVDKGASAQSFIERMTNFDKNLPNEKVLPKHSLLYEYFTVYNELTKVKYVTEGMRKPAFLSGEQKKAIVDLLFKTNRKVTVKQLKEDYFKKIECFDSVEISGVEDRFNASLGTYHDLLKIIKDKDFLDNEENEDILEDIVLTLTLFEDREMIEERLKTYAHLFDDKVMKQLKRRRYTGWGRLSRKLINGIRDKQSGKTILDFLKSDGFANRNFMQLIHDDSLTFKEDIQKAQVSGQGDSLHEHIANLAGSPAIKKGILQTVKVVDELVKVMGRHKPENIVIEMARENQTTQKGQKNSRERMKRIEEGIKELGSQILKEHPVENTQLQNEKLYLYYLQNGRDMYVDQELDINRLSDYDVDHIVPQSFLKDDSIDNKVLTRSDKARGKSDNVPSEEVVKKMKNYWRQLLNAKLITQRKFDNLTKAERGGLSELDKAGFIKRQLVETRQITKHVAQILDSRMNTKYDENDKLIREVKVITLKSKLVSDFRKDFQFYKVREINNYHHAHDAYLNAVVGTALIKKYPKLESEFVYGDYKVYDVRKMIAKSEQEIGKATAKYFFYSNIMNFFKTEITLANGEIRKRPLIETNGETGEIVWDKGRDFATVRKVLSMPQVNIVKKTEVQTGGFSKESILPKRNSDKLIARKKDWDPKKYGGFDSPTVAYSVLVVAKVEKGKSKKLKSVKELLGITIMERSSFEKNPIDFLEAKGYKEVKKDLIIKLPKYSLFELENGRKRMLASAGELQKGNELALPSKYVNFLYLASHYEKLKGSPEDNEQKQLFVEQHKHYLDEIIEQISEFSKRVILADANLDKVLSAYNKHRDKPIREQAENIIHLFTLTNLGAPAAFKYFDTTIDRKRYTSTKEVLDATLIHQSITGLYETRIDLSQLGGDGGEAAAKGGSGSSGGTLNIEDEYRLHETSKEPDVSLGSTWLSDFPQAWAETGGMGLAVRQAPLIIPLKATSTPVSIKQYPMSQEARLGIKPHIQRLLDQGILVPCQSPWNTPLLPVKKPGTNDYRPVQDLREVNKRVEDIHPTVPNPYNLLSGLPPSHQWYTVLDLKDAFFCLRLHPTSQPLFAFEWRDPEMGISGQLTWTRLPQGFKNSPTLFNEALHRDLAGFRIQHPDLILLQYVDDLLLAATSELDCQQGTRALLQTLGDLGYRASAKKAQICQKQVKYLGYLLKEGQRWLTEARKETVMGQPIPKTPRQLREFLGKAGFCRLFIPGFAEMAAPLYPLTKPGTLFNWGPDQQKAFQEIKQALLTAPALGLPDLTKPFELFVDEKQGYAKGVLTQKLGPWRRPVAYLSKKLDPVAAGWPPCLRMVAAIAVLTKDAGKLTMGQPLVILAPHAVEALVKQPPDRWLSNARMTHYQALLLDTDRVQFGPVVALNPATLLPLPEEGLQHDCLDILAEAHGTRSDLMDQPLPDADHTWYTDGSSFLQEGQRKAGAAVTTETEVIWARALPAGTSAQRAELIALTQALKMAEGKKLNVYTDSRYAFATAHIHGEIYRRRGWLTSEGKEIKNKDEILALLKALFLPKRLSIIHCPGHQKGNSAEARGNRMADQAAREVATRETPETSTLLAGKRTADGSEFEKRTADGSEFESPKKKAKVE

SEQ ID NO: 2371 - protein, 2094 aa, synthetic construct
MPAAKRVKLDGGDKKYSIGLDIGTNSVGWAVITDEYKVPSKKFKVLGNTDRHSIKKNLIGALLFDSGETAEATRLKRTARRRYTRRKNRICYLQEIFSNEMAKVDDSFFHRLEESFLVEEDKKHERHPIFGNIVDEVAYHEKYPTIYHLRKKLVDSTDKADLRLIYLALAHMIKFRGHFLIEGDLNPDNSDVDKLFIQLVQTYNQLFEENPINASGVDAKAILSARLSKSRRLENLIAQLPGEKKNGLFGNLIALSLGLTPNFKSNFDLAEDAKLQLSKDTYDDDLDNLLAQIGDQYADLFLAAKNLSDAILLSDILRVNTEITKAPLSASMIKRYDEHHQDLTLLKALVRQQLPEKYKEIFFDQSKNGYAGYIDGGASQEEFYKFIKPILEKMDGTEELLVKLNREDLLRKQRTFDNGSIPHQIHLGELHAILRRQEDFYPFLKDNREKIEKILTFRIPYYVGPLARGNSRFAWMTRKSEETITPWNFEEVVDKGASAQSFIERMTNFDKNLPNEKVLPKHSLLYEYFTVYNELTKVKYVTEGMRKPAFLSGEQKKAIVDLLFKTNRKVTVKQLKEDYFKKIECFDSVEISGVEDRFNASLGTYHDLLKIIKDKDFLDNEENEDILEDIVLTLTLFEDREMIEERLKTYAHLFDDKVMKQLKRRRYTGWGRLSRKLINGIRDKQSGKTILDFLKSDGFANRNFMQLIHDDSLTFKEDIQKAQVSGQGDSLHEHIANLAGSPAIKKGILQTVKVVDELVKVMGRHKPENIVIEMARENQTTQKGQKNSRERMKRIEEGIKELGSQILKEHPVENTQLQNEKLYLYYLQNGRDMYVDQELDINRLSDYDVDHIVPQSFLKDDSIDNKVLTRSDKARGKSDNVPSEEVVKKMKNYWRQLLNAKLITQRKFDNLTKAERGGLSELDKAGFIKRQLVETRQITKHVAQILDSRMNTKYDENDKLIREVKVITLKSKLVSDFRKDFQFYKVREINNYHHAHDAYLNAVVGTALIKKYPKLESEFVYGDYKVYDVRKMIAKSEQEIGKATAKYFFYSNIMNFFKTEITLANGEIRKRPLIETNGETGEIVWDKGRDFATVRKVLSMPQVNIVKKTEVQTGGFSKESILPKRNSDKLIARKKDWDPKKYGGFDSPTVAYSVLVVAKVEKGKSKKLKSVKELLGITIMERSSFEKNPIDFLEAKGYKEVKKDLIIKLPKYSLFELENGRKRMLASAGELQKGNELALPSKYVNFLYLASHYEKLKGSPEDNEQKQLFVEQHKHYLDEIIEQISEFSKRVILADANLDKVLSAYNKHRDKPIREQAENIIHLFTLTNLGAPAAFKYFDTTIDRKRYTSTKEVLDATLIHQSITGLYETRIDLSQLGGDGGGGSGGGGSSGGTLNIEDEYRLHETSKEPDVSLGSTWLSDFPQAWAETGGMGLAVRQAPLIIPLKATSTPVSIKQYPMSQEARLGIKPHIQRLLDQGILVPCQSPWNTPLLPVKKPGTNDYRPVQDLREVNKRVEDIHPTVPNPYNLLSGLPPSHQWYTVLDLKDAFFCLRLHPTSQPLFAFEWRDPEMGISGQLTWTRLPQGFKNSPTLFNEALHRDLAGFRIQHPDLILLQYVDDLLLAATSELDCQQGTRALLQTLGDLGYRASAKKAQICQKQVKYLGYLLKEGQRWLTEARKETVMGQPIPKTPRQLREFLGKAGFCRLFIPGFAEMAAPLYPLTKPGTLFNWGPDQQKAFQEIKQALLTAPALGLPDLTKPFELFVDEKQGYAKGVLTQKLGPWRRPVAYLSKKLDPVAAGWPPCLRMVAAIAVLTKDAGKLTMGQPLVILAPHAVEALVKQPPDRWLSNARMTHYQALLLDTDRVQFGPVVALNPATLLPLPEEGLQHDCLDILAEAHGTRSDLMDQPLPDADHTWYTDGSSFLQEGQRKAGAAVTTETEVIWARALPAGTSAQRAELIALTQALKMAEGKKLNVYTDSRYAFATAHIHGEIYRRRGWLTSEGKEIKNKDEILALLKALFLPKRLSIIHCPGHQKGNSAEARGNRMADQAAREVATRETPETSTLLAGKRTADGSEFEKRTADGSEFESPKKKAKVE

SEQ ID NO: 2372 - protein, 2096 aa, synthetic construct
MPAAKRVKLDGGDKKYSIGLDIGTNSVGWAVITDEYKVPSKKFKVLGNTDRHSIKKNLIGALLFDSGETAEATRLKRTARRRYTRRKNRICYLQEIFSNEMAKVDDSFFHRLEESFLVEEDKKHERHPIFGNIVDEVAYHEKYPTIYHLRKKLVDSTDKADLRLIYLALAHMIKFRGHFLIEGDLNPDNSDVDKLFIQLVQTYNQLFEENPINASGVDAKAILSARLSKSRRLENLIAQLPGEKKNGLFGNLIALSLGLTPNFKSNFDLAEDAKLQLSKDTYDDDLDNLLAQIGDQYADLFLAAKNLSDAILLSDILRVNTEITKAPLSASMIKRYDEHHQDLTLLKALVRQQLPEKYKEIFFDQSKNGYAGYIDGGASQEEFYKFIKPILEKMDGTEELLVKLNREDLLRKQRTFDNGSIPHQIHLGELHAILRRQEDFYPFLKDNREKIEKILTFRIPYYVGPLARGNSRFAWMTRKSEETITPWNFEEVVDKGASAQSFIERMTNFDKNLPNEKVLPKHSLLYEYFTVYNELTKVKYVTEGMRKPAFLSGEQKKAIVDLLFKTNRKVTVKQLKEDYFKKIECFDSVEISGVEDRFNASLGTYHDLLKIIKDKDFLDNEENEDILEDIVLTLTLFEDREMIEERLKTYAHLFDDKVMKQLKRRRYTGWGRLSRKLINGIRDKQSGKTILDFLKSDGFANRNFMQLIHDDSLTFKEDIQKAQVSGQGDSLHEHIANLAGSPAIKKGILQTVKVVDELVKVMGRHKPENIVIEMARENQTTQKGQKNSRERMKRIEEGIKELGSQILKEHPVENTQLQNEKLYLYYLQNGRDMYVDQELDINRLSDYDVDHIVPQSFLKDDSIDNKVLTRSDKARGKSDNVPSEEVVKKMKNYWRQLLNAKLITQRKFDNLTKAERGGLSELDKAGFIKRQLVETRQITKHVAQILDSRMNTKYDENDKLIREVKVITLKSKLVSDFRKDFQFYKVREINNYHHAHDAYLNAVVGTALIKKYPKLESEFVYGDYKVYDVRKMIAKSEQEIGKATAKYFFYSNIMNFFKTEITLANGEIRKRPLIETNGETGEIVWDKGRDFATVRKVLSMPQVNIVKKTEVQTGGFSKESILPKRNSDKLIARKKDWDPKKYGGFDSPTVAYSVLVVAKVEKGKSKKLKSVKELLGITIMERSSFEKNPIDFLEAKGYKEVKKDLIIKLPKYSLFELENGRKRMLASAGELQKGNELALPSKYVNFLYLASHYEKLKGSPEDNEQKQLFVEQHKHYLDEIIEQISEFSKRVILADANLDKVLSAYNKHRDKPIREQAENIIHLFTLTNLGAPAAFKYFDTTIDRKRYTSTKEVLDATLIHQSITGLYETRIDLSQLGGDGGEAAAKGGSPAPGGTLNIEDEYRLHETSKEPDVSLGSTWLSDFPQAWAETGGMGLAVRQAPLIIPLKATSTPVSIKQYPMSQEARLGIKPHIQRLLDQGILVPCQSPWNTPLLPVKKPGTNDYRPVQDLREVNKRVEDIHPTVPNPYNLLSGLPPSHQWYTVLDLKDAFFCLRLHPTSQPLFAFEWRDPEMGISGQLTWTRLPQGFKNSPTLFNEALHRDLAGFRIQHPDLILLQYVDDLLLAATSELDCQQGTRALLQTLGDLGYRASAKKAQICQKQVKYLGYLLKEGQRWLTEARKETVMGQPIPKTPRQLREFLGKAGFCRLFIPGFAEMAAPLYPLTKPGTLFNWGPDQQKAFQEIKQALLTAPALGLPDLTKPFELFVDEKQGYAKGVLTQKLGPWRRPVAYLSKKLDPVAAGWPPCLRMVAAIAVLTKDAGKLTMGQPLVILAPHAVEALVKQPPDRWLSNARMTHYQALLLDTDRVQFGPVVALNPATLLPLPEEGLQHDCLDILAEAHGTRSDLMDQPLPDADHTWYTDGSSFLQEGQRKAGAAVTTETEVIWARALPAGTSAQRAELIALTQALKMAEGKKLNVYTDSRYAFATAHIHGEIYRRRGWLTSEGKEIKNKDEILALLKALFLPKRLSIIHCPGHQKGNSAEARGNRMADQAAREVATRETPETSTLLAGKRTADGSEFEKRTADGSEFESPKKKAKVE

SEQ ID NO: 2373 - protein, 2100 aa, synthetic construct
MPAAKRVKLDGGDKKYSIGLDIGTNSVGWAVITDEYKVPSKKFKVLGNTDRHSIKKNLIGALLFDSGETAEATRLKRTARRRYTRRKNRICYLQEIFSNEMAKVDDSFFHRLEESFLVEEDKKHERHPIFGNIVDEVAYHEKYPTIYHLRKKLVDSTDKADLRLIYLALAHMIKFRGHFLIEGDLNPDNSDVDKLFIQLVQTYNQLFEENPINASGVDAKAILSARLSKSRRLENLIAQLPGEKKNGLFGNLIALSLGLTPNFKSNFDLAEDAKLQLSKDTYDDDLDNLLAQIGDQYADLFLAAKNLSDAILLSDILRVNTEITKAPLSASMIKRYDEHHQDLTLLKALVRQQLPEKYKEIFFDQSKNGYAGYIDGGASQEEFYKFIKPILEKMDGTEELLVKLNREDLLRKQRTFDNGSIPHQIHLGELHAILRRQEDFYPFLKDNREKIEKILTFRIPYYVGPLARGNSRFAWMTRKSEETITPWNFEEVVDKGASAQSFIERMTNFDKNLPNEKVLPKHSLLYEYFTVYNELTKVKYVTEGMRKPAFLSGEQKKAIVDLLFKTNRKVTVKQLKEDYFKKIECFDSVEISGVEDRFNASLGTYHDLLKIIKDKDFLDNEENEDILEDIVLTLTLFEDREMIEERLKTYAHLFDDKVMKQLKRRRYTGWGRLSRKLINGIRDKQSGKTILDFLKSDGFANRNFMQLIHDDSLTFKEDIQKAQVSGQGDSLHEHIANLAGSPAIKKGILQTVKVVDELVKVMGRHKPENIVIEMARENQTTQKGQKNSRERMKRIEEGIKELGSQILKEHPVENTQLQNEKLYLYYLQNGRDMYVDQELDINRLSDYDVDHIVPQSFLKDDSIDNKVLTRSDKARGKSDNVPSEEVVKKMKNYWRQLLNAKLITQRKFDNLTKAERGGLSELDKAGFIKRQLVETRQITKHVAQILDSRMNTKYDENDKLIREVKVITLKSKLVSDFRKDFQFYKVREINNYHHAHDAYLNAVVGTALIKKYPKLESEFVYGDYKVYDVRKMIAKSEQEIGKATAKYFFYSNIMNFFKTEITLANGEIRKRPLIETNGETGEIVWDKGRDFATVRKVLSMPQVNIVKKTEVQTGGFSKESILPKRNSDKLIARKKDWDPKKYGGFDSPTVAYSVLVVAKVEKGKSKKLKSVKELLGITIMERSSFEKNPIDFLEAKGYKEVKKDLIIKLPKYSLFELENGRKRMLASAGELQKGNELALPSKYVNFLYLASHYEKLKGSPEDNEQKQLFVEQHKHYLDEIIEQISEFSKRVILADANLDKVLSAYNKHRDKPIREQAENIIHLFTLTNLGAPAAFKYFDTTIDRKRYTSTKEVLDATLIHQSITGLYETRIDLSQLGGDGGEAAAKEAAAKEAAAKGGTLNIEDEYRLHETSKEPDVSLGSTWLSDFPQAWAETGGMGLAVRQAPLIIPLKATSTPVSIKQYPMSQEARLGIKPHIQRLLDQGILVPCQSPWNTPLLPVKKPGTNDYRPVQDLREVNKRVEDIHPTVPNPYNLLSGLPPSHQWYTVLDLKDAFFCLRLHPTSQPLFAFEWRDPEMGISGQLTWTRLPQGFKNSPTLFNEALHRDLAGFRIQHPDLILLQYVDDLLLAATSELDCQQGTRALLQTLGDLGYRASAKKAQICQKQVKYLGYLLKEGQRWLTEARKETVMGQPIPKTPRQLREFLGKAGFCRLFIPGFAEMAAPLYPLTKPGTLFNWGPDQQKAFQEIKQALLTAPALGLPDLTKPFELFVDEKQGYAKGVLTQKLGPWRRPVAYLSKKLDPVAAGWPPCLRMVAAIAVLTKDAGKLTMGQPLVILAPHAVEALVKQPPDRWLSNARMTHYQALLLDTDRVQFGPVVALNPATLLPLPEEGLQHDCLDILAEAHGTRSDLMDQPLPDADHTWYTDGSSFLQEGQRKAGAAVTTETEVIWARALPAGTSAQRAELIALTQALKMAEGKKLNVYTDSRYAFATAHIHGEIYRRRGWLTSEGKEIKNKDEILALLKALFLPKRLSIIHCPGHQKGNSAEARGNRMADQAAREVATRETPETSTLLAGKRTADGSEFEKRTADGSEFESPKKKAKVE

SEQ ID NO: 2374 - protein, 2100 aa, synthetic construct
MPAAKRVKLDGGDKKYSIGLDIGTNSVGWAVITDEYKVPSKKFKVLGNTDRHSIKKNLIGALLFDSGETAEATRLKRTARRRYTRRKNRICYLQEIFSNEMAKVDDSFFHRLEESFLVEEDKKHERHPIFGNIVDEVAYHEKYPTIYHLRKKLVDSTDKADLRLIYLALAHMIKFRGHFLIEGDLNPDNSDVDKLFIQLVQTYNQLFEENPINASGVDAKAILSARLSKSRRLENLIAQLPGEKKNGLFGNLIALSLGLTPNFKSNFDLAEDAKLQLSKDTYDDDLDNLLAQIGDQYADLFLAAKNLSDAILLSDILRVNTEITKAPLSASMIKRYDEHHQDLTLLKALVRQQLPEKYKEIFFDQSKNGYAGYIDGGASQEEFYKFIKPILEKMDGTEELLVKLNREDLLRKQRTFDNGSIPHQIHLGELHAILRRQEDFYPFLKDNREKIEKILTFRIPYYVGPLARGNSRFAWMTRKSEETITPWNFEEVVDKGASAQSFIERMTNFDKNLPNEKVLPKHSLLYEYFTVYNELTKVKYVTEGMRKPAFLSGEQKKAIVDLLFKTNRKVTVKQLKEDYFKKIECFDSVEISGVEDRFNASLGTYHDLLKIIKDKDFLDNEENEDILEDIVLTLTLFEDREMIEERLKTYAHLFDDKVMKQLKRRRYTGWGRLSRKLINGIRDKQSGKTILDFLKSDGFANRNFMQLIHDDSLTFKEDIQKAQVSGQGDSLHEHIANLAGSPAIKKGILQTVKVVDELVKVMGRHKPENIVIEMARENQTTQKGQKNSRERMKRIEEGIKELGSQILKEHPVENTQLQNEKLYLYYLQNGRDMYVDQELDINRLSDYDVDHIVPQSFLKDDSIDNKVLTRSDKARGKSDNVPSEEVVKKMKNYWRQLLNAKLITQRKFDNLTKAERGGLSELDKAGFIKRQLVETRQITKHVAQILDSRMNTKYDENDKLIREVKVITLKSKLVSDFRKDFQFYKVREINNYHHAHDAYLNAVVGTALIKKYPKLESEFVYGDYKVYDVRKMIAKSEQEIGKATAKYFFYSNIMNFFKTEITLANGEIRKRPLIETNGETGEIVWDKGRDFATVRKVLSMPQVNIVKKTEVQTGGFSKESILPKRNSDKLIARKKDWDPKKYGGFDSPTVAYSVLVVAKVEKGKSKKLKSVKELLGITIMERSSFEKNPIDFLEAKGYKEVKKDLIIKLPKYSLFELENGRKRMLASAGELQKGNELALPSKYVNFLYLASHYEKLKGSPEDNEQKQLFVEQHKHYLDEIIEQISEFSKRVILADANLDKVLSAYNKHRDKPIREQAENIIHLFTLTNLGAPAAFKYFDTTIDRKRYTSTKEVLDATLIHQSITGLYETRIDLSQLGGDGGGGGGSEAAAKGGGGSGGTLNIEDEYRLHETSKEPDVSLGSTWLSDFPQAWAETGGMGLAVRQAPLIIPLKATSTPVSIKQYPMSQEARLGIKPHIQRLLDQGILVPCQSPWNTPLLPVKKPGTNDYRPVQDLREVNKRVEDIHPTVPNPYNLLSGLPPSHQWYTVLDLKDAFFCLRLHPTSQPLFAFEWRDPEMGISGQLTWTRLPQGFKNSPTLFNEALHRDLAGFRIQHPDLILLQYVDDLLLAATSELDCQQGTRALLQTLGDLGYRASAKKAQICQKQVKYLGYLLKEGQRWLTEARKETVMGQPIPKTPRQLREFLGKAGFCRLFIPGFAEMAAPLYPLTKPGTLFNWGPDQQKAFQEIKQALLTAPALGLPDLTKPFELFVDEKQGYAKGVLTQKLGPWRRPVAYLSKKLDPVAAGWPPCLRMVAAIAVLTKDAGKLTMGQPLVILAPHAVEALVKQPPDRWLSNARMTHYQALLLDTDRVQFGPVVALNPATLLPLPEEGLQHDCLDILAEAHGTRSDLMDQPLPDADHTWYTDGSSFLQEGQRKAGAAVTTETEVIWARALPAGTSAQRAELIALTQALKMAEGKKLNVYTDSRYAFATAHIHGEIYRRRGWLTSEGKEIKNKDEILALLKALFLPKRLSIIHCPGHQKGNSAEARGNRMADQAAREVATRETPETSTLLAGKRTADGSEFEKRTADGSEFESPKKKAKVE

SEQ ID NO: 2375 - protein, 2088 aa, synthetic construct
MPAAKRVKLDGGDKKYSIGLDIGTNSVGWAVITDEYKVPSKKFKVLGNTDRHSIKKNLIGALLFDSGETAEATRLKRTARRRYTRRKNRICYLQEIFSNEMAKVDDSFFHRLEESFLVEEDKKHERHPIFGNIVDEVAYHEKYPTIYHLRKKLVDSTDKADLRLIYLALAHMIKFRGHFLIEGDLNPDNSDVDKLFIQLVQTYNQLFEENPINASGVDAKAILSARLSKSRRLENLIAQLPGEKKNGLFGNLIALSLGLTPNFKSNFDLAEDAKLQLSKDTYDDDLDNLLAQIGDQYADLFLAAKNLSDAILLSDILRVNTEITKAPLSASMIKRYDEHHQDLTLLKALVRQQLPEKYKEIFFDQSKNGYAGYIDGGASQEEFYKFIKPILEKMDGTEELLVKLNREDLLRKQRTFDNGSIPHQIHLGELHAILRRQEDFYPFLKDNREKIEKILTFRIPYYVGPLARGNSRFAWMTRKSEETITPWNFEEVVDKGASAQSFIERMTNFDKNLPNEKVLPKHSLLYEYFTVYNELTKVKYVTEGMRKPAFLSGEQKKAIVDLLFKTNRKVTVKQLKEDYFKKIECFDSVEISGVEDRFNASLGTYHDLLKIIKDKDFLDNEENEDILEDIVLTLTLFEDREMIEERLKTYAHLFDDKVMKQLKRRRYTGWGRLSRKLINGIRDKQSGKTILDFLKSDGFANRNFMQLIHDDSLTFKEDIQKAQVSGQGDSLHEHIANLAGSPAIKKGILQTVKVVDELVKVMGRHKPENIVIEMARENQTTQKGQKNSRERMKRIEEGIKELGSQILKEHPVENTQLQNEKLYLYYLQNGRDMYVDQELDINRLSDYDVDHIVPQSFLKDDSIDNKVLTRSDKARGKSDNVPSEEVVKKMKNYWRQLLNAKLITQRKFDNLTKAERGGLSELDKAGFIKRQLVETRQITKHVAQILDSRMNTKYDENDKLIREVKVITLKSKLVSDFRKDFQFYKVREINNYHHAHDAYLNAVVGTALIKKYPKLESEFVYGDYKVYDVRKMIAKSEQEIGKATAKYFFYSNIMNFFKTEITLANGEIRKRPLIETNGETGEIVWDKGRDFATVRKVLSMPQVNIVKKTEVQTGGFSKESILPKRNSDKLIARKKDWDPKKYGGFDSPTVAYSVLVVAKVEKGKSKKLKSVKELLGITIMERSSFEKNPIDFLEAKGYKEVKKDLIIKLPKYSLFELENGRKRMLASAGELQKGNELALPSKYVNFLYLASHYEKLKGSPEDNEQKQLFVEQHKHYLDEIIEQISEFSKRVILADANLDKVLSAYNKHRDKPIREQAENIIHLFTLTNLGAPAAFKYFDTTIDRKRYTSTKEVLDATLIHQSITGLYETRIDLSQLGGDGGGGGGGTLNIEDEYRLHETSKEPDVSLGSTWLSDFPQAWAETGGMGLAVRQAPLIIPLKATSTPVSIKQYPMSQEARLGIKPHIQRLLDQGILVPCQSPWNTPLLPVKKPGTNDYRPVQDLREVNKRVEDIHPTVPNPYNLLSGLPPSHQWYTVLDLKDAFFCLRLHPTSQPLFAFEWRDPEMGISGQLTWTRLPQGFKNSPTLFNEALHRDLAGFRIQHPDLILLQYVDDLLLAATSELDCQQGTRALLQTLGDLGYRASAKKAQICQKQVKYLGYLLKEGQRWLTEARKETVMGQPIPKTPRQLREFLGKAGFCRLFIPGFAEMAAPLYPLTKPGTLFNWGPDQQKAFQEIKQALLTAPALGLPDLTKPFELFVDEKQGYAKGVLTQKLGPWRRPVAYLSKKLDPVAAGWPPCLRMVAAIAVLTKDAGKLTMGQPLVILAPHAVEALVKQPPDRWLSNARMTHYQALLLDTDRVQFGPVVALNPATLLPLPEEGLQHDCLDILAEAHGTRSDLMDQPLPDADHTWYTDGSSFLQEGQRKAGAAVTTETEVIWARALPAGTSAQRAELIALTQALKMAEGKKLNVYTDSRYAFATAHIHGEIYRRRGWLTSEGKEIKNKDEILALLKALFLPKRLSIIHCPGHQKGNSAEARGNRMADQAAREVATRETPETSTLLAGKRTADGSEFEKRTADGSEFESPKKKAKVE

SEQ ID NO: 2376 - protein, 2118 aa, synthetic construct
MPAAKRVKLDGGDKKYSIGLDIGTNSVGWAVITDEYKVPSKKFKVLGNTDRHSIKKNLIGALLFDSGETAEATRLKRTARRRYTRRKNRICYLQEIFSNEMAKVDDSFFHRLEESFLVEEDKKHERHPIFGNIVDEVAYHEKYPTIYHLRKKLVDSTDKADLRLIYLALAHMIKFRGHFLIEGDLNPDNSDVDKLFIQLVQTYNQLFEENPINASGVDAKAILSARLSKSRRLENLIAQLPGEKKNGLFGNLIALSLGLTPNFKSNFDLAEDAKLQLSKDTYDDDLDNLLAQIGDQYADLFLAAKNLSDAILLSDILRVNTEITKAPLSASMIKRYDEHHQDLTLLKALVRQQLPEKYKEIFFDQSKNGYAGYIDGGASQEEFYKFIKPILEKMDGTEELLVKLNREDLLRKQRTFDNGSIPHQIHLGELHAILRRQEDFYPFLKDNREKIEKILTFRIPYYVGPLARGNSRFAWMTRKSEETITPWNFEEVVDKGASAQSFIERMTNFDKNLPNEKVLPKHSLLYEYFTVYNELTKVKYVTEGMRKPAFLSGEQKKAIVDLLFKTNRKVTVKQLKEDYFKKIECFDSVEISGVEDRFNASLGTYHDLLKIIKDKDFLDNEENEDILEDIVLTLTLFEDREMIEERLKTYAHLFDDKVMKQLKRRRYTGWGRLSRKLINGIRDKQSGKTILDFLKSDGFANRNFMQLIHDDSLTFKEDIQKAQVSGQGDSLHEHIANLAGSPAIKKGILQTVKVVDELVKVMGRHKPENIVIEMARENQTTQKGQKNSRERMKRIEEGIKELGSQILKEHPVENTQLQNEKLYLYYLQNGRDMYVDQELDINRLSDYDVDHIVPQSFLKDDSIDNKVLTRSDKARGKSDNVPSEEVVKKMKNYWRQLLNAKLITQRKFDNLTKAERGGLSELDKAGFIKRQLVETRQITKHVAQILDSRMNTKYDENDKLIREVKVITLKSKLVSDFRKDFQFYKVREINNYHHAHDAYLNAVVGTALIKKYPKLESEFVYGDYKVYDVRKMIAKSEQEIGKATAKYFFYSNIMNFFKTEITLANGEIRKRPLIETNGETGEIVWDKGRDFATVRKVLSMPQVNIVKKTEVQTGGFSKESILPKRNSDKLIARKKDWDPKKYGGFDSPTVAYSVLVVAKVEKGKSKKLKSVKELLGITIMERSSFEKNPIDFLEAKGYKEVKKDLIIKLPKYSLFELENGRKRMLASAGELQKGNELALPSKYVNFLYLASHYEKLKGSPEDNEQKQLFVEQHKHYLDEIIEQISEFSKRVILADANLDKVLSAYNKHRDKPIREQAENIIHLFTLTNLGAPAAFKYFDTTIDRKRYTSTKEVLDATLIHQSITGLYETRIDLSQLGGDGGSGGSSGGSSGSETPGTSESATPESSGGSSGGSSGGTLNIEDEYRLHETSKEPDVSLGSTWLSDFPQAWAETGGMGLAVRQAPLIIPLKATSTPVSIKQYPMSQEARLGIKPHIQRLLDQGILVPCQSPWNTPLLPVKKPGTNDYRPVQDLREVNKRVEDIHPTVPNPYNLLSGLPPSHQWYTVLDLKDAFFCLRLHPTSQPLFAFEWRDPEMGISGQLTWTRLPQGFKNSPTLFNEALHRDLAGFRIQHPDLILLQYVDDLLLAATSELDCQQGTRALLQTLGDLGYRASAKKAQICQKQVKYLGYLLKEGQRWLTEARKETVMGQPIPKTPRQLREFLGKAGFCRLFIPGFAEMAAPLYPLTKPGTLFNWGPDQQKAFQEIKQALLTAPALGLPDLTKPFELFVDEKQGYAKGVLTQKLGPWRRPVAYLSKKLDPVAAGWPPCLRMVAAIAVLTKDAGKLTMGQPLVILAPHAVEALVKQPPDRWLSNARMTHYQALLLDTDRVQFGPVVALNPATLLPLPEEGLQHDCLDILAEAHGTRSDLMDQPLPDADHTWYTDGSSFLQEGQRKAGAAVTTETEVIWARALPAGTSAQRAELIALTQALKMAEGKKLNVYTDSRYAFATAHIHGEIYRRRGWLTSEGKEIKNKDEILALLKALFLPKRLSIIHCPGHQKGNSAEARGNRMADQAAREVATRETPETSTLLAGKRTADGSEFEKRTADGSEFESPKKKAKVE

SEQ ID NO: 2377 - protein, 2096 aa, synthetic construct
MPAAKRVKLDGGDKKYSIGLDIGTNSVGWAVITDEYKVPSKKFKVLGNTDRHSIKKNLIGALLFDSGETAEATRLKRTARRRYTRRKNRICYLQEIFSNEMAKVDDSFFHRLEESFLVEEDKKHERHPIFGNIVDEVAYHEKYPTIYHLRKKLVDSTDKADLRLIYLALAHMIKFRGHFLIEGDLNPDNSDVDKLFIQLVQTYNQLFEENPINASGVDAKAILSARLSKSRRLENLIAQLPGEKKNGLFGNLIALSLGLTPNFKSNFDLAEDAKLQLSKDTYDDDLDNLLAQIGDQYADLFLAAKNLSDAILLSDILRVNTEITKAPLSASMIKRYDEHHQDLTLLKALVRQQLPEKYKEIFFDQSKNGYAGYIDGGASQEEFYKFIKPILEKMDGTEELLVKLNREDLLRKQRTFDNGSIPHQIHLGELHAILRRQEDFYPFLKDNREKIEKILTFRIPYYVGPLARGNSRFAWMTRKSEETITPWNFEEVVDKGASAQSFIERMTNFDKNLPNEKVLPKHSLLYEYFTVYNELTKVKYVTEGMRKPAFLSGEQKKAIVDLLFKTNRKVTVKQLKEDYFKKIECFDSVEISGVEDRFNASLGTYHDLLKIIKDKDFLDNEENEDILEDIVLTLTLFEDREMIEERLKTYAHLFDDKVMKQLKRRRYTGWGRLSRKLINGIRDKQSGKTILDFLKSDGFANRNFMQLIHDDSLTFKEDIQKAQVSGQGDSLHEHIANLAGSPAIKKGILQTVKVVDELVKVMGRHKPENIVIEMARENQTTQKGQKNSRERMKRIEEGIKELGSQILKEHPVENTQLQNEKLYLYYLQNGRDMYVDQELDINRLSDYDVDHIVPQSFLKDDSIDNKVLTRSDKARGKSDNVPSEEVVKKMKNYWRQLLNAKLITQRKFDNLTKAERGGLSELDKAGFIKRQLVETRQITKHVAQILDSRMNTKYDENDKLIREVKVITLKSKLVSDFRKDFQFYKVREINNYHHAHDAYLNAVVGTALIKKYPKLESEFVYGDYKVYDVRKMIAKSEQEIGKATAKYFFYSNIMNFFKTEITLANGEIRKRPLIETNGETGEIVWDKGRDFATVRKVLSMPQVNIVKKTEVQTGGFSKESILPKRNSDKLIARKKDWDPKKYGGFDSPTVAYSVLVVAKVEKGKSKKLKSVKELLGITIMERSSFEKNPIDFLEAKGYKEVKKDLIIKLPKYSLFELENGRKRMLASAGELQKGNELALPSKYVNFLYLASHYEKLKGSPEDNEQKQLFVEQHKHYLDEIIEQISEFSKRVILADANLDKVLSAYNKHRDKPIREQAENIIHLFTLTNLGAPAAFKYFDTTIDRKRYTSTKEVLDATLIHQSITGLYETRIDLSQLGGDGGPAPGGGEAAAKGGTLNIEDEYRLHETSKEPDVSLGSTWLSDFPQAWAETGGMGLAVRQAPLIIPLKATSTPVSIKQYPMSQEARLGIKPHIQRLLDQGILVPCQSPWNTPLLPVKKPGTNDYRPVQDLREVNKRVEDIHPTVPNPYNLLSGLPPSHQWYTVLDLKDAFFCLRLHPTSQPLFAFEWRDPEMGISGQLTWTRLPQGFKNSPTLFNEALHRDLAGFRIQHPDLILLQYVDDLLLAATSELDCQQGTRALLQTLGDLGYRASAKKAQICQKQVKYLGYLLKEGQRWLTEARKETVMGQPIPKTPRQLREFLGKAGFCRLFIPGFAEMAAPLYPLTKPGTLFNWGPDQQKAFQEIKQALLTAPALGLPDLTKPFELFVDEKQGYAKGVLTQKLGPWRRPVAYLSKKLDPVAAGWPPCLRMVAAIAVLTKDAGKLTMGQPLVILAPHAVEALVKQPPDRWLSNARMTHYQALLLDTDRVQFGPVVALNPATLLPLPEEGLQHDCLDILAEAHGTRSDLMDQPLPDADHTWYTDGSSFLQEGQRKAGAAVTTETEVIWARALPAGTSAQRAELIALTQALKMAEGKKLNVYTDSRYAFATAHIHGEIYRRRGWLTSEGKEIKNKDEILALLKALFLPKRLSIIHCPGHQKGNSAEARGNRMADQAAREVATRETPETSTLLAGKRTADGSEFEKRTADGSEFESPKKKAKVE

SEQ ID NO: 2378 - protein, 2090 aa, synthetic construct
MPAAKRVKLDGGDKKYSIGLDIGTNSVGWAVITDEYKVPSKKFKVLGNTDRHSIKKNLIGALLFDSGETAEATRLKRTARRRYTRRKNRICYLQEIFSNEMAKVDDSFFHRLEESFLVEEDKKHERHPIFGNIVDEVAYHEKYPTIYHLRKKLVDSTDKADLRLIYLALAHMIKFRGHFLIEGDLNPDNSDVDKLFIQLVQTYNQLFEENPINASGVDAKAILSARLSKSRRLENLIAQLPGEKKNGLFGNLIALSLGLTPNFKSNFDLAEDAKLQLSKDTYDDDLDNLLAQIGDQYADLFLAAKNLSDAILLSDILRVNTEITKAPLSASMIKRYDEHHQDLTLLKALVRQQLPEKYKEIFFDQSKNGYAGYIDGGASQEEFYKFIKPILEKMDGTEELLVKLNREDLLRKQRTFDNGSIPHQIHLGELHAILRRQEDFYPFLKDNREKIEKILTFRIPYYVGPLARGNSRFAWMTRKSEETITPWNFEEVVDKGASAQSFIERMTNFDKNLPNEKVLPKHSLLYEYFTVYNELTKVKYVTEGMRKPAFLSGEQKKAIVDLLFKTNRKVTVKQLKEDYFKKIECFDSVEISGVEDRFNASLGTYHDLLKIIKDKDFLDNEENEDILEDIVLTLTLFEDREMIEERLKTYAHLFDDKVMKQLKRRRYTGWGRLSRKLINGIRDKQSGKTILDFLKSDGFANRNFMQLIHDDSLTFKEDIQKAQVSGQGDSLHEHIANLAGSPAIKKGILQTVKVVDELVKVMGRHKPENIVIEMARENQTTQKGQKNSRERMKRIEEGIKELGSQILKEHPVENTQLQNEKLYLYYLQNGRDMYVDQELDINRLSDYDVDHIVPQSFLKDDSIDNKVLTRSDKARGKSDNVPSEEVVKKMKNYWRQLLNAKLITQRKFDNLTKAERGGLSELDKAGFIKRQLVETRQITKHVAQILDSRMNTKYDENDKLIREVKVITLKSKLVSDFRKDFQFYKVREINNYHHAHDAYLNAVVGTALIKKYPKLESEFVYGDYKVYDVRKMIAKSEQEIGKATAKYFFYSNIMNFFKTEITLANGEIRKRPLIETNGETGEIVWDKGRDFATVRKVLSMPQVNIVKKTEVQTGGFSKESILPKRNSDKLIARKKDWDPKKYGGFDSPTVAYSVLVVAKVEKGKSKKLKSVKELLGITIMERSSFEKNPIDFLEAKGYKEVKKDLIIKLPKYSLFELENGRKRMLASAGELQKGNELALPSKYVNFLYLASHYEKLKGSPEDNEQKQLFVEQHKHYLDEIIEQISEFSKRVILADANLDKVLSAYNKHRDKPIREQAENIIHLFTLTNLGAPAAFKYFDTTIDRKRYTSTKEVLDATLIHQSITGLYETRIDLSQLGGDGGGGGGGGGTLNIEDEYRLHETSKEPDVSLGSTWLSDFPQAWAETGGMGLAVRQAPLIIPLKATSTPVSIKQYPMSQEARLGIKPHIQRLLDQGILVPCQSPWNTPLLPVKKPGTNDYRPVQDLREVNKRVEDIHPTVPNPYNLLSGLPPSHQWYTVLDLKDAFFCLRLHPTSQPLFAFEWRDPEMGISGQLTWTRLPQGFKNSPTLFNEALHRDLAGFRIQHPDLILLQYVDDLLLAATSELDCQQGTRALLQTLGDLGYRASAKKAQICQKQVKYLGYLLKEGQRWLTEARKETVMGQPIPKTPRQLREFLGKAGFCRLFIPGFAEMAAPLYPLTKPGTLFNWGPDQQKAFQEIKQALLTAPALGLPDLTKPFELFVDEKQGYAKGVLTQKLGPWRRPVAYLSKKLDPVAAGWPPCLRMVAAIAVLTKDAGKLTMGQPLVILAPHAVEALVKQPPDRWLSNARMTHYQALLLDTDRVQFGPVVALNPATLLPLPEEGLQHDCLDILAEAHGTRSDLMDQPLPDADHTWYTDGSSFLQEGQRKAGAAVTTETEVIWARALPAGTSAQRAELIALTQALKMAEGKKLNVYTDSRYAFATAHIHGEIYRRRGWLTSEGKEIKNKDEILALLKALFLPKRLSIIHCPGHQKGNSAEARGNRMADQAAREVATRETPETSTLLAGKRTADGSEFEKRTADGSEFESPKKKAKVE

SEQ ID NO: 2379 - protein, 2094 aa, synthetic construct
MPAAKRVKLDGGDKKYSIGLDIGTNSVGWAVITDEYKVPSKKFKVLGNTDRHSIKKNLIGALLFDSGETAEATRLKRTARRRYTRRKNRICYLQEIFSNEMAKVDDSFFHRLEESFLVEEDKKHERHPIFGNIVDEVAYHEKYPTIYHLRKKLVDSTDKADLRLIYLALAHMIKFRGHFLIEGDLNPDNSDVDKLFIQLVQTYNQLFEENPINASGVDAKAILSARLSKSRRLENLIAQLPGEKKNGLFGNLIALSLGLTPNFKSNFDLAEDAKLQLSKDTYDDDLDNLLAQIGDQYADLFLAAKNLSDAILLSDILRVNTEITKAPLSASMIKRYDEHHQDLTLLKALVRQQLPEKYKEIFFDQSKNGYAGYIDGGASQEEFYKFIKPILEKMDGTEELLVKLNREDLLRKQRTFDNGSIPHQIHLGELHAILRRQEDFYPFLKDNREKIEKILTFRIPYYVGPLARGNSRFAWMTRKSEETITPWNFEEVVDKGASAQSFIERMTNFDKNLPNEKVLPKHSLLYEYFTVYNELTKVKYVTEGMRKPAFLSGEQKKAIVDLLFKTNRKVTVKQLKEDYFKKIECFDSVEISGVEDRFNASLGTYHDLLKIIKDKDFLDNEENEDILEDIVLTLTLFEDREMIEERLKTYAHLFDDKVMKQLKRRRYTGWGRLSRKLINGIRDKQSGKTILDFLKSDGFANRNFMQLIHDDSLTFKEDIQKAQVSGQGDSLHEHIANLAGSPAIKKGILQTVKVVDELVKVMGRHKPENIVIEMARENQTTQKGQKNSRERMKRIEEGIKELGSQILKEHPVENTQLQNEKLYLYYLQNGRDMYVDQELDINRLSDYDVDHIVPQSFLKDDSIDNKVLTRSDKARGKSDNVPSEEVVKKMKNYWRQLLNAKLITQRKFDNLTKAERGGLSELDKAGFIKRQLVETRQITKHVAQILDSRMNTKYDENDKLIREVKVITLKSKLVSDFRKDFQFYKVREINNYHHAHDAYLNAVVGTALIKKYPKLESEFVYGDYKVYDVRKMIAKSEQEIGKATAKYFFYSNIMNFFKTEITLANGEIRKRPLIETNGETGEIVWDKGRDFATVRKVLSMPQVNIVKKTEVQTGGFSKESILPKRNSDKLIARKKDWDPKKYGGFDSPTVAYSVLVVAKVEKGKSKKLKSVKELLGITIMERSSFEKNPIDFLEAKGYKEVKKDLIIKLPKYSLFELENGRKRMLASAGELQKGNELALPSKYVNFLYLASHYEKLKGSPEDNEQKQLFVEQHKHYLDEIIEQISEFSKRVILADANLDKVLSAYNKHRDKPIREQAENIIHLFTLTNLGAPAAFKYFDTTIDRKRYTSTKEVLDATLIHQSITGLYETRIDLSQLGGDGGGSSGGSGGGGGTLNIEDEYRLHETSKEPDVSLGSTWLSDFPQAWAETGGMGLAVRQAPLIIPLKATSTPVSIKQYPMSQEARLGIKPHIQRLLDQGILVPCQSPWNTPLLPVKKPGTNDYRPVQDLREVNKRVEDIHPTVPNPYNLLSGLPPSHQWYTVLDLKDAFFCLRLHPTSQPLFAFEWRDPEMGISGQLTWTRLPQGFKNSPTLFNEALHRDLAGFRIQHPDLILLQYVDDLLLAATSELDCQQGTRALLQTLGDLGYRASAKKAQICQKQVKYLGYLLKEGQRWLTEARKETVMGQPIPKTPRQLREFLGKAGFCRLFIPGFAEMAAPLYPLTKPGTLFNWGPDQQKAFQEIKQALLTAPALGLPDLTKPFELFVDEKQGYAKGVLTQKLGPWRRPVAYLSKKLDPVAAGWPPCLRMVAAIAVLTKDAGKLTMGQPLVILAPHAVEALVKQPPDRWLSNARMTHYQALLLDTDRVQFGPVVALNPATLLPLPEEGLQHDCLDILAEAHGTRSDLMDQPLPDADHTWYTDGSSFLQEGQRKAGAAVTTETEVIWARALPAGTSAQRAELIALTQALKMAEGKKLNVYTDSRYAFATAHIHGEIYRRRGWLTSEGKEIKNKDEILALLKALFLPKRLSIIHCPGHQKGNSAEARGNRMADQAAREVATRETPETSTLLAGKRTADGSEFEKRTADGSEFESPKKKAKVE

SEQ ID NO: 2380 - protein, 2094 aa, synthetic construct
MPAAKRVKLDGGDKKYSIGLDIGTNSVGWAVITDEYKVPSKKFKVLGNTDRHSIKKNLIGALLFDSGETAEATRLKRTARRRYTRRKNRICYLQEIFSNEMAKVDDSFFHRLEESFLVEEDKKHERHPIFGNIVDEVAYHEKYPTIYHLRKKLVDSTDKADLRLIYLALAHMIKFRGHFLIEGDLNPDNSDVDKLFIQLVQTYNQLFEENPINASGVDAKAILSARLSKSRRLENLIAQLPGEKKNGLFGNLIALSLGLTPNFKSNFDLAEDAKLQLSKDTYDDDLDNLLAQIGDQYADLFLAAKNLSDAILLSDILRVNTEITKAPLSASMIKRYDEHHQDLTLLKALVRQQLPEKYKEIFFDQSKNGYAGYIDGGASQEEFYKFIKPILEKMDGTEELLVKLNREDLLRKQRTFDNGSIPHQIHLGELHAILRRQEDFYPFLKDNREKIEKILTFRIPYYVGPLARGNSRFAWMTRKSEETITPWNFEEVVDKGASAQSFIERMTNFDKNLPNEKVLPKHSLLYEYFTVYNELTKVKYVTEGMRKPAFLSGEQKKAIVDLLFKTNRKVTVKQLKEDYFKKIECFDSVEISGVEDRFNASLGTYHDLLKIIKDKDFLDNEENEDILEDIVLTLTLFEDREMIEERLKTYAHLFDDKVMKQLKRRRYTGWGRLSRKLINGIRDKQSGKTILDFLKSDGFANRNFMQLIHDDSLTFKEDIQKAQVSGQGDSLHEHIANLAGSPAIKKGILQTVKVVDELVKVMGRHKPENIVIEMARENQTTQKGQKNSRERMKRIEEGIKELGSQILKEHPVENTQLQNEKLYLYYLQNGRDMYVDQELDINRLSDYDVDHIVPQSFLKDDSIDNKVLTRSDKARGKSDNVPSEEVVKKMKNYWRQLLNAKLITQRKFDNLTKAERGGLSELDKAGFIKRQLVETRQITKHVAQILDSRMNTKYDENDKLIREVKVITLKSKLVSDFRKDFQFYKVREINNYHHAHDAYLNAVVGTALIKKYPKLESEFVYGDYKVYDVRKMIAKSEQEIGKATAKYFFYSNIMNFFKTEITLANGEIRKRPLIETNGETGEIVWDKGRDFATVRKVLSMPQVNIVKKTEVQTGGFSKESILPKRNSDKLIARKKDWDPKKYGGFDSPTVAYSVLVVAKVEKGKSKKLKSVKELLGITIMERSSFEKNPIDFLEAKGYKEVKKDLIIKLPKYSLFELENGRKRMLASAGELQKGNELALPSKYVNFLYLASHYEKLKGSPEDNEQKQLFVEQHKHYLDEIIEQISEFSKRVILADANLDKVLSAYNKHRDKPIREQAENIIHLFTLTNLGAPAAFKYFDTTIDRKRYTSTKEVLDATLIHQSITGLYETRIDLSQLGGDGGPAPGSSGGSGGTLNIEDEYRLHETSKEPDVSLGSTWLSDFPQAWAETGGMGLAVRQAPLIIPLKATSTPVSIKQYPMSQEARLGIKPHIQRLLDQGILVPCQSPWNTPLLPVKKPGTNDYRPVQDLREVNKRVEDIHPTVPNPYNLLSGLPPSHQWYTVLDLKDAFFCLRLHPTSQPLFAFEWRDPEMGISGQLTWTRLPQGFKNSPTLFNEALHRDLAGFRIQHPDLILLQYVDDLLLAATSELDCQQGTRALLQTLGDLGYRASAKKAQICQKQVKYLGYLLKEGQRWLTEARKETVMGQPIPKTPRQLREFLGKAGFCRLFIPGFAEMAAPLYPLTKPGTLFNWGPDQQKAFQEIKQALLTAPALGLPDLTKPFELFVDEKQGYAKGVLTQKLGPWRRPVAYLSKKLDPVAAGWPPCLRMVAAIAVLTKDAGKLTMGQPLVILAPHAVEALVKQPPDRWLSNARMTHYQALLLDTDRVQFGPVVALNPATLLPLPEEGLQHDCLDILAEAHGTRSDLMDQPLPDADHTWYTDGSSFLQEGQRKAGAAVTTETEVIWARALPAGTSAQRAELIALTQALKMAEGKKLNVYTDSRYAFATAHIHGEIYRRRGWLTSEGKEIKNKDEILALLKALFLPKRLSIIHCPGHQKGNSAEARGNRMADQAAREVATRETPETSTLLAGKRTADGSEFEKRTADGSEFESPKKKAKVE

SEQ ID NO: 2381 - protein, 2090 aa, synthetic construct
MPAAKRVKLDGGDKKYSIGLDIGTNSVGWAVITDEYKVPSKKFKVLGNTDRHSIKKNLIGALLFDSGETAEATRLKRTARRRYTRRKNRICYLQEIFSNEMAKVDDSFFHRLEESFLVEEDKKHERHPIFGNIVDEVAYHEKYPTIYHLRKKLVDSTDKADLRLIYLALAHMIKFRGHFLIEGDLNPDNSDVDKLFIQLVQTYNQLFEENPINASGVDAKAILSARLSKSRRLENLIAQLPGEKKNGLFGNLIALSLGLTPNFKSNFDLAEDAKLQLSKDTYDDDLDNLLAQIGDQYADLFLAAKNLSDAILLSDILRVNTEITKAPLSASMIKRYDEHHQDLTLLKALVRQQLPEKYKEIFFDQSKNGYAGYIDGGASQEEFYKFIKPILEKMDGTEELLVKLNREDLLRKQRTFDNGSIPHQIHLGELHAILRRQEDFYPFLKDNREKIEKILTFRIPYYVGPLARGNSRFAWMTRKSEETITPWNFEEVVDKGASAQSFIERMTNFDKNLPNEKVLPKHSLLYEYFTVYNELTKVKYVTEGMRKPAFLSGEQKKAIVDLLFKTNRKVTVKQLKEDYFKKIECFDSVEISGVEDRFNASLGTYHDLLKIIKDKDFLDNEENEDILEDIVLTLTLFEDREMIEERLKTYAHLFDDKVMKQLKRRRYTGWGRLSRKLINGIRDKQSGKTILDFLKSDGFANRNFMQLIHDDSLTFKEDIQKAQVSGQGDSLHEHIANLAGSPAIKKGILQTVKVVDELVKVMGRHKPENIVIEMARENQTTQKGQKNSRERMKRIEEGIKELGSQILKEHPVENTQLQNEKLYLYYLQNGRDMYVDQELDINRLSDYDVDHIVPQSFLKDDSIDNKVLTRSDKARGKSDNVPSEEVVKKMKNYWRQLLNAKLITQRKFDNLTKAERGGLSELDKAGFIKRQLVETRQITKHVAQILDSRMNTKYDENDKLIREVKVITLKSKLVSDFRKDFQFYKVREINNYHHAHDAYLNAVVGTALIKKYPKLESEFVYGDYKVYDVRKMIAKSEQEIGKATAKYFFYSNIMNFFKTEITLANGEIRKRPLIETNGETGEIVWDKGRDFATVRKVLSMPQVNIVKKTEVQTGGFSKESILPKRNSDKLIARKKDWDPKKYGGFDSPTVAYSVLVVAKVEKGKSKKLKSVKELLGITIMERSSFEKNPIDFLEAKGYKEVKKDLIIKLPKYSLFELENGRKRMLASAGELQKGNELALPSKYVNFLYLASHYEKLKGSPEDNEQKQLFVEQHKHYLDEIIEQISEFSKRVILADANLDKVLSAYNKHRDKPIREQAENIIHLFTLTNLGAPAAFKYFDTTIDRKRYTSTKEVLDATLIHQSITGLYETRIDLSQLGGDGGGGGGSGGTLNIEDEYRLHETSKEPDVSLGSTWLSDFPQAWAETGGMGLAVRQAPLIIPLKATSTPVSIKQYPMSQEARLGIKPHIQRLLDQGILVPCQSPWNTPLLPVKKPGTNDYRPVQDLREVNKRVEDIHPTVPNPYNLLSGLPPSHQWYTVLDLKDAFFCLRLHPTSQPLFAFEWRDPEMGISGQLTWTRLPQGFKNSPTLFNEALHRDLAGFRIQHPDLILLQYVDDLLLAATSELDCQQGTRALLQTLGDLGYRASAKKAQICQKQVKYLGYLLKEGQRWLTEARKETVMGQPIPKTPRQLREFLGKAGFCRLFIPGFAEMAAPLYPLTKPGTLFNWGPDQQKAFQEIKQALLTAPALGLPDLTKPFELFVDEKQGYAKGVLTQKLGPWRRPVAYLSKKLDPVAAGWPPCLRMVAAIAVLTKDAGKLTMGQPLVILAPHAVEALVKQPPDRWLSNARMTHYQALLLDTDRVQFGPVVALNPATLLPLPEEGLQHDCLDILAEAHGTRSDLMDQPLPDADHTWYTDGSSFLQEGQRKAGAAVTTETEVIWARALPAGTSAQRAELIALTQALKMAEGKKLNVYTDSRYAFATAHIHGEIYRRRGWLTSEGKEIKNKDEILALLKALFLPKRLSIIHCPGHQKGNSAEARGNRMADQAAREVATRETPETSTLLAGKRTADGSEFEKRTADGSEFESPKKKAKVE

SEQ ID NO: 2382 - protein, 2093 aa, synthetic construct
MPAAKRVKLDGGDKKYSIGLDIGTNSVGWAVITDEYKVPSKKFKVLGNTDRHSIKKNLIGALLFDSGETAEATRLKRTARRRYTRRKNRICYLQEIFSNEMAKVDDSFFHRLEESFLVEEDKKHERHPIFGNIVDEVAYHEKYPTIYHLRKKLVDSTDKADLRLIYLALAHMIKFRGHFLIEGDLNPDNSDVDKLFIQLVQTYNQLFEENPINASGVDAKAILSARLSKSRRLENLIAQLPGEKKNGLFGNLIALSLGLTPNFKSNFDLAEDAKLQLSKDTYDDDLDNLLAQIGDQYADLFLAAKNLSDAILLSDILRVNTEITKAPLSASMIKRYDEHHQDLTLLKALVRQQLPEKYKEIFFDQSKNGYAGYIDGGASQEEFYKFIKPILEKMDGTEELLVKLNREDLLRKQRTFDNGSIPHQIHLGELHAILRRQEDFYPFLKDNREKIEKILTFRIPYYVGPLARGNSRFAWMTRKSEETITPWNFEEVVDKGASAQSFIERMTNFDKNLPNEKVLPKHSLLYEYFTVYNELTKVKYVTEGMRKPAFLSGEQKKAIVDLLFKTNRKVTVKQLKEDYFKKIECFDSVEISGVEDRFNASLGTYHDLLKIIKDKDFLDNEENEDILEDIVLTLTLFEDREMIEERLKTYAHLFDDKVMKQLKRRRYTGWGRLSRKLINGIRDKQSGKTILDFLKSDGFANRNFMQLIHDDSLTFKEDIQKAQVSGQGDSLHEHIANLAGSPAIKKGILQTVKVVDELVKVMGRHKPENIVIEMARENQTTQKGQKNSRERMKRIEEGIKELGSQILKEHPVENTQLQNEKLYLYYLQNGRDMYVDQELDINRLSDYDVDHIVPQSFLKDDSIDNKVLTRSDKARGKSDNVPSEEVVKKMKNYWRQLLNAKLITQRKFDNLTKAERGGLSELDKAGFIKRQLVETRQITKHVAQILDSRMNTKYDENDKLIREVKVITLKSKLVSDFRKDFQFYKVREINNYHHAHDAYLNAVVGTALIKKYPKLESEFVYGDYKVYDVRKMIAKSEQEIGKATAKYFFYSNIMNFFKTEITLANGEIRKRPLIETNGETGEIVWDKGRDFATVRKVLSMPQVNIVKKTEVQTGGFSKESILPKRNSDKLIARKKDWDPKKYGGFDSPTVAYSVLVVAKVEKGKSKKLKSVKELLGITIMERSSFEKNPIDFLEAKGYKEVKKDLIIKLPKYSLFELENGRKRMLASAGELQKGNELALPSKYVNFLYLASHYEKLKGSPEDNEQKQLFVEQHKHYLDEIIEQISEFSKRVILADANLDKVLSAYNKHRDKPIREQAENIIHLFTLTNLGAPAAFKYFDTTIDRKRYTSTKEVLDATLIHQSITGLYETRIDLSQLGGDGGGSSEAAAKGGTLNIEDEYRLHETSKEPDVSLGSTWLSDFPQAWAETGGMGLAVRQAPLIIPLKATSTPVSIKQYPMSQEARLGIKPHIQRLLDQGILVPCQSPWNTPLLPVKKPGTNDYRPVQDLREVNKRVEDIHPTVPNPYNLLSGLPPSHQWYTVLDLKDAFFCLRLHPTSQPLFAFEWRDPEMGISGQLTWTRLPQGFKNSPTLFNEALHRDLAGFRIQHPDLILLQYVDDLLLAATSELDCQQGTRALLQTLGDLGYRASAKKAQICQKQVKYLGYLLKEGQRWLTEARKETVMGQPIPKTPRQLREFLGKAGFCRLFIPGFAEMAAPLYPLTKPGTLFNWGPDQQKAFQEIKQALLTAPALGLPDLTKPFELFVDEKQGYAKGVLTQKLGPWRRPVAYLSKKLDPVAAGWPPCLRMVAAIAVLTKDAGKLTMGQPLVILAPHAVEALVKQPPDRWLSNARMTHYQALLLDTDRVQFGPVVALNPATLLPLPEEGLQHDCLDILAEAHGTRSDLMDQPLPDADHTWYTDGSSFLQEGQRKAGAAVTTETEVIWARALPAGTSAQRAELIALTQALKMAEGKKLNVYTDSRYAFATAHIHGEIYRRRGWLTSEGKEIKNKDEILALLKALFLPKRLSIIHCPGHQKGNSAEARGNRMADQAAREVATRETPETSTLLAGKRTADGSEFEKRTADGSEFESPKKKAKVE

SEQ ID NO: 2383 - protein, 2091 aa, synthetic construct
MPAAKRVKLDGGDKKYSIGLDIGTNSVGWAVITDEYKVPSKKFKVLGNTDRHSIKKNLIGALLFDSGETAEATRLKRTARRRYTRRKNRICYLQEIFSNEMAKVDDSFFHRLEESFLVEEDKKHERHPIFGNIVDEVAYHEKYPTIYHLRKKLVDSTDKADLRLIYLALAHMIKFRGHFLIEGDLNPDNSDVDKLFIQLVQTYNQLFEENPINASGVDAKAILSARLSKSRRLENLIAQLPGEKKNGLFGNLIALSLGLTPNFKSNFDLAEDAKLQLSKDTYDDDLDNLLAQIGDQYADLFLAAKNLSDAILLSDILRVNTEITKAPLSASMIKRYDEHHQDLTLLKALVRQQLPEKYKEIFFDQSKNGYAGYIDGGASQEEFYKFIKPILEKMDGTEELLVKLNREDLLRKQRTFDNGSIPHQIHLGELHAILRRQEDFYPFLKDNREKIEKILTFRIPYYVGPLARGNSRFAWMTRKSEETITPWNFEEVVDKGASAQSFIERMTNFDKNLPNEKVLPKHSLLYEYFTVYNELTKVKYVTEGMRKPAFLSGEQKKAIVDLLFKTNRKVTVKQLKEDYFKKIECFDSVEISGVEDRFNASLGTYHDLLKIIKDKDFLDNEENEDILEDIVLTLTLFEDREMIEERLKTYAHLFDDKVMKQLKRRRYTGWGRLSRKLINGIRDKQSGKTILDFLKSDGFANRNFMQLIHDDSLTFKEDIQKAQVSGQGDSLHEHIANLAGSPAIKKGILQTVKVVDELVKVMGRHKPENIVIEMARENQTTQKGQKNSRERMKRIEEGIKELGSQILKEHPVENTQLQNEKLYLYYLQNGRDMYVDQELDINRLSDYDVDHIVPQSFLKDDSIDNKVLTRSDKARGKSDNVPSEEVVKKMKNYWRQLLNAKLITQRKFDNLTKAERGGLSELDKAGFIKRQLVETRQITKHVAQILDSRMNTKYDENDKLIREVKVITLKSKLVSDFRKDFQFYKVREINNYHHAHDAYLNAVVGTALIKKYPKLESEFVYGDYKVYDVRKMIAKSEQEIGKATAKYFFYSNIMNFFKTEITLANGEIRKRPLIETNGETGEIVWDKGRDFATVRKVLSMPQVNIVKKTEVQTGGFSKESILPKRNSDKLIARKKDWDPKKYGGFDSPTVAYSVLVVAKVEKGKSKKLKSVKELLGITIMERSSFEKNPIDFLEAKGYKEVKKDLIIKLPKYSLFELENGRKRMLASAGELQKGNELALPSKYVNFLYLASHYEKLKGSPEDNEQKQLFVEQHKHYLDEIIEQISEFSKRVILADANLDKVLSAYNKHRDKPIREQAENIIHLFTLTNLGAPAAFKYFDTTIDRKRYTSTKEVLDATLIHQSITGLYETRIDLSQLGGDGGGGGGSSGGTLNIEDEYRLHETSKEPDVSLGSTWLSDFPQAWAETGGMGLAVRQAPLIIPLKATSTPVSIKQYPMSQEARLGIKPHIQRLLDQGILVPCQSPWNTPLLPVKKPGTNDYRPVQDLREVNKRVEDIHPTVPNPYNLLSGLPPSHQWYTVLDLKDAFFCLRLHPTSQPLFAFEWRDPEMGISGQLTWTRLPQGFKNSPTLFNEALHRDLAGFRIQHPDLILLQYVDDLLLAATSELDCQQGTRALLQTLGDLGYRASAKKAQICQKQVKYLGYLLKEGQRWLTEARKETVMGQPIPKTPRQLREFLGKAGFCRLFIPGFAEMAAPLYPLTKPGTLFNWGPDQQKAFQEIKQALLTAPALGLPDLTKPFELFVDEKQGYAKGVLTQKLGPWRRPVAYLSKKLDPVAAGWPPCLRMVAAIAVLTKDAGKLTMGQPLVILAPHAVEALVKQPPDRWLSNARMTHYQALLLDTDRVQFGPVVALNPATLLPLPEEGLQHDCLDILAEAHGTRSDLMDQPLPDADHTWYTDGSSFLQEGQRKAGAAVTTETEVIWARALPAGTSAQRAELIALTQALKMAEGKKLNVYTDSRYAFATAHIHGEIYRRRGWLTSEGKEIKNKDEILALLKALFLPKRLSIIHCPGHQKGNSAEARGNRMADQAAREVATRETPETSTLLAGKRTADGSEFEKRTADGSEFESPKKKAKVE

SEQ ID NO: 2384 - protein, 2096 aa, synthetic construct
MPAAKRVKLDGGDKKYSIGLDIGTNSVGWAVITDEYKVPSKKFKVLGNTDRHSIKKNLIGALLFDSGETAEATRLKRTARRRYTRRKNRICYLQEIFSNEMAKVDDSFFHRLEESFLVEEDKKHERHPIFGNIVDEVAYHEKYPTIYHLRKKLVDSTDKADLRLIYLALAHMIKFRGHFLIEGDLNPDNSDVDKLFIQLVQTYNQLFEENPINASGVDAKAILSARLSKSRRLENLIAQLPGEKKNGLFGNLIALSLGLTPNFKSNFDLAEDAKLQLSKDTYDDDLDNLLAQIGDQYADLFLAAKNLSDAILLSDILRVNTEITKAPLSASMIKRYDEHHQDLTLLKALVRQQLPEKYKEIFFDQSKNGYAGYIDGGASQEEFYKFIKPILEKMDGTEELLVKLNREDLLRKQRTFDNGSIPHQIHLGELHAILRRQEDFYPFLKDNREKIEKILTFRIPYYVGPLARGNSRFAWMTRKSEETITPWNFEEVVDKGASAQSFIERMTNFDKNLPNEKVLPKHSLLYEYFTVYNELTKVKYVTEGMRKPAFLSGEQKKAIVDLLFKTNRKVTVKQLKEDYFKKIECFDSVEISGVEDRFNASLGTYHDLLKIIKDKDFLDNEENEDILEDIVLTLTLFEDREMIEERLKTYAHLFDDKVMKQLKRRRYTGWGRLSRKLINGIRDKQSGKTILDFLKSDGFANRNFMQLIHDDSLTFKEDIQKAQVSGQGDSLHEHIANLAGSPAIKKGILQTVKVVDELVKVMGRHKPENIVIEMARENQTTQKGQKNSRERMKRIEEGIKELGSQILKEHPVENTQLQNEKLYLYYLQNGRDMYVDQELDINRLSDYDVDHIVPQSFLKDDSIDNKVLTRSDKARGKSDNVPSEEVVKKMKNYWRQLLNAKLITQRKFDNLTKAERGGLSELDKAGFIKRQLVETRQITKHVAQILDSRMNTKYDENDKLIREVKVITLKSKLVSDFRKDFQFYKVREINNYHHAHDAYLNAVVGTALIKKYPKLESEFVYGDYKVYDVRKMIAKSEQEIGKATAKYFFYSNIMNFFKTEITLANGEIRKRPLIETNGETGEIVWDKGRDFATVRKVLSMPQVNIVKKTEVQTGGFSKESILPKRNSDKLIARKKDWDPKKYGGFDSPTVAYSVLVVAKVEKGKSKKLKSVKELLGITIMERSSFEKNPIDFLEAKGYKEVKKDLIIKLPKYSLFELENGRKRMLASAGELQKGNELALPSKYVNFLYLASHYEKLKGSPEDNEQKQLFVEQHKHYLDEIIEQISEFSKRVILADANLDKVLSAYNKHRDKPIREQAENIIHLFTLTNLGAPAAFKYFDTTIDRKRYTSTKEVLDATLIHQSITGLYETRIDLSQLGGDGGGSSEAAAKGGGGGTLNIEDEYRLHETSKEPDVSLGSTWLSDFPQAWAETGGMGLAVRQAPLIIPLKATSTPVSIKQYPMSQEARLGIKPHIQRLLDQGILVPCQSPWNTPLLPVKKPGTNDYRPVQDLREVNKRVEDIHPTVPNPYNLLSGLPPSHQWYTVLDLKDAFFCLRLHPTSQPLFAFEWRDPEMGISGQLTWTRLPQGFKNSPTLFNEALHRDLAGFRIQHPDLILLQYVDDLLLAATSELDCQQGTRALLQTLGDLGYRASAKKAQICQKQVKYLGYLLKEGQRWLTEARKETVMGQPIPKTPRQLREFLGKAGFCRLFIPGFAEMAAPLYPLTKPGTLFNWGPDQQKAFQEIKQALLTAPALGLPDLTKPFELFVDEKQGYAKGVLTQKLGPWRRPVAYLSKKLDPVAAGWPPCLRMVAAIAVLTKDAGKLTMGQPLVILAPHAVEALVKQPPDRWLSNARMTHYQALLLDTDRVQFGPVVALNPATLLPLPEEGLQHDCLDILAEAHGTRSDLMDQPLPDADHTWYTDGSSFLQEGQRKAGAAVTTETEVIWARALPAGTSAQRAELIALTQALKMAEGKKLNVYTDSRYAFATAHIHGEIYRRRGWLTSEGKEIKNKDEILALLKALFLPKRLSIIHCPGHQKGNSAEARGNRMADQAAREVATRETPETSTLLAGKRTADGSEFEKRTADGSEFESPKKKAKVE

SEQ ID NO: 2385 - protein, 2096 aa, synthetic construct
MPAAKRVKLDGGDKKYSIGLDIGTNSVGWAVITDEYKVPSKKFKVLGNTDRHSIKKNLIGALLFDSGETAEATRLKRTARRRYTRRKNRICYLQEIFSNEMAKVDDSFFHRLEESFLVEEDKKHERHPIFGNIVDEVAYHEKYPTIYHLRKKLVDSTDKADLRLIYLALAHMIKFRGHFLIEGDLNPDNSDVDKLFIQLVQTYNQLFEENPINASGVDAKAILSARLSKSRRLENLIAQLPGEKKNGLFGNLIALSLGLTPNFKSNFDLAEDAKLQLSKDTYDDDLDNLLAQIGDQYADLFLAAKNLSDAILLSDILRVNTEITKAPLSASMIKRYDEHHQDLTLLKALVRQQLPEKYKEIFFDQSKNGYAGYIDGGASQEEFYKFIKPILEKMDGTEELLVKLNREDLLRKQRTFDNGSIPHQIHLGELHAILRRQEDFYPFLKDNREKIEKILTFRIPYYVGPLARGNSRFAWMTRKSEETITPWNFEEVVDKGASAQSFIERMTNFDKNLPNEKVLPKHSLLYEYFTVYNELTKVKYVTEGMRKPAFLSGEQKKAIVDLLFKTNRKVTVKQLKEDYFKKIECFDSVEISGVEDRFNASLGTYHDLLKIIKDKDFLDNEENEDILEDIVLTLTLFEDREMIEERLKTYAHLFDDKVMKQLKRRRYTGWGRLSRKLINGIRDKQSGKTILDFLKSDGFANRNFMQLIHDDSLTFKEDIQKAQVSGQGDSLHEHIANLAGSPAIKKGILQTVKVVDELVKVMGRHKPENIVIEMARENQTTQKGQKNSRERMKRIEEGIKELGSQILKEHPVENTQLQNEKLYLYYLQNGRDMYVDQELDINRLSDYDVDHIVPQSFLKDDSIDNKVLTRSDKARGKSDNVPSEEVVKKMKNYWRQLLNAKLITQRKFDNLTKAERGGLSELDKAGFIKRQLVETRQITKHVAQILDSRMNTKYDENDKLIREVKVITLKSKLVSDFRKDFQFYKVREINNYHHAHDAYLNAVVGTALIKKYPKLESEFVYGDYKVYDVRKMIAKSEQEIGKATAKYFFYSNIMNFFKTEITLANGEIRKRPLIETNGETGEIVWDKGRDFATVRKVLSMPQVNIVKKTEVQTGGFSKESILPKRNSDKLIARKKDWDPKKYGGFDSPTVAYSVLVVAKVEKGKSKKLKSVKELLGITIMERSSFEKNPIDFLEAKGYKEVKKDLIIKLPKYSLFELENGRKRMLASAGELQKGNELALPSKYVNFLYLASHYEKLKGSPEDNEQKQLFVEQHKHYLDEIIEQISEFSKRVILADANLDKVLSAYNKHRDKPIREQAENIIHLFTLTNLGAPAAFKYFDTTIDRKRYTSTKEVLDATLIHQSITGLYETRIDLSQLGGDGGGGGEAAAKPAPGGTLNIEDEYRLHETSKEPDVSLGSTWLSDFPQAWAETGGMGLAVRQAPLIIPLKATSTPVSIKQYPMSQEARLGIKPHIQRLLDQGILVPCQSPWNTPLLPVKKPGTNDYRPVQDLREVNKRVEDIHPTVPNPYNLLSGLPPSHQWYTVLDLKDAFFCLRLHPTSQPLFAFEWRDPEMGISGQLTWTRLPQGFKNSPTLFNEALHRDLAGFRIQHPDLILLQYVDDLLLAATSELDCQQGTRALLQTLGDLGYRASAKKAQICQKQVKYLGYLLKEGQRWLTEARKETVMGQPIPKTPRQLREFLGKAGFCRLFIPGFAEMAAPLYPLTKPGTLFNWGPDQQKAFQEIKQALLTAPALGLPDLTKPFELFVDEKQGYAKGVLTQKLGPWRRPVAYLSKKLDPVAAGWPPCLRMVAAIAVLTKDAGKLTMGQPLVILAPHAVEALVKQPPDRWLSNARMTHYQALLLDTDRVQFGPVVALNPATLLPLPEEGLQHDCLDILAEAHGTRSDLMDQPLPDADHTWYTDGSSFLQEGQRKAGAAVTTETEVIWARALPAGTSAQRAELIALTQALKMAEGKKLNVYTDSRYAFATAHIHGEIYRRRGWLTSEGKEIKNKDEILALLKALFLPKRLSIIHCPGHQKGNSAEARGNRMADQAAREVATRETPETSTLLAGKRTADGSEFEKRTADGSEFESPKKKAKVE

SEQ ID NO: 2386 - protein, 2096 aa, synthetic construct
MPAAKRVKLDGGDKKYSIGLDIGTNSVGWAVITDEYKVPSKKFKVLGNTDRHSIKKNLIGALLFDSGETAEATRLKRTARRRYTRRKNRICYLQEIFSNEMAKVDDSFFHRLEESFLVEEDKKHERHPIFGNIVDEVAYHEKYPTIYHLRKKLVDSTDKADLRLIYLALAHMIKFRGHFLIEGDLNPDNSDVDKLFIQLVQTYNQLFEENPINASGVDAKAILSARLSKSRRLENLIAQLPGEKKNGLFGNLIALSLGLTPNFKSNFDLAEDAKLQLSKDTYDDDLDNLLAQIGDQYADLFLAAKNLSDAILLSDILRVNTEITKAPLSASMIKRYDEHHQDLTLLKALVRQQLPEKYKEIFFDQSKNGYAGYIDGGASQEEFYKFIKPILEKMDGTEELLVKLNREDLLRKQRTFDNGSIPHQIHLGELHAILRRQEDFYPFLKDNREKIEKILTFRIPYYVGPLARGNSRFAWMTRKSEETITPWNFEEVVDKGASAQSFIERMTNFDKNLPNEKVLPKHSLLYEYFTVYNELTKVKYVTEGMRKPAFLSGEQKKAIVDLLFKTNRKVTVKQLKEDYFKKIECFDSVEISGVEDRFNASLGTYHDLLKIIKDKDFLDNEENEDILEDIVLTLTLFEDREMIEERLKTYAHLFDDKVMKQLKRRRYTGWGRLSRKLINGIRDKQSGKTILDFLKSDGFANRNFMQLIHDDSLTFKEDIQKAQVSGQGDSLHEHIANLAGSPAIKKGILQTVKVVDELVKVMGRHKPENIVIEMARENQTTQKGQKNSRERMKRIEEGIKELGSQILKEHPVENTQLQNEKLYLYYLQNGRDMYVDQELDINRLSDYDVDHIVPQSFLKDDSIDNKVLTRSDKARGKSDNVPSEEVVKKMKNYWRQLLNAKLITQRKFDNLTKAERGGLSELDKAGFIKRQLVETRQITKHVAQILDSRMNTKYDENDKLIREVKVITLKSKLVSDFRKDFQFYKVREINNYHHAHDAYLNAVVGTALIKKYPKLESEFVYGDYKVYDVRKMIAKSEQEIGKATAKYFFYSNIMNFFKTEITLANGEIRKRPLIETNGETGEIVWDKGRDFATVRKVLSMPQVNIVKKTEVQTGGFSKESILPKRNSDKLIARKKDWDPKKYGGFDSPTVAYSVLVVAKVEKGKSKKLKSVKELLGITIMERSSFEKNPIDFLEAKGYKEVKKDLIIKLPKYSLFELENGRKRMLASAGELQKGNELALPSKYVNFLYLASHYEKLKGSPEDNEQKQLFVEQHKHYLDEIIEQISEFSKRVILADANLDKVLSAYNKHRDKPIREQAENIIHLFTLTNLGAPAAFKYFDTTIDRKRYTSTKEVLDATLIHQSITGLYETRIDLSQLGGDGGGSSGGSEAAAKGGTLNIEDEYRLHETSKEPDVSLGSTWLSDFPQAWAETGGMGLAVRQAPLIIPLKATSTPVSIKQYPMSQEARLGIKPHIQRLLDQGILVPCQSPWNTPLLPVKKPGTNDYRPVQDLREVNKRVEDIHPTVPNPYNLLSGLPPSHQWYTVLDLKDAFFCLRLHPTSQPLFAFEWRDPEMGISGQLTWTRLPQGFKNSPTLFNEALHRDLAGFRIQHPDLILLQYVDDLLLAATSELDCQQGTRALLQTLGDLGYRASAKKAQICQKQVKYLGYLLKEGQRWLTEARKETVMGQPIPKTPRQLREFLGKAGFCRLFIPGFAEMAAPLYPLTKPGTLFNWGPDQQKAFQEIKQALLTAPALGLPDLTKPFELFVDEKQGYAKGVLTQKLGPWRRPVAYLSKKLDPVAAGWPPCLRMVAAIAVLTKDAGKLTMGQPLVILAPHAVEALVKQPPDRWLSNARMTHYQALLLDTDRVQFGPVVALNPATLLPLPEEGLQHDCLDILAEAHGTRSDLMDQPLPDADHTWYTDGSSFLQEGQRKAGAAVTTETEVIWARALPAGTSAQRAELIALTQALKMAEGKKLNVYTDSRYAFATAHIHGEIYRRRGWLTSEGKEIKNKDEILALLKALFLPKRLSIIHCPGHQKGNSAEARGNRMADQAAREVATRETPETSTLLAGKRTADGSEFEKRTADGSEFESPKKKAKVE

SEQ ID NO: 2387 - protein, 2094 aa, synthetic construct
MPAAKRVKLDGGDKKYSIGLDIGTNSVGWAVITDEYKVPSKKFKVLGNTDRHSIKKNLIGALLFDSGETAEATRLKRTARRRYTRRKNRICYLQEIFSNEMAKVDDSFFHRLEESFLVEEDKKHERHPIFGNIVDEVAYHEKYPTIYHLRKKLVDSTDKADLRLIYLALAHMIKFRGHFLIEGDLNPDNSDVDKLFIQLVQTYNQLFEENPINASGVDAKAILSARLSKSRRLENLIAQLPGEKKNGLFGNLIALSLGLTPNFKSNFDLAEDAKLQLSKDTYDDDLDNLLAQIGDQYADLFLAAKNLSDAILLSDILRVNTEITKAPLSASMIKRYDEHHQDLTLLKALVRQQLPEKYKEIFFDQSKNGYAGYIDGGASQEEFYKFIKPILEKMDGTEELLVKLNREDLLRKQRTFDNGSIPHQIHLGELHAILRRQEDFYPFLKDNREKIEKILTFRIPYYVGPLARGNSRFAWMTRKSEETITPWNFEEVVDKGASAQSFIERMTNFDKNLPNEKVLPKHSLLYEYFTVYNELTKVKYVTEGMRKPAFLSGEQKKAIVDLLFKTNRKVTVKQLKEDYFKKIECFDSVEISGVEDRFNASLGTYHDLLKIIKDKDFLDNEENEDILEDIVLTLTLFEDREMIEERLKTYAHLFDDKVMKQLKRRRYTGWGRLSRKLINGIRDKQSGKTILDFLKSDGFANRNFMQLIHDDSLTFKEDIQKAQVSGQGDSLHEHIANLAGSPAIKKGILQTVKVVDELVKVMGRHKPENIVIEMARENQTTQKGQKNSRERMKRIEEGIKELGSQILKEHPVENTQLQNEKLYLYYLQNGRDMYVDQELDINRLSDYDVDHIVPQSFLKDDSIDNKVLTRSDKARGKSDNVPSEEVVKKMKNYWRQLLNAKLITQRKFDNLTKAERGGLSELDKAGFIKRQLVETRQITKHVAQILDSRMNTKYDENDKLIREVKVITLKSKLVSDFRKDFQFYKVREINNYHHAHDAYLNAVVGTALIKKYPKLESEFVYGDYKVYDVRKMIAKSEQEIGKATAKYFFYSNIMNFFKTEITLANGEIRKRPLIETNGETGEIVWDKGRDFATVRKVLSMPQVNIVKKTEVQTGGFSKESILPKRNSDKLIARKKDWDPKKYGGFDSPTVAYSVLVVAKVEKGKSKKLKSVKELLGITIMERSSFEKNPIDFLEAKGYKEVKKDLIIKLPKYSLFELENGRKRMLASAGELQKGNELALPSKYVNFLYLASHYEKLKGSPEDNEQKQLFVEQHKHYLDEIIEQISEFSKRVILADANLDKVLSAYNKHRDKPIREQAENIIHLFTLTNLGAPAAFKYFDTTIDRKRYTSTKEVLDATLIHQSITGLYETRIDLSQLGGDGGGGSPAPGSSGGTLNIEDEYRLHETSKEPDVSLGSTWLSDFPQAWAETGGMGLAVRQAPLIIPLKATSTPVSIKQYPMSQEARLGIKPHIQRLLDQGILVPCQSPWNTPLLPVKKPGTNDYRPVQDLREVNKRVEDIHPTVPNPYNLLSGLPPSHQWYTVLDLKDAFFCLRLHPTSQPLFAFEWRDPEMGISGQLTWTRLPQGFKNSPTLFNEALHRDLAGFRIQHPDLILLQYVDDLLLAATSELDCQQGTRALLQTLGDLGYRASAKKAQICQKQVKYLGYLLKEGQRWLTEARKETVMGQPIPKTPRQLREFLGKAGFCRLFIPGFAEMAAPLYPLTKPGTLFNWGPDQQKAFQEIKQALLTAPALGLPDLTKPFELFVDEKQGYAKGVLTQKLGPWRRPVAYLSKKLDPVAAGWPPCLRMVAAIAVLTKDAGKLTMGQPLVILAPHAVEALVKQPPDRWLSNARMTHYQALLLDTDRVQFGPVVALNPATLLPLPEEGLQHDCLDILAEAHGTRSDLMDQPLPDADHTWYTDGSSFLQEGQRKAGAAVTTETEVIWARALPAGTSAQRAELIALTQALKMAEGKKLNVYTDSRYAFATAHIHGEIYRRRGWLTSEGKEIKNKDEILALLKALFLPKRLSIIHCPGHQKGNSAEARGNRMADQAAREVATRETPETSTLLAGKRTADGSEFEKRTADGSEFESPKKKAKVE

SEQ ID NO: 2388 - protein, 2101 aa, synthetic construct
MPAAKRVKLDGGDKKYSIGLDIGTNSVGWAVITDEYKVPSKKFKVLGNTDRHSIKKNLIGALLFDSGETAEATRLKRTARRRYTRRKNRICYLQEIFSNEMAKVDDSFFHRLEESFLVEEDKKHERHPIFGNIVDEVAYHEKYPTIYHLRKKLVDSTDKADLRLIYLALAHMIKFRGHFLIEGDLNPDNSDVDKLFIQLVQTYNQLFEENPINASGVDAKAILSARLSKSRRLENLIAQLPGEKKNGLFGNLIALSLGLTPNFKSNFDLAEDAKLQLSKDTYDDDLDNLLAQIGDQYADLFLAAKNLSDAILLSDILRVNTEITKAPLSASMIKRYDEHHQDLTLLKALVRQQLPEKYKEIFFDQSKNGYAGYIDGGASQEEFYKFIKPILEKMDGTEELLVKLNREDLLRKQRTFDNGSIPHQIHLGELHAILRRQEDFYPFLKDNREKIEKILTFRIPYYVGPLARGNSRFAWMTRKSEETITPWNFEEVVDKGASAQSFIERMTNFDKNLPNEKVLPKHSLLYEYFTVYNELTKVKYVTEGMRKPAFLSGEQKKAIVDLLFKTNRKVTVKQLKEDYFKKIECFDSVEISGVEDRFNASLGTYHDLLKIIKDKDFLDNEENEDILEDIVLTLTLFEDREMIEERLKTYAHLFDDKVMKQLKRRRYTGWGRLSRKLINGIRDKQSGKTILDFLKSDGFANRNFMQLIHDDSLTFKEDIQKAQVSGQGDSLHEHIANLAGSPAIKKGILQTVKVVDELVKVMGRHKPENIVIEMARENQTTQKGQKNSRERMKRIEEGIKELGSQILKEHPVENTQLQNEKLYLYYLQNGRDMYVDQELDINRLSDYDVDHIVPQSFLKDDSIDNKVLTRSDKARGKSDNVPSEEVVKKMKNYWRQLLNAKLITQRKFDNLTKAERGGLSELDKAGFIKRQLVETRQITKHVAQILDSRMNTKYDENDKLIREVKVITLKSKLVSDFRKDFQFYKVREINNYHHAHDAYLNAVVGTALIKKYPKLESEFVYGDYKVYDVRKMIAKSEQEIGKATAKYFFYSNIMNFFKTEITLANGEIRKRPLIETNGETGEIVWDKGRDFATVRKVLSMPQVNIVKKTEVQTGGFSKESILPKRNSDKLIARKKDWDPKKYGGFDSPTVAYSVLVVAKVEKGKSKKLKSVKELLGITIMERSSFEKNPIDFLEAKGYKEVKKDLIIKLPKYSLFELENGRKRMLASAGELQKGNELALPSKYVNFLYLASHYEKLKGSPEDNEQKQLFVEQHKHYLDEIIEQISEFSKRVILADANLDKVLSAYNKHRDKPIREQAENIIHLFTLTNLGAPAAFKYFDTTIDRKRYTSTKEVLDATLIHQSITGLYETRIDLSQLGGDGGSGSETPGTSESATPESGGTLNIEDEYRLHETSKEPDVSLGSTWLSDFPQAWAETGGMGLAVRQAPLIIPLKATSTPVSIKQYPMSQEARLGIKPHIQRLLDQGILVPCQSPWNTPLLPVKKPGTNDYRPVQDLREVNKRVEDIHPTVPNPYNLLSGLPPSHQWYTVLDLKDAFFCLRLHPTSQPLFAFEWRDPEMGISGQLTWTRLPQGFKNSPTLFNEALHRDLAGFRIQHPDLILLQYVDDLLLAATSELDCQQGTRALLQTLGDLGYRASAKKAQICQKQVKYLGYLLKEGQRWLTEARKETVMGQPIPKTPRQLREFLGKAGFCRLFIPGFAEMAAPLYPLTKPGTLFNWGPDQQKAFQEIKQALLTAPALGLPDLTKPFELFVDEKQGYAKGVLTQKLGPWRRPVAYLSKKLDPVAAGWPPCLRMVAAIAVLTKDAGKLTMGQPLVILAPHAVEALVKQPPDRWLSNARMTHYQALLLDTDRVQFGPVVALNPATLLPLPEEGLQHDCLDILAEAHGTRSDLMDQPLPDADHTWYTDGSSFLQEGQRKAGAAVTTETEVIWARALPAGTSAQRAELIALTQALKMAEGKKLNVYTDSRYAFATAHIHGEIYRRRGWLTSEGKEIKNKDEILALLKALFLPKRLSIIHCPGHQKGNSAEARGNRMADQAAREVATRETPETSTLLAGKRTADGSEFEKRTADGSEFESPKKKAKVE

SEQ ID NO: 2389 - protein, 2091 aa, synthetic construct
MPAAKRVKLDGGDKKYSIGLDIGTNSVGWAVITDEYKVPSKKFKVLGNTDRHSIKKNLIGALLFDSGETAEATRLKRTARRRYTRRKNRICYLQEIFSNEMAKVDDSFFHRLEESFLVEEDKKHERHPIFGNIVDEVAYHEKYPTIYHLRKKLVDSTDKADLRLIYLALAHMIKFRGHFLIEGDLNPDNSDVDKLFIQLVQTYNQLFEENPINASGVDAKAILSARLSKSRRLENLIAQLPGEKKNGLFGNLIALSLGLTPNFKSNFDLAEDAKLQLSKDTYDDDLDNLLAQIGDQYADLFLAAKNLSDAILLSDILRVNTEITKAPLSASMIKRYDEHHQDLTLLKALVRQQLPEKYKEIFFDQSKNGYAGYIDGGASQEEFYKFIKPILEKMDGTEELLVKLNREDLLRKQRTFDNGSIPHQIHLGELHAILRRQEDFYPFLKDNREKIEKILTFRIPYYVGPLARGNSRFAWMTRKSEETITPWNFEEVVDKGASAQSFIERMTNFDKNLPNEKVLPKHSLLYEYFTVYNELTKVKYVTEGMRKPAFLSGEQKKAIVDLLFKTNRKVTVKQLKEDYFKKIECFDSVEISGVEDRFNASLGTYHDLLKIIKDKDFLDNEENEDILEDIVLTLTLFEDREMIEERLKTYAHLFDDKVMKQLKRRRYTGWGRLSRKLINGIRDKQSGKTILDFLKSDGFANRNFMQLIHDDSLTFKEDIQKAQVSGQGDSLHEHIANLAGSPAIKKGILQTVKVVDELVKVMGRHKPENIVIEMARENQTTQKGQKNSRERMKRIEEGIKELGSQILKEHPVENTQLQNEKLYLYYLQNGRDMYVDQELDINRLSDYDVDHIVPQSFLKDDSIDNKVLTRSDKARGKSDNVPSEEVVKKMKNYWRQLLNAKLITQRKFDNLTKAERGGLSELDKAGFIKRQLVETRQITKHVAQILDSRMNTKYDENDKLIREVKVITLKSKLVSDFRKDFQFYKVREINNYHHAHDAYLNAVVGTALIKKYPKLESEFVYGDYKVYDVRKMIAKSEQEIGKATAKYFFYSNIMNFFKTEITLANGEIRKRPLIETNGETGEIVWDKGRDFATVRKVLSMPQVNIVKKTEVQTGGFSKESILPKRNSDKLIARKKDWDPKKYGGFDSPTVAYSVLVVAKVEKGKSKKLKSVKELLGITIMERSSFEKNPIDFLEAKGYKEVKKDLIIKLPKYSLFELENGRKRMLASAGELQKGNELALPSKYVNFLYLASHYEKLKGSPEDNEQKQLFVEQHKHYLDEIIEQISEFSKRVILADANLDKVLSAYNKHRDKPIREQAENIIHLFTLTNLGAPAAFKYFDTTIDRKRYTSTKEVLDATLIHQSITGLYETRIDLSQLGGDGGGGSPAPGGTLNIEDEYRLHETSKEPDVSLGSTWLSDFPQAWAETGGMGLAVRQAPLIIPLKATSTPVSIKQYPMSQEARLGIKPHIQRLLDQGILVPCQSPWNTPLLPVKKPGTNDYRPVQDLREVNKRVEDIHPTVPNPYNLLSGLPPSHQWYTVLDLKDAFFCLRLHPTSQPLFAFEWRDPEMGISGQLTWTRLPQGFKNSPTLFNEALHRDLAGFRIQHPDLILLQYVDDLLLAATSELDCQQGTRALLQTLGDLGYRASAKKAQICQKQVKYLGYLLKEGQRWLTEARKETVMGQPIPKTPRQLREFLGKAGFCRLFIPGFAEMAAPLYPLTKPGTLFNWGPDQQKAFQEIKQALLTAPALGLPDLTKPFELFVDEKQGYAKGVLTQKLGPWRRPVAYLSKKLDPVAAGWPPCLRMVAAIAVLTKDAGKLTMGQPLVILAPHAVEALVKQPPDRWLSNARMTHYQALLLDTDRVQFGPVVALNPATLLPLPEEGLQHDCLDILAEAHGTRSDLMDQPLPDADHTWYTDGSSFLQEGQRKAGAAVTTETEVIWARALPAGTSAQRAELIALTQALKMAEGKKLNVYTDSRYAFATAHIHGEIYRRRGWLTSEGKEIKNKDEILALLKALFLPKRLSIIHCPGHQKGNSAEARGNRMADQAAREVATRETPETSTLLAGKRTADGSEFEKRTADGSEFESPKKKAKVE

SEQ ID NO: 2390 - protein, 2096 aa, synthetic construct
MPAAKRVKLDGGDKKYSIGLDIGTNSVGWAVITDEYKVPSKKFKVLGNTDRHSIKKNLIGALLFDSGETAEATRLKRTARRRYTRRKNRICYLQEIFSNEMAKVDDSFFHRLEESFLVEEDKKHERHPIFGNIVDEVAYHEKYPTIYHLRKKLVDSTDKADLRLIYLALAHMIKFRGHFLIEGDLNPDNSDVDKLFIQLVQTYNQLFEENPINASGVDAKAILSARLSKSRRLENLIAQLPGEKKNGLFGNLIALSLGLTPNFKSNFDLAEDAKLQLSKDTYDDDLDNLLAQIGDQYADLFLAAKNLSDAILLSDILRVNTEITKAPLSASMIKRYDEHHQDLTLLKALVRQQLPEKYKEIFFDQSKNGYAGYIDGGASQEEFYKFIKPILEKMDGTEELLVKLNREDLLRKQRTFDNGSIPHQIHLGELHAILRRQEDFYPFLKDNREKIEKILTFRIPYYVGPLARGNSRFAWMTRKSEETITPWNFEEVVDKGASAQSFIERMTNFDKNLPNEKVLPKHSLLYEYFTVYNELTKVKYVTEGMRKPAFLSGEQKKAIVDLLFKTNRKVTVKQLKEDYFKKIECFDSVEISGVEDRFNASLGTYHDLLKIIKDKDFLDNEENEDILEDIVLTLTLFEDREMIEERLKTYAHLFDDKVMKQLKRRRYTGWGRLSRKLINGIRDKQSGKTILDFLKSDGFANRNFMQLIHDDSLTFKEDIQKAQVSGQGDSLHEHIANLAGSPAIKKGILQTVKVVDELVKVMGRHKPENIVIEMARENQTTQKGQKNSRERMKRIEEGIKELGSQILKEHPVENTQLQNEKLYLYYLQNGRDMYVDQELDINRLSDYDVDHIVPQSFLKDDSIDNKVLTRSDKARGKSDNVPSEEVVKKMKNYWRQLLNAKLITQRKFDNLTKAERGGLSELDKAGFIKRQLVETRQITKHVAQILDSRMNTKYDENDKLIREVKVITLKSKLVSDFRKDFQFYKVREINNYHHAHDAYLNAVVGTALIKKYPKLESEFVYGDYKVYDVRKMIAKSEQEIGKATAKYFFYSNIMNFFKTEITLANGEIRKRPLIETNGETGEIVWDKGRDFATVRKVLSMPQVNIVKKTEVQTGGFSKESILPKRNSDKLIARKKDWDPKKYGGFDSPTVAYSVLVVAKVEKGKSKKLKSVKELLGITIMERSSFEKNPIDFLEAKGYKEVKKDLIIKLPKYSLFELENGRKRMLASAGELQKGNELALPSKYVNFLYLASHYEKLKGSPEDNEQKQLFVEQHKHYLDEIIEQISEFSKRVILADANLDKVLSAYNKHRDKPIREQAENIIHLFTLTNLGAPAAFKYFDTTIDRKRYTSTKEVLDATLIHQSITGLYETRIDLSQLGGDGGGSSGGGEAAAKGGTLNIEDEYRLHETSKEPDVSLGSTWLSDFPQAWAETGGMGLAVRQAPLIIPLKATSTPVSIKQYPMSQEARLGIKPHIQRLLDQGILVPCQSPWNTPLLPVKKPGTNDYRPVQDLREVNKRVEDIHPTVPNPYNLLSGLPPSHQWYTVLDLKDAFFCLRLHPTSQPLFAFEWRDPEMGISGQLTWTRLPQGFKNSPTLFNEALHRDLAGFRIQHPDLILLQYVDDLLLAATSELDCQQGTRALLQTLGDLGYRASAKKAQICQKQVKYLGYLLKEGQRWLTEARKETVMGQPIPKTPRQLREFLGKAGFCRLFIPGFAEMAAPLYPLTKPGTLFNWGPDQQKAFQEIKQALLTAPALGLPDLTKPFELFVDEKQGYAKGVLTQKLGPWRRPVAYLSKKLDPVAAGWPPCLRMVAAIAVLTKDAGKLTMGQPLVILAPHAVEALVKQPPDRWLSNARMTHYQALLLDTDRVQFGPVVALNPATLLPLPEEGLQHDCLDILAEAHGTRSDLMDQPLPDADHTWYTDGSSFLQEGQRKAGAAVTTETEVIWARALPAGTSAQRAELIALTQALKMAEGKKLNVYTDSRYAFATAHIHGEIYRRRGWLTSEGKEIKNKDEILALLKALFLPKRLSIIHCPGHQKGNSAEARGNRMADQAAREVATRETPETSTLLAGKRTADGSEFEKRTADGSEFESPKKKAKVE

SEQ ID NO: 2391 - protein, 2096 aa, synthetic construct
MPAAKRVKLDGGDKKYSIGLDIGTNSVGWAVITDEYKVPSKKFKVLGNTDRHSIKKNLIGALLFDSGETAEATRLKRTARRRYTRRKNRICYLQEIFSNEMAKVDDSFFHRLEESFLVEEDKKHERHPIFGNIVDEVAYHEKYPTIYHLRKKLVDSTDKADLRLIYLALAHMIKFRGHFLIEGDLNPDNSDVDKLFIQLVQTYNQLFEENPINASGVDAKAILSARLSKSRRLENLIAQLPGEKKNGLFGNLIALSLGLTPNFKSNFDLAEDAKLQLSKDTYDDDLDNLLAQIGDQYADLFLAAKNLSDAILLSDILRVNTEITKAPLSASMIKRYDEHHQDLTLLKALVRQQLPEKYKEIFFDQSKNGYAGYIDGGASQEEFYKFIKPILEKMDGTEELLVKLNREDLLRKQRTFDNGSIPHQIHLGELHAILRRQEDFYPFLKDNREKIEKILTFRIPYYVGPLARGNSRFAWMTRKSEETITPWNFEEVVDKGASAQSFIERMTNFDKNLPNEKVLPKHSLLYEYFTVYNELTKVKYVTEGMRKPAFLSGEQKKAIVDLLFKTNRKVTVKQLKEDYFKKIECFDSVEISGVEDRFNASLGTYHDLLKIIKDKDFLDNEENEDILEDIVLTLTLFEDREMIEERLKTYAHLFDDKVMKQLKRRRYTGWGRLSRKLINGIRDKQSGKTILDFLKSDGFANRNFMQLIHDDSLTFKEDIQKAQVSGQGDSLHEHIANLAGSPAIKKGILQTVKVVDELVKVMGRHKPENIVIEMARENQTTQKGQKNSRERMKRIEEGIKELGSQILKEHPVENTQLQNEKLYLYYLQNGRDMYVDQELDINRLSDYDVDHIVPQSFLKDDSIDNKVLTRSDKARGKSDNVPSEEVVKKMKNYWRQLLNAKLITQRKFDNLTKAERGGLSELDKAGFIKRQLVETRQITKHVAQILDSRMNTKYDENDKLIREVKVITLKSKLVSDFRKDFQFYKVREINNYHHAHDAYLNAVVGTALIKKYPKLESEFVYGDYKVYDVRKMIAKSEQEIGKATAKYFFYSNIMNFFKTEITLANGEIRKRPLIETNGETGEIVWDKGRDFATVRKVLSMPQVNIVKKTEVQTGGFSKESILPKRNSDKLIARKKDWDPKKYGGFDSPTVAYSVLVVAKVEKGKSKKLKSVKELLGITIMERSSFEKNPIDFLEAKGYKEVKKDLIIKLPKYSLFELENGRKRMLASAGELQKGNELALPSKYVNFLYLASHYEKLKGSPEDNEQKQLFVEQHKHYLDEIIEQISEFSKRVILADANLDKVLSAYNKHRDKPIREQAENIIHLFTLTNLGAPAAFKYFDTTIDRKRYTSTKEVLDATLIHQSITGLYETRIDLSQLGGDGGEAAAKGGGPAPGGTLNIEDEYRLHETSKEPDVSLGSTWLSDFPQAWAETGGMGLAVRQAPLIIPLKATSTPVSIKQYPMSQEARLGIKPHIQRLLDQGILVPCQSPWNTPLLPVKKPGTNDYRPVQDLREVNKRVEDIHPTVPNPYNLLSGLPPSHQWYTVLDLKDAFFCLRLHPTSQPLFAFEWRDPEMGISGQLTWTRLPQGFKNSPTLFNEALHRDLAGFRIQHPDLILLQYVDDLLLAATSELDCQQGTRALLQTLGDLGYRASAKKAQICQKQVKYLGYLLKEGQRWLTEARKETVMGQPIPKTPRQLREFLGKAGFCRLFIPGFAEMAAPLYPLTKPGTLFNWGPDQQKAFQEIKQALLTAPALGLPDLTKPFELFVDEKQGYAKGVLTQKLGPWRRPVAYLSKKLDPVAAGWPPCLRMVAAIAVLTKDAGKLTMGQPLVILAPHAVEALVKQPPDRWLSNARMTHYQALLLDTDRVQFGPVVALNPATLLPLPEEGLQHDCLDILAEAHGTRSDLMDQPLPDADHTWYTDGSSFLQEGQRKAGAAVTTETEVIWARALPAGTSAQRAELIALTQALKMAEGKKLNVYTDSRYAFATAHIHGEIYRRRGWLTSEGKEIKNKDEILALLKALFLPKRLSIIHCPGHQKGNSAEARGNRMADQAAREVATRETPETSTLLAGKRTADGSEFEKRTADGSEFESPKKKAKVE

SEQ ID NO: 2392 - protein, 2096 aa, synthetic construct
MPAAKRVKLDGGDKKYSIGLDIGTNSVGWAVITDEYKVPSKKFKVLGNTDRHSIKKNLIGALLFDSGETAEATRLKRTARRRYTRRKNRICYLQEIFSNEMAKVDDSFFHRLEESFLVEEDKKHERHPIFGNIVDEVAYHEKYPTIYHLRKKLVDSTDKADLRLIYLALAHMIKFRGHFLIEGDLNPDNSDVDKLFIQLVQTYNQLFEENPINASGVDAKAILSARLSKSRRLENLIAQLPGEKKNGLFGNLIALSLGLTPNFKSNFDLAEDAKLQLSKDTYDDDLDNLLAQIGDQYADLFLAAKNLSDAILLSDILRVNTEITKAPLSASMIKRYDEHHQDLTLLKALVRQQLPEKYKEIFFDQSKNGYAGYIDGGASQEEFYKFIKPILEKMDGTEELLVKLNREDLLRKQRTFDNGSIPHQIHLGELHAILRRQEDFYPFLKDNREKIEKILTFRIPYYVGPLARGNSRFAWMTRKSEETITPWNFEEVVDKGASAQSFIERMTNFDKNLPNEKVLPKHSLLYEYFTVYNELTKVKYVTEGMRKPAFLSGEQKKAIVDLLFKTNRKVTVKQLKEDYFKKIECFDSVEISGVEDRFNASLGTYHDLLKIIKDKDFLDNEENEDILEDIVLTLTLFEDREMIEERLKTYAHLFDDKVMKQLKRRRYTGWGRLSRKLINGIRDKQSGKTILDFLKSDGFANRNFMQLIHDDSLTFKEDIQKAQVSGQGDSLHEHIANLAGSPAIKKGILQTVKVVDELVKVMGRHKPENIVIEMARENQTTQKGQKNSRERMKRIEEGIKELGSQILKEHPVENTQLQNEKLYLYYLQNGRDMYVDQELDINRLSDYDVDHIVPQSFLKDDSIDNKVLTRSDKARGKSDNVPSEEVVKKMKNYWRQLLNAKLITQRKFDNLTKAERGGLSELDKAGFIKRQLVETRQITKHVAQILDSRMNTKYDENDKLIREVKVITLKSKLVSDFRKDFQFYKVREINNYHHAHDAYLNAVVGTALIKKYPKLESEFVYGDYKVYDVRKMIAKSEQEIGKATAKYFFYSNIMNFFKTEITLANGEIRKRPLIETNGETGEIVWDKGRDFATVRKVLSMPQVNIVKKTEVQTGGFSKESILPKRNSDKLIARKKDWDPKKYGGFDSPTVAYSVLVVAKVEKGKSKKLKSVKELLGITIMERSSFEKNPIDFLEAKGYKEVKKDLIIKLPKYSLFELENGRKRMLASAGELQKGNELALPSKYVNFLYLASHYEKLKGSPEDNEQKQLFVEQHKHYLDEIIEQISEFSKRVILADANLDKVLSAYNKHRDKPIREQAENIIHLFTLTNLGAPAAFKYFDTTIDRKRYTSTKEVLDATLIHQSITGLYETRIDLSQLGGDGGGGGPAPEAAAKGGTLNIEDEYRLHETSKEPDVSLGSTWLSDFPQAWAETGGMGLAVRQAPLIIPLKATSTPVSIKQYPMSQEARLGIKPHIQRLLDQGILVPCQSPWNTPLLPVKKPGTNDYRPVQDLREVNKRVEDIHPTVPNPYNLLSGLPPSHQWYTVLDLKDAFFCLRLHPTSQPLFAFEWRDPEMGISGQLTWTRLPQGFKNSPTLFNEALHRDLAGFRIQHPDLILLQYVDDLLLAATSELDCQQGTRALLQTLGDLGYRASAKKAQICQKQVKYLGYLLKEGQRWLTEARKETVMGQPIPKTPRQLREFLGKAGFCRLFIPGFAEMAAPLYPLTKPGTLFNWGPDQQKAFQEIKQALLTAPALGLPDLTKPFELFVDEKQGYAKGVLTQKLGPWRRPVAYLSKKLDPVAAGWPPCLRMVAAIAVLTKDAGKLTMGQPLVILAPHAVEALVKQPPDRWLSNARMTHYQALLLDTDRVQFGPVVALNPATLLPLPEEGLQHDCLDILAEAHGTRSDLMDQPLPDADHTWYTDGSSFLQEGQRKAGAAVTTETEVIWARALPAGTSAQRAELIALTQALKMAEGKKLNVYTDSRYAFATAHIHGEIYRRRGWLTSEGKEIKNKDEILALLKALFLPKRLSIIHCPGHQKGNSAEARGNRMADQAAREVATRETPETSTLLAGKRTADGSEFEKRTADGSEFESPKKKAKVE

SEQ ID NO: 2393 - protein, 2094 aa, synthetic construct
MPAAKRVKLDGGDKKYSIGLDIGTNSVGWAVITDEYKVPSKKFKVLGNTDRHSIKKNLIGALLFDSGETAEATRLKRTARRRYTRRKNRICYLQEIFSNEMAKVDDSFFHRLEESFLVEEDKKHERHPIFGNIVDEVAYHEKYPTIYHLRKKLVDSTDKADLRLIYLALAHMIKFRGHFLIEGDLNPDNSDVDKLFIQLVQTYNQLFEENPINASGVDAKAILSARLSKSRRLENLIAQLPGEKKNGLFGNLIALSLGLTPNFKSNFDLAEDAKLQLSKDTYDDDLDNLLAQIGDQYADLFLAAKNLSDAILLSDILRVNTEITKAPLSASMIKRYDEHHQDLTLLKALVRQQLPEKYKEIFFDQSKNGYAGYIDGGASQEEFYKFIKPILEKMDGTEELLVKLNREDLLRKQRTFDNGSIPHQIHLGELHAILRRQEDFYPFLKDNREKIEKILTFRIPYYVGPLARGNSRFAWMTRKSEETITPWNFEEVVDKGASAQSFIERMTNFDKNLPNEKVLPKHSLLYEYFTVYNELTKVKYVTEGMRKPAFLSGEQKKAIVDLLFKTNRKVTVKQLKEDYFKKIECFDSVEISGVEDRFNASLGTYHDLLKIIKDKDFLDNEENEDILEDIVLTLTLFEDREMIEERLKTYAHLFDDKVMKQLKRRRYTGWGRLSRKLINGIRDKQSGKTILDFLKSDGFANRNFMQLIHDDSLTFKEDIQKAQVSGQGDSLHEHIANLAGSPAIKKGILQTVKVVDELVKVMGRHKPENIVIEMARENQTTQKGQKNSRERMKRIEEGIKELGSQILKEHPVENTQLQNEKLYLYYLQNGRDMYVDQELDINRLSDYDVDHIVPQSFLKDDSIDNKVLTRSDKARGKSDNVPSEEVVKKMKNYWRQLLNAKLITQRKFDNLTKAERGGLSELDKAGFIKRQLVETRQITKHVAQILDSRMNTKYDENDKLIREVKVITLKSKLVSDFRKDFQFYKVREINNYHHAHDAYLNAVVGTALIKKYPKLESEFVYGDYKVYDVRKMIAKSEQEIGKATAKYFFYSNIMNFFKTEITLANGEIRKRPLIETNGETGEIVWDKGRDFATVRKVLSMPQVNIVKKTEVQTGGFSKESILPKRNSDKLIARKKDWDPKKYGGFDSPTVAYSVLVVAKVEKGKSKKLKSVKELLGITIMERSSFEKNPIDFLEAKGYKEVKKDLIIKLPKYSLFELENGRKRMLASAGELQKGNELALPSKYVNFLYLASHYEKLKGSPEDNEQKQLFVEQHKHYLDEIIEQISEFSKRVILADANLDKVLSAYNKHRDKPIREQAENIIHLFTLTNLGAPAAFKYFDTTIDRKRYTSTKEVLDATLIHQSITGLYETRIDLSQLGGDGGGSSGSSGSSGGTLNIEDEYRLHETSKEPDVSLGSTWLSDFPQAWAETGGMGLAVRQAPLIIPLKATSTPVSIKQYPMSQEARLGIKPHIQRLLDQGILVPCQSPWNTPLLPVKKPGTNDYRPVQDLREVNKRVEDIHPTVPNPYNLLSGLPPSHQWYTVLDLKDAFFCLRLHPTSQPLFAFEWRDPEMGISGQLTWTRLPQGFKNSPTLFNEALHRDLAGFRIQHPDLILLQYVDDLLLAATSELDCQQGTRALLQTLGDLGYRASAKKAQICQKQVKYLGYLLKEGQRWLTEARKETVMGQPIPKTPRQLREFLGKAGFCRLFIPGFAEMAAPLYPLTKPGTLFNWGPDQQKAFQEIKQALLTAPALGLPDLTKPFELFVDEKQGYAKGVLTQKLGPWRRPVAYLSKKLDPVAAGWPPCLRMVAAIAVLTKDAGKLTMGQPLVILAPHAVEALVKQPPDRWLSNARMTHYQALLLDTDRVQFGPVVALNPATLLPLPEEGLQHDCLDILAEAHGTRSDLMDQPLPDADHTWYTDGSSFLQEGQRKAGAAVTTETEVIWARALPAGTSAQRAELIALTQALKMAEGKKLNVYTDSRYAFATAHIHGEIYRRRGWLTSEGKEIKNKDEILALLKALFLPKRLSIIHCPGHQKGNSAEARGNRMADQAAREVATRETPETSTLLAGKRTADGSEFEKRTADGSEFESPKKKAKVE

SEQ ID NO: 2394 - protein, 2092 aa, synthetic construct
MPAAKRVKLDGGDKKYSIGLDIGTNSVGWAVITDEYKVPSKKFKVLGNTDRHSIKKNLIGALLFDSGETAEATRLKRTARRRYTRRKNRICYLQEIFSNEMAKVDDSFFHRLEESFLVEEDKKHERHPIFGNIVDEVAYHEKYPTIYHLRKKLVDSTDKADLRLIYLALAHMIKFRGHFLIEGDLNPDNSDVDKLFIQLVQTYNQLFEENPINASGVDAKAILSARLSKSRRLENLIAQLPGEKKNGLFGNLIALSLGLTPNFKSNFDLAEDAKLQLSKDTYDDDLDNLLAQIGDQYADLFLAAKNLSDAILLSDILRVNTEITKAPLSASMIKRYDEHHQDLTLLKALVRQQLPEKYKEIFFDQSKNGYAGYIDGGASQEEFYKFIKPILEKMDGTEELLVKLNREDLLRKQRTFDNGSIPHQIHLGELHAILRRQEDFYPFLKDNREKIEKILTFRIPYYVGPLARGNSRFAWMTRKSEETITPWNFEEVVDKGASAQSFIERMTNFDKNLPNEKVLPKHSLLYEYFTVYNELTKVKYVTEGMRKPAFLSGEQKKAIVDLLFKTNRKVTVKQLKEDYFKKIECFDSVEISGVEDRFNASLGTYHDLLKIIKDKDFLDNEENEDILEDIVLTLTLFEDREMIEERLKTYAHLFDDKVMKQLKRRRYTGWGRLSRKLINGIRDKQSGKTILDFLKSDGFANRNFMQLIHDDSLTFKEDIQKAQVSGQGDSLHEHIANLAGSPAIKKGILQTVKVVDELVKVMGRHKPENIVIEMARENQTTQKGQKNSRERMKRIEEGIKELGSQILKEHPVENTQLQNEKLYLYYLQNGRDMYVDQELDINRLSDYDVDHIVPQSFLKDDSIDNKVLTRSDKARGKSDNVPSEEVVKKMKNYWRQLLNAKLITQRKFDNLTKAERGGLSELDKAGFIKRQLVETRQITKHVAQILDSRMNTKYDENDKLIREVKVITLKSKLVSDFRKDFQFYKVREINNYHHAHDAYLNAVVGTALIKKYPKLESEFVYGDYKVYDVRKMIAKSEQEIGKATAKYFFYSNIMNFFKTEITLANGEIRKRPLIETNGETGEIVWDKGRDFATVRKVLSMPQVNIVKKTEVQTGGFSKESILPKRNSDKLIARKKDWDPKKYGGFDSPTVAYSVLVVAKVEKGKSKKLKSVKELLGITIMERSSFEKNPIDFLEAKGYKEVKKDLIIKLPKYSLFELENGRKRMLASAGELQKGNELALPSKYVNFLYLASHYEKLKGSPEDNEQKQLFVEQHKHYLDEIIEQISEFSKRVILADANLDKVLSAYNKHRDKPIREQAENIIHLFTLTNLGAPAAFKYFDTTIDRKRYTSTKEVLDATLIHQSITGLYETRIDLSQLGGDGGPAPAPAPGGTLNIEDEYRLHETSKEPDVSLGSTWLSDFPQAWAETGGMGLAVRQAPLIIPLKATSTPVSIKQYPMSQEARLGIKPHIQRLLDQGILVPCQSPWNTPLLPVKKPGTNDYRPVQDLREVNKRVEDIHPTVPNPYNLLSGLPPSHQWYTVLDLKDAFFCLRLHPTSQPLFAFEWRDPEMGISGQLTWTRLPQGFKNSPTLFNEALHRDLAGFRIQHPDLILLQYVDDLLLAATSELDCQQGTRALLQTLGDLGYRASAKKAQICQKQVKYLGYLLKEGQRWLTEARKETVMGQPIPKTPRQLREFLGKAGFCRLFIPGFAEMAAPLYPLTKPGTLFNWGPDQQKAFQEIKQALLTAPALGLPDLTKPFELFVDEKQGYAKGVLTQKLGPWRRPVAYLSKKLDPVAAGWPPCLRMVAAIAVLTKDAGKLTMGQPLVILAPHAVEALVKQPPDRWLSNARMTHYQALLLDTDRVQFGPVVALNPATLLPLPEEGLQHDCLDILAEAHGTRSDLMDQPLPDADHTWYTDGSSFLQEGQRKAGAAVTTETEVIWARALPAGTSAQRAELIALTQALKMAEGKKLNVYTDSRYAFATAHIHGEIYRRRGWLTSEGKEIKNKDEILALLKALFLPKRLSIIHCPGHQKGNSAEARGNRMADQAAREVATRETPETSTLLAGKRTADGSEFEKRTADGSEFESPKKKAKVE

SEQ ID NO: 2395 - protein, 2091 aa, synthetic construct
MPAAKRVKLDGGDKKYSIGLDIGTNSVGWAVITDEYKVPSKKFKVLGNTDRHSIKKNLIGALLFDSGETAEATRLKRTARRRYTRRKNRICYLQEIFSNEMAKVDDSFFHRLEESFLVEEDKKHERHPIFGNIVDEVAYHEKYPTIYHLRKKLVDSTDKADLRLIYLALAHMIKFRGHFLIEGDLNPDNSDVDKLFIQLVQTYNQLFEENPINASGVDAKAILSARLSKSRRLENLIAQLPGEKKNGLFGNLIALSLGLTPNFKSNFDLAEDAKLQLSKDTYDDDLDNLLAQIGDQYADLFLAAKNLSDAILLSDILRVNTEITKAPLSASMIKRYDEHHQDLTLLKALVRQQLPEKYKEIFFDQSKNGYAGYIDGGASQEEFYKFIKPILEKMDGTEELLVKLNREDLLRKQRTFDNGSIPHQIHLGELHAILRRQEDFYPFLKDNREKIEKILTFRIPYYVGPLARGNSRFAWMTRKSEETITPWNFEEVVDKGASAQSFIERMTNFDKNLPNEKVLPKHSLLYEYFTVYNELTKVKYVTEGMRKPAFLSGEQKKAIVDLLFKTNRKVTVKQLKEDYFKKIECFDSVEISGVEDRFNASLGTYHDLLKIIKDKDFLDNEENEDILEDIVLTLTLFEDREMIEERLKTYAHLFDDKVMKQLKRRRYTGWGRLSRKLINGIRDKQSGKTILDFLKSDGFANRNFMQLIHDDSLTFKEDIQKAQVSGQGDSLHEHIANLAGSPAIKKGILQTVKVVDELVKVMGRHKPENIVIEMARENQTTQKGQKNSRERMKRIEEGIKELGSQILKEHPVENTQLQNEKLYLYYLQNGRDMYVDQELDINRLSDYDVDHIVPQSFLKDDSIDNKVLTRSDKARGKSDNVPSEEVVKKMKNYWRQLLNAKLITQRKFDNLTKAERGGLSELDKAGFIKRQLVETRQITKHVAQILDSRMNTKYDENDKLIREVKVITLKSKLVSDFRKDFQFYKVREINNYHHAHDAYLNAVVGTALIKKYPKLESEFVYGDYKVYDVRKMIAKSEQEIGKATAKYFFYSNIMNFFKTEITLANGEIRKRPLIETNGETGEIVWDKGRDFATVRKVLSMPQVNIVKKTEVQTGGFSKESILPKRNSDKLIARKKDWDPKKYGGFDSPTVAYSVLVVAKVEKGKSKKLKSVKELLGITIMERSSFEKNPIDFLEAKGYKEVKKDLIIKLPKYSLFELENGRKRMLASAGELQKGNELALPSKYVNFLYLASHYEKLKGSPEDNEQKQLFVEQHKHYLDEIIEQISEFSKRVILADANLDKVLSAYNKHRDKPIREQAENIIHLFTLTNLGAPAAFKYFDTTIDRKRYTSTKEVLDATLIHQSITGLYETRIDLSQLGGDGGPAPGGGGGTLNIEDEYRLHETSKEPDVSLGSTWLSDFPQAWAETGGMGLAVRQAPLIIPLKATSTPVSIKQYPMSQEARLGIKPHIQRLLDQGILVPCQSPWNTPLLPVKKPGTNDYRPVQDLREVNKRVEDIHPTVPNPYNLLSGLPPSHQWYTVLDLKDAFFCLRLHPTSQPLFAFEWRDPEMGISGQLTWTRLPQGFKNSPTLFNEALHRDLAGFRIQHPDLILLQYVDDLLLAATSELDCQQGTRALLQTLGDLGYRASAKKAQICQKQVKYLGYLLKEGQRWLTEARKETVMGQPIPKTPRQLREFLGKAGFCRLFIPGFAEMAAPLYPLTKPGTLFNWGPDQQKAFQEIKQALLTAPALGLPDLTKPFELFVDEKQGYAKGVLTQKLGPWRRPVAYLSKKLDPVAAGWPPCLRMVAAIAVLTKDAGKLTMGQPLVILAPHAVEALVKQPPDRWLSNARMTHYQALLLDTDRVQFGPVVALNPATLLPLPEEGLQHDCLDILAEAHGTRSDLMDQPLPDADHTWYTDGSSFLQEGQRKAGAAVTTETEVIWARALPAGTSAQRAELIALTQALKMAEGKKLNVYTDSRYAFATAHIHGEIYRRRGWLTSEGKEIKNKDEILALLKALFLPKRLSIIHCPGHQKGNSAEARGNRMADQAAREVATRETPETSTLLAGKRTADGSEFEKRTADGSEFESPKKKAKVE

SEQ ID NO: 2396 - protein, 2097 aa, synthetic construct
MPAAKRVKLDGGDKKYSIGLDIGTNSVGWAVITDEYKVPSKKFKVLGNTDRHSIKKNLIGALLFDSGETAEATRLKRTARRRYTRRKNRICYLQEIFSNEMAKVDDSFFHRLEESFLVEEDKKHERHPIFGNIVDEVAYHEKYPTIYHLRKKLVDSTDKADLRLIYLALAHMIKFRGHFLIEGDLNPDNSDVDKLFIQLVQTYNQLFEENPINASGVDAKAILSARLSKSRRLENLIAQLPGEKKNGLFGNLIALSLGLTPNFKSNFDLAEDAKLQLSKDTYDDDLDNLLAQIGDQYADLFLAAKNLSDAILLSDILRVNTEITKAPLSASMIKRYDEHHQDLTLLKALVRQQLPEKYKEIFFDQSKNGYAGYIDGGASQEEFYKFIKPILEKMDGTEELLVKLNREDLLRKQRTFDNGSIPHQIHLGELHAILRRQEDFYPFLKDNREKIEKILTFRIPYYVGPLARGNSRFAWMTRKSEETITPWNFEEVVDKGASAQSFIERMTNFDKNLPNEKVLPKHSLLYEYFTVYNELTKVKYVTEGMRKPAFLSGEQKKAIVDLLFKTNRKVTVKQLKEDYFKKIECFDSVEISGVEDRFNASLGTYHDLLKIIKDKDFLDNEENEDILEDIVLTLTLFEDREMIEERLKTYAHLFDDKVMKQLKRRRYTGWGRLSRKLINGIRDKQSGKTILDFLKSDGFANRNFMQLIHDDSLTFKEDIQKAQVSGQGDSLHEHIANLAGSPAIKKGILQTVKVVDELVKVMGRHKPENIVIEMARENQTTQKGQKNSRERMKRIEEGIKELGSQILKEHPVENTQLQNEKLYLYYLQNGRDMYVDQELDINRLSDYDVDHIVPQSFLKDDSIDNKVLTRSDKARGKSDNVPSEEVVKKMKNYWRQLLNAKLITQRKFDNLTKAERGGLSELDKAGFIKRQLVETRQITKHVAQILDSRMNTKYDENDKLIREVKVITLKSKLVSDFRKDFQFYKVREINNYHHAHDAYLNAVVGTALIKKYPKLESEFVYGDYKVYDVRKMIAKSEQEIGKATAKYFFYSNIMNFFKTEITLANGEIRKRPLIETNGETGEIVWDKGRDFATVRKVLSMPQVNIVKKTEVQTGGFSKESILPKRNSDKLIARKKDWDPKKYGGFDSPTVAYSVLVVAKVEKGKSKKLKSVKELLGITIMERSSFEKNPIDFLEAKGYKEVKKDLIIKLPKYSLFELENGRKRMLASAGELQKGNELALPSKYVNFLYLASHYEKLKGSPEDNEQKQLFVEQHKHYLDEIIEQISEFSKRVILADANLDKVLSAYNKHRDKPIREQAENIIHLFTLTNLGAPAAFKYFDTTIDRKRYTSTKEVLDATLIHQSITGLYETRIDLSQLGGDGGGSSGSSGSSGSSGGTLNIEDEYRLHETSKEPDVSLGSTWLSDFPQAWAETGGMGLAVRQAPLIIPLKATSTPVSIKQYPMSQEARLGIKPHIQRLLDQGILVPCQSPWNTPLLPVKKPGTNDYRPVQDLREVNKRVEDIHPTVPNPYNLLSGLPPSHQWYTVLDLKDAFFCLRLHPTSQPLFAFEWRDPEMGISGQLTWTRLPQGFKNSPTLFNEALHRDLAGFRIQHPDLILLQYVDDLLLAATSELDCQQGTRALLQTLGDLGYRASAKKAQICQKQVKYLGYLLKEGQRWLTEARKETVMGQPIPKTPRQLREFLGKAGFCRLFIPGFAEMAAPLYPLTKPGTLFNWGPDQQKAFQEIKQALLTAPALGLPDLTKPFELFVDEKQGYAKGVLTQKLGPWRRPVAYLSKKLDPVAAGWPPCLRMVAAIAVLTKDAGKLTMGQPLVILAPHAVEALVKQPPDRWLSNARMTHYQALLLDTDRVQFGPVVALNPATLLPLPEEGLQHDCLDILAEAHGTRSDLMDQPLPDADHTWYTDGSSFLQEGQRKAGAAVTTETEVIWARALPAGTSAQRAELIALTQALKMAEGKKLNVYTDSRYAFATAHIHGEIYRRRGWLTSEGKEIKNKDEILALLKALFLPKRLSIIHCPGHQKGNSAEARGNRMADQAAREVATRETPETSTLLAGKRTADGSEFEKRTADGSEFESPKKKAKVE

SEQ ID NO: 2397 - protein, 2091 aa, synthetic construct
MPAAKRVKLDGGDKKYSIGLDIGTNSVGWAVITDEYKVPSKKFKVLGNTDRHSIKKNLIGALLFDSGETAEATRLKRTARRRYTRRKNRICYLQEIFSNEMAKVDDSFFHRLEESFLVEEDKKHERHPIFGNIVDEVAYHEKYPTIYHLRKKLVDSTDKADLRLIYLALAHMIKFRGHFLIEGDLNPDNSDVDKLFIQLVQTYNQLFEENPINASGVDAKAILSARLSKSRRLENLIAQLPGEKKNGLFGNLIALSLGLTPNFKSNFDLAEDAKLQLSKDTYDDDLDNLLAQIGDQYADLFLAAKNLSDAILLSDILRVNTEITKAPLSASMIKRYDEHHQDLTLLKALVRQQLPEKYKEIFFDQSKNGYAGYIDGGASQEEFYKFIKPILEKMDGTEELLVKLNREDLLRKQRTFDNGSIPHQIHLGELHAILRRQEDFYPFLKDNREKIEKILTFRIPYYVGPLARGNSRFAWMTRKSEETITPWNFEEVVDKGASAQSFIERMTNFDKNLPNEKVLPKHSLLYEYFTVYNELTKVKYVTEGMRKPAFLSGEQKKAIVDLLFKTNRKVTVKQLKEDYFKKIECFDSVEISGVEDRFNASLGTYHDLLKIIKDKDFLDNEENEDILEDIVLTLTLFEDREMIEERLKTYAHLFDDKVMKQLKRRRYTGWGRLSRKLINGIRDKQSGKTILDFLKSDGFANRNFMQLIHDDSLTFKEDIQKAQVSGQGDSLHEHIANLAGSPAIKKGILQTVKVVDELVKVMGRHKPENIVIEMARENQTTQKGQKNSRERMKRIEEGIKELGSQILKEHPVENTQLQNEKLYLYYLQNGRDMYVDQELDINRLSDYDVDHIVPQSFLKDDSIDNKVLTRSDKARGKSDNVPSEEVVKKMKNYWRQLLNAKLITQRKFDNLTKAERGGLSELDKAGFIKRQLVETRQITKHVAQILDSRMNTKYDENDKLIREVKVITLKSKLVSDFRKDFQFYKVREINNYHHAHDAYLNAVVGTALIKKYPKLESEFVYGDYKVYDVRKMIAKSEQEIGKATAKYFFYSNIMNFFKTEITLANGEIRKRPLIETNGETGEIVWDKGRDFATVRKVLSMPQVNIVKKTEVQTGGFSKESILPKRNSDKLIARKKDWDPKKYGGFDSPTVAYSVLVVAKVEKGKSKKLKSVKELLGITIMERSSFEKNPIDFLEAKGYKEVKKDLIIKLPKYSLFELENGRKRMLASAGELQKGNELALPSKYVNFLYLASHYEKLKGSPEDNEQKQLFVEQHKHYLDEIIEQISEFSKRVILADANLDKVLSAYNKHRDKPIREQAENIIHLFTLTNLGAPAAFKYFDTTIDRKRYTSTKEVLDATLIHQSITGLYETRIDLSQLGGDGGGGGGGSGGTLNIEDEYRLHETSKEPDVSLGSTWLSDFPQAWAETGGMGLAVRQAPLIIPLKATSTPVSIKQYPMSQEARLGIKPHIQRLLDQGILVPCQSPWNTPLLPVKKPGTNDYRPVQDLREVNKRVEDIHPTVPNPYNLLSGLPPSHQWYTVLDLKDAFFCLRLHPTSQPLFAFEWRDPEMGISGQLTWTRLPQGFKNSPTLFNEALHRDLAGFRIQHPDLILLQYVDDLLLAATSELDCQQGTRALLQTLGDLGYRASAKKAQICQKQVKYLGYLLKEGQRWLTEARKETVMGQPIPKTPRQLREFLGKAGFCRLFIPGFAEMAAPLYPLTKPGTLFNWGPDQQKAFQEIKQALLTAPALGLPDLTKPFELFVDEKQGYAKGVLTQKLGPWRRPVAYLSKKLDPVAAGWPPCLRMVAAIAVLTKDAGKLTMGQPLVILAPHAVEALVKQPPDRWLSNARMTHYQALLLDTDRVQFGPVVALNPATLLPLPEEGLQHDCLDILAEAHGTRSDLMDQPLPDADHTWYTDGSSFLQEGQRKAGAAVTTETEVIWARALPAGTSAQRAELIALTQALKMAEGKKLNVYTDSRYAFATAHIHGEIYRRRGWLTSEGKEIKNKDEILALLKALFLPKRLSIIHCPGHQKGNSAEARGNRMADQAAREVATRETPETSTLLAGKRTADGSEFEKRTADGSEFESPKKKAKVE

SEQ ID NO: 2398 - protein, 2091 aa, synthetic construct
MPAAKRVKLDGGDKKYSIGLDIGTNSVGWAVITDEYKVPSKKFKVLGNTDRHSIKKNLIGALLFDSGETAEATRLKRTARRRYTRRKNRICYLQEIFSNEMAKVDDSFFHRLEESFLVEEDKKHERHPIFGNIVDEVAYHEKYPTIYHLRKKLVDSTDKADLRLIYLALAHMIKFRGHFLIEGDLNPDNSDVDKLFIQLVQTYNQLFEENPINASGVDAKAILSARLSKSRRLENLIAQLPGEKKNGLFGNLIALSLGLTPNFKSNFDLAEDAKLQLSKDTYDDDLDNLLAQIGDQYADLFLAAKNLSDAILLSDILRVNTEITKAPLSASMIKRYDEHHQDLTLLKALVRQQLPEKYKEIFFDQSKNGYAGYIDGGASQEEFYKFIKPILEKMDGTEELLVKLNREDLLRKQRTFDNGSIPHQIHLGELHAILRRQEDFYPFLKDNREKIEKILTFRIPYYVGPLARGNSRFAWMTRKSEETITPWNFEEVVDKGASAQSFIERMTNFDKNLPNEKVLPKHSLLYEYFTVYNELTKVKYVTEGMRKPAFLSGEQKKAIVDLLFKTNRKVTVKQLKEDYFKKIECFDSVEISGVEDRFNASLGTYHDLLKIIKDKDFLDNEENEDILEDIVLTLTLFEDREMIEERLKTYAHLFDDKVMKQLKRRRYTGWGRLSRKLINGIRDKQSGKTILDFLKSDGFANRNFMQLIHDDSLTFKEDIQKAQVSGQGDSLHEHIANLAGSPAIKKGILQTVKVVDELVKVMGRHKPENIVIEMARENQTTQKGQKNSRERMKRIEEGIKELGSQILKEHPVENTQLQNEKLYLYYLQNGRDMYVDQELDINRLSDYDVDHIVPQSFLKDDSIDNKVLTRSDKARGKSDNVPSEEVVKKMKNYWRQLLNAKLITQRKFDNLTKAERGGLSELDKAGFIKRQLVETRQITKHVAQILDSRMNTKYDENDKLIREVKVITLKSKLVSDFRKDFQFYKVREINNYHHAHDAYLNAVVGTALIKKYPKLESEFVYGDYKVYDVRKMIAKSEQEIGKATAKYFFYSNIMNFFKTEITLANGEIRKRPLIETNGETGEIVWDKGRDFATVRKVLSMPQVNIVKKTEVQTGGFSKESILPKRNSDKLIARKKDWDPKKYGGFDSPTVAYSVLVVAKVEKGKSKKLKSVKELLGITIMERSSFEKNPIDFLEAKGYKEVKKDLIIKLPKYSLFELENGRKRMLASAGELQKGNELALPSKYVNFLYLASHYEKLKGSPEDNEQKQLFVEQHKHYLDEIIEQISEFSKRVILADANLDKVLSAYNKHRDKPIREQAENIIHLFTLTNLGAPAAFKYFDTTIDRKRYTSTKEVLDATLIHQSITGLYETRIDLSQLGGDGGGGSGGSGGTLNIEDEYRLHETSKEPDVSLGSTWLSDFPQAWAETGGMGLAVRQAPLIIPLKATSTPVSIKQYPMSQEARLGIKPHIQRLLDQGILVPCQSPWNTPLLPVKKPGTNDYRPVQDLREVNKRVEDIHPTVPNPYNLLSGLPPSHQWYTVLDLKDAFFCLRLHPTSQPLFAFEWRDPEMGISGQLTWTRLPQGFKNSPTLFNEALHRDLAGFRIQHPDLILLQYVDDLLLAATSELDCQQGTRALLQTLGDLGYRASAKKAQICQKQVKYLGYLLKEGQRWLTEARKETVMGQPIPKTPRQLREFLGKAGFCRLFIPGFAEMAAPLYPLTKPGTLFNWGPDQQKAFQEIKQALLTAPALGLPDLTKPFELFVDEKQGYAKGVLTQKLGPWRRPVAYLSKKLDPVAAGWPPCLRMVAAIAVLTKDAGKLTMGQPLVILAPHAVEALVKQPPDRWLSNARMTHYQALLLDTDRVQFGPVVALNPATLLPLPEEGLQHDCLDILAEAHGTRSDLMDQPLPDADHTWYTDGSSFLQEGQRKAGAAVTTETEVIWARALPAGTSAQRAELIALTQALKMAEGKKLNVYTDSRYAFATAHIHGEIYRRRGWLTSEGKEIKNKDEILALLKALFLPKRLSIIHCPGHQKGNSAEARGNRMADQAAREVATRETPETSTLLAGKRTADGSEFEKRTADGSEFESPKKKAKVE

SEQ ID NO: 2399 - protein, 2094 aa, synthetic construct
MPAAKRVKLDGGDKKYSIGLDIGTNSVGWAVITDEYKVPSKKFKVLGNTDRHSIKKNLIGALLFDSGETAEATRLKRTARRRYTRRKNRICYLQEIFSNEMAKVDDSFFHRLEESFLVEEDKKHERHPIFGNIVDEVAYHEKYPTIYHLRKKLVDSTDKADLRLIYLALAHMIKFRGHFLIEGDLNPDNSDVDKLFIQLVQTYNQLFEENPINASGVDAKAILSARLSKSRRLENLIAQLPGEKKNGLFGNLIALSLGLTPNFKSNFDLAEDAKLQLSKDTYDDDLDNLLAQIGDQYADLFLAAKNLSDAILLSDILRVNTEITKAPLSASMIKRYDEHHQDLTLLKALVRQQLPEKYKEIFFDQSKNGYAGYIDGGASQEEFYKFIKPILEKMDGTEELLVKLNREDLLRKQRTFDNGSIPHQIHLGELHAILRRQEDFYPFLKDNREKIEKILTFRIPYYVGPLARGNSRFAWMTRKSEETITPWNFEEVVDKGASAQSFIERMTNFDKNLPNEKVLPKHSLLYEYFTVYNELTKVKYVTEGMRKPAFLSGEQKKAIVDLLFKTNRKVTVKQLKEDYFKKIECFDSVEISGVEDRFNASLGTYHDLLKIIKDKDFLDNEENEDILEDIVLTLTLFEDREMIEERLKTYAHLFDDKVMKQLKRRRYTGWGRLSRKLINGIRDKQSGKTILDFLKSDGFANRNFMQLIHDDSLTFKEDIQKAQVSGQGDSLHEHIANLAGSPAIKKGILQTVKVVDELVKVMGRHKPENIVIEMARENQTTQKGQKNSRERMKRIEEGIKELGSQILKEHPVENTQLQNEKLYLYYLQNGRDMYVDQELDINRLSDYDVDHIVPQSFLKDDSIDNKVLTRSDKARGKSDNVPSEEVVKKMKNYWRQLLNAKLITQRKFDNLTKAERGGLSELDKAGFIKRQLVETRQITKHVAQILDSRMNTKYDENDKLIREVKVITLKSKLVSDFRKDFQFYKVREINNYHHAHDAYLNAVVGTALIKKYPKLESEFVYGDYKVYDVRKMIAKSEQEIGKATAKYFFYSNIMNFFKTEITLANGEIRKRPLIETNGETGEIVWDKGRDFATVRKVLSMPQVNIVKKTEVQTGGFSKESILPKRNSDKLIARKKDWDPKKYGGFDSPTVAYSVLVVAKVEKGKSKKLKSVKELLGITIMERSSFEKNPIDFLEAKGYKEVKKDLIIKLPKYSLFELENGRKRMLASAGELQKGNELALPSKYVNFLYLASHYEKLKGSPEDNEQKQLFVEQHKHYLDEIIEQISEFSKRVILADANLDKVLSAYNKHRDKPIREQAENIIHLFTLTNLGAPAAFKYFDTTIDRKRYTSTKEVLDATLIHQSITGLYETRIDLSQLGGDGGGSSGGSPAPGGTLNIEDEYRLHETSKEPDVSLGSTWLSDFPQAWAETGGMGLAVRQAPLIIPLKATSTPVSIKQYPMSQEARLGIKPHIQRLLDQGILVPCQSPWNTPLLPVKKPGTNDYRPVQDLREVNKRVEDIHPTVPNPYNLLSGLPPSHQWYTVLDLKDAFFCLRLHPTSQPLFAFEWRDPEMGISGQLTWTRLPQGFKNSPTLFNEALHRDLAGFRIQHPDLILLQYVDDLLLAATSELDCQQGTRALLQTLGDLGYRASAKKAQICQKQVKYLGYLLKEGQRWLTEARKETVMGQPIPKTPRQLREFLGKAGFCRLFIPGFAEMAAPLYPLTKPGTLFNWGPDQQKAFQEIKQALLTAPALGLPDLTKPFELFVDEKQGYAKGVLTQKLGPWRRPVAYLSKKLDPVAAGWPPCLRMVAAIAVLTKDAGKLTMGQPLVILAPHAVEALVKQPPDRWLSNARMTHYQALLLDTDRVQFGPVVALNPATLLPLPEEGLQHDCLDILAEAHGTRSDLMDQPLPDADHTWYTDGSSFLQEGQRKAGAAVTTETEVIWARALPAGTSAQRAELIALTQALKMAEGKKLNVYTDSRYAFATAHIHGEIYRRRGWLTSEGKEIKNKDEILALLKALFLPKRLSIIHCPGHQKGNSAEARGNRMADQAAREVATRETPETSTLLAGKRTADGSEFEKRTADGSEFESPKKKAKVE

SEQ ID NO: 2400 - protein, 2096 aa, synthetic construct
MPAAKRVKLDGGDKKYSIGLDIGTNSVGWAVITDEYKVPSKKFKVLGNTDRHSIKKNLIGALLFDSGETAEATRLKRTARRRYTRRKNRICYLQEIFSNEMAKVDDSFFHRLEESFLVEEDKKHERHPIFGNIVDEVAYHEKYPTIYHLRKKLVDSTDKADLRLIYLALAHMIKFRGHFLIEGDLNPDNSDVDKLFIQLVQTYNQLFEENPINASGVDAKAILSARLSKSRRLENLIAQLPGEKKNGLFGNLIALSLGLTPNFKSNFDLAEDAKLQLSKDTYDDDLDNLLAQIGDQYADLFLAAKNLSDAILLSDILRVNTEITKAPLSASMIKRYDEHHQDLTLLKALVRQQLPEKYKEIFFDQSKNGYAGYIDGGASQEEFYKFIKPILEKMDGTEELLVKLNREDLLRKQRTFDNGSIPHQIHLGELHAILRRQEDFYPFLKDNREKIEKILTFRIPYYVGPLARGNSRFAWMTRKSEETITPWNFEEVVDKGASAQSFIERMTNFDKNLPNEKVLPKHSLLYEYFTVYNELTKVKYVTEGMRKPAFLSGEQKKAIVDLLFKTNRKVTVKQLKEDYFKKIECFDSVEISGVEDRFNASLGTYHDLLKIIKDKDFLDNEENEDILEDIVLTLTLFEDREMIEERLKTYAHLFDDKVMKQLKRRRYTGWGRLSRKLINGIRDKQSGKTILDFLKSDGFANRNFMQLIHDDSLTFKEDIQKAQVSGQGDSLHEHIANLAGSPAIKKGILQTVKVVDELVKVMGRHKPENIVIEMARENQTTQKGQKNSRERMKRIEEGIKELGSQILKEHPVENTQLQNEKLYLYYLQNGRDMYVDQELDINRLSDYDVDHIVPQSFLKDDSIDNKVLTRSDKARGKSDNVPSEEVVKKMKNYWRQLLNAKLITQRKFDNLTKAERGGLSELDKAGFIKRQLVETRQITKHVAQILDSRMNTKYDENDKLIREVKVITLKSKLVSDFRKDFQFYKVREINNYHHAHDAYLNAVVGTALIKKYPKLESEFVYGDYKVYDVRKMIAKSEQEIGKATAKYFFYSNIMNFFKTEITLANGEIRKRPLIETNGETGEIVWDKGRDFATVRKVLSMPQVNIVKKTEVQTGGFSKESILPKRNSDKLIARKKDWDPKKYGGFDSPTVAYSVLVVAKVEKGKSKKLKSVKELLGITIMERSSFEKNPIDFLEAKGYKEVKKDLIIKLPKYSLFELENGRKRMLASAGELQKGNELALPSKYVNFLYLASHYEKLKGSPEDNEQKQLFVEQHKHYLDEIIEQISEFSKRVILADANLDKVLSAYNKHRDKPIREQAENIIHLFTLTNLGAPAAFKYFDTTIDRKRYTSTKEVLDATLIHQSITGLYETRIDLSQLGGDGGPAPEAAAKGGGGGTLNIEDEYRLHETSKEPDVSLGSTWLSDFPQAWAETGGMGLAVRQAPLIIPLKATSTPVSIKQYPMSQEARLGIKPHIQRLLDQGILVPCQSPWNTPLLPVKKPGTNDYRPVQDLREVNKRVEDIHPTVPNPYNLLSGLPPSHQWYTVLDLKDAFFCLRLHPTSQPLFAFEWRDPEMGISGQLTWTRLPQGFKNSPTLFNEALHRDLAGFRIQHPDLILLQYVDDLLLAATSELDCQQGTRALLQTLGDLGYRASAKKAQICQKQVKYLGYLLKEGQRWLTEARKETVMGQPIPKTPRQLREFLGKAGFCRLFIPGFAEMAAPLYPLTKPGTLFNWGPDQQKAFQEIKQALLTAPALGLPDLTKPFELFVDEKQGYAKGVLTQKLGPWRRPVAYLSKKLDPVAAGWPPCLRMVAAIAVLTKDAGKLTMGQPLVILAPHAVEALVKQPPDRWLSNARMTHYQALLLDTDRVQFGPVVALNPATLLPLPEEGLQHDCLDILAEAHGTRSDLMDQPLPDADHTWYTDGSSFLQEGQRKAGAAVTTETEVIWARALPAGTSAQRAELIALTQALKMAEGKKLNVYTDSRYAFATAHIHGEIYRRRGWLTSEGKEIKNKDEILALLKALFLPKRLSIIHCPGHQKGNSAEARGNRMADQAAREVATRETPETSTLLAGKRTADGSEFEKRTADGSEFESPKKKAKVE

SEQ ID NO: 2401 - protein, 2094 aa, synthetic construct
MPAAKRVKLDGGDKKYSIGLDIGTNSVGWAVITDEYKVPSKKFKVLGNTDRHSIKKNLIGALLFDSGETAEATRLKRTARRRYTRRKNRICYLQEIFSNEMAKVDDSFFHRLEESFLVEEDKKHERHPIFGNIVDEVAYHEKYPTIYHLRKKLVDSTDKADLRLIYLALAHMIKFRGHFLIEGDLNPDNSDVDKLFIQLVQTYNQLFEENPINASGVDAKAILSARLSKSRRLENLIAQLPGEKKNGLFGNLIALSLGLTPNFKSNFDLAEDAKLQLSKDTYDDDLDNLLAQIGDQYADLFLAAKNLSDAILLSDILRVNTEITKAPLSASMIKRYDEHHQDLTLLKALVRQQLPEKYKEIFFDQSKNGYAGYIDGGASQEEFYKFIKPILEKMDGTEELLVKLNREDLLRKQRTFDNGSIPHQIHLGELHAILRRQEDFYPFLKDNREKIEKILTFRIPYYVGPLARGNSRFAWMTRKSEETITPWNFEEVVDKGASAQSFIERMTNFDKNLPNEKVLPKHSLLYEYFTVYNELTKVKYVTEGMRKPAFLSGEQKKAIVDLLFKTNRKVTVKQLKEDYFKKIECFDSVEISGVEDRFNASLGTYHDLLKIIKDKDFLDNEENEDILEDIVLTLTLFEDREMIEERLKTYAHLFDDKVMKQLKRRRYTGWGRLSRKLINGIRDKQSGKTILDFLKSDGFANRNFMQLIHDDSLTFKEDIQKAQVSGQGDSLHEHIANLAGSPAIKKGILQTVKVVDELVKVMGRHKPENIVIEMARENQTTQKGQKNSRERMKRIEEGIKELGSQILKEHPVENTQLQNEKLYLYYLQNGRDMYVDQELDINRLSDYDVDHIVPQSFLKDDSIDNKVLTRSDKARGKSDNVPSEEVVKKMKNYWRQLLNAKLITQRKFDNLTKAERGGLSELDKAGFIKRQLVETRQITKHVAQILDSRMNTKYDENDKLIREVKVITLKSKLVSDFRKDFQFYKVREINNYHHAHDAYLNAVVGTALIKKYPKLESEFVYGDYKVYDVRKMIAKSEQEIGKATAKYFFYSNIMNFFKTEITLANGEIRKRPLIETNGETGEIVWDKGRDFATVRKVLSMPQVNIVKKTEVQTGGFSKESILPKRNSDKLIARKKDWDPKKYGGFDSPTVAYSVLVVAKVEKGKSKKLKSVKELLGITIMERSSFEKNPIDFLEAKGYKEVKKDLIIKLPKYSLFELENGRKRMLASAGELQKGNELALPSKYVNFLYLASHYEKLKGSPEDNEQKQLFVEQHKHYLDEIIEQISEFSKRVILADANLDKVLSAYNKHRDKPIREQAENIIHLFTLTNLGAPAAFKYFDTTIDRKRYTSTKEVLDATLIHQSITGLYETRIDLSQLGGDGGPAPGGGGGSGGTLNIEDEYRLHETSKEPDVSLGSTWLSDFPQAWAETGGMGLAVRQAPLIIPLKATSTPVSIKQYPMSQEARLGIKPHIQRLLDQGILVPCQSPWNTPLLPVKKPGTNDYRPVQDLREVNKRVEDIHPTVPNPYNLLSGLPPSHQWYTVLDLKDAFFCLRLHPTSQPLFAFEWRDPEMGISGQLTWTRLPQGFKNSPTLFNEALHRDLAGFRIQHPDLILLQYVDDLLLAATSELDCQQGTRALLQTLGDLGYRASAKKAQICQKQVKYLGYLLKEGQRWLTEARKETVMGQPIPKTPRQLREFLGKAGFCRLFIPGFAEMAAPLYPLTKPGTLFNWGPDQQKAFQEIKQALLTAPALGLPDLTKPFELFVDEKQGYAKGVLTQKLGPWRRPVAYLSKKLDPVAAGWPPCLRMVAAIAVLTKDAGKLTMGQPLVILAPHAVEALVKQPPDRWLSNARMTHYQALLLDTDRVQFGPVVALNPATLLPLPEEGLQHDCLDILAEAHGTRSDLMDQPLPDADHTWYTDGSSFLQEGQRKAGAAVTTETEVIWARALPAGTSAQRAELIALTQALKMAEGKKLNVYTDSRYAFATAHIHGEIYRRRGWLTSEGKEIKNKDEILALLKALFLPKRLSIIHCPGHQKGNSAEARGNRMADQAAREVATRETPETSTLLAGKRTADGSEFEKRTADGSEFESPKKKAKVE

SEQ ID NO: 2402 - protein, 2094 aa, synthetic construct
MPAAKRVKLDGGDKKYSIGLDIGTNSVGWAVITDEYKVPSKKFKVLGNTDRHSIKKNLIGALLFDSGETAEATRLKRTARRRYTRRKNRICYLQEIFSNEMAKVDDSFFHRLEESFLVEEDKKHERHPIFGNIVDEVAYHEKYPTIYHLRKKLVDSTDKADLRLIYLALAHMIKFRGHFLIEGDLNPDNSDVDKLFIQLVQTYNQLFEENPINASGVDAKAILSARLSKSRRLENLIAQLPGEKKNGLFGNLIALSLGLTPNFKSNFDLAEDAKLQLSKDTYDDDLDNLLAQIGDQYADLFLAAKNLSDAILLSDILRVNTEITKAPLSASMIKRYDEHHQDLTLLKALVRQQLPEKYKEIFFDQSKNGYAGYIDGGASQEEFYKFIKPILEKMDGTEELLVKLNREDLLRKQRTFDNGSIPHQIHLGELHAILRRQEDFYPFLKDNREKIEKILTFRIPYYVGPLARGNSRFAWMTRKSEETITPWNFEEVVDKGASAQSFIERMTNFDKNLPNEKVLPKHSLLYEYFTVYNELTKVKYVTEGMRKPAFLSGEQKKAIVDLLFKTNRKVTVKQLKEDYFKKIECFDSVEISGVEDRFNASLGTYHDLLKIIKDKDFLDNEENEDILEDIVLTLTLFEDREMIEERLKTYAHLFDDKVMKQLKRRRYTGWGRLSRKLINGIRDKQSGKTILDFLKSDGFANRNFMQLIHDDSLTFKEDIQKAQVSGQGDSLHEHIANLAGSPAIKKGILQTVKVVDELVKVMGRHKPENIVIEMARENQTTQKGQKNSRERMKRIEEGIKELGSQILKEHPVENTQLQNEKLYLYYLQNGRDMYVDQELDINRLSDYDVDHIVPQSFLKDDSIDNKVLTRSDKARGKSDNVPSEEVVKKMKNYWRQLLNAKLITQRKFDNLTKAERGGLSELDKAGFIKRQLVETRQITKHVAQILDSRMNTKYDENDKLIREVKVITLKSKLVSDFRKDFQFYKVREINNYHHAHDAYLNAVVGTALIKKYPKLESEFVYGDYKVYDVRKMIAKSEQEIGKATAKYFFYSNIMNFFKTEITLANGEIRKRPLIETNGETGEIVWDKGRDFATVRKVLSMPQVNIVKKTEVQTGGFSKESILPKRNSDKLIARKKDWDPKKYGGFDSPTVAYSVLVVAKVEKGKSKKLKSVKELLGITIMERSSFEKNPIDFLEAKGYKEVKKDLIIKLPKYSLFELENGRKRMLASAGELQKGNELALPSKYVNFLYLASHYEKLKGSPEDNEQKQLFVEQHKHYLDEIIEQISEFSKRVILADANLDKVLSAYNKHRDKPIREQAENIIHLFTLTNLGAPAAFKYFDTTIDRKRYTSTKEVLDATLIHQSITGLYETRIDLSQLGGDGGGSSGGGPAPGGTLNIEDEYRLHETSKEPDVSLGSTWLSDFPQAWAETGGMGLAVRQAPLIIPLKATSTPVSIKQYPMSQEARLGIKPHIQRLLDQGILVPCQSPWNTPLLPVKKPGTNDYRPVQDLREVNKRVEDIHPTVPNPYNLLSGLPPSHQWYTVLDLKDAFFCLRLHPTSQPLFAFEWRDPEMGISGQLTWTRLPQGFKNSPTLFNEALHRDLAGFRIQHPDLILLQYVDDLLLAATSELDCQQGTRALLQTLGDLGYRASAKKAQICQKQVKYLGYLLKEGQRWLTEARKETVMGQPIPKTPRQLREFLGKAGFCRLFIPGFAEMAAPLYPLTKPGTLFNWGPDQQKAFQEIKQALLTAPALGLPDLTKPFELFVDEKQGYAKGVLTQKLGPWRRPVAYLSKKLDPVAAGWPPCLRMVAAIAVLTKDAGKLTMGQPLVILAPHAVEALVKQPPDRWLSNARMTHYQALLLDTDRVQFGPVVALNPATLLPLPEEGLQHDCLDILAEAHGTRSDLMDQPLPDADHTWYTDGSSFLQEGQRKAGAAVTTETEVIWARALPAGTSAQRAELIALTQALKMAEGKKLNVYTDSRYAFATAHIHGEIYRRRGWLTSEGKEIKNKDEILALLKALFLPKRLSIIHCPGHQKGNSAEARGNRMADQAAREVATRETPETSTLLAGKRTADGSEFEKRTADGSEFESPKKKAKVE

SEQ ID NO: 2403 - protein, 2094 aa, synthetic construct
MPAAKRVKLDGGDKKYSIGLDIGTNSVGWAVITDEYKVPSKKFKVLGNTDRHSIKKNLIGALLFDSGETAEATRLKRTARRRYTRRKNRICYLQEIFSNEMAKVDDSFFHRLEESFLVEEDKKHERHPIFGNIVDEVAYHEKYPTIYHLRKKLVDSTDKADLRLIYLALAHMIKFRGHFLIEGDLNPDNSDVDKLFIQLVQTYNQLFEENPINASGVDAKAILSARLSKSRRLENLIAQLPGEKKNGLFGNLIALSLGLTPNFKSNFDLAEDAKLQLSKDTYDDDLDNLLAQIGDQYADLFLAAKNLSDAILLSDILRVNTEITKAPLSASMIKRYDEHHQDLTLLKALVRQQLPEKYKEIFFDQSKNGYAGYIDGGASQEEFYKFIKPILEKMDGTEELLVKLNREDLLRKQRTFDNGSIPHQIHLGELHAILRRQEDFYPFLKDNREKIEKILTFRIPYYVGPLARGNSRFAWMTRKSEETITPWNFEEVVDKGASAQSFIERMTNFDKNLPNEKVLPKHSLLYEYFTVYNELTKVKYVTEGMRKPAFLSGEQKKAIVDLLFKTNRKVTVKQLKEDYFKKIECFDSVEISGVEDRFNASLGTYHDLLKIIKDKDFLDNEENEDILEDIVLTLTLFEDREMIEERLKTYAHLFDDKVMKQLKRRRYTGWGRLSRKLINGIRDKQSGKTILDFLKSDGFANRNFMQLIHDDSLTFKEDIQKAQVSGQGDSLHEHIANLAGSPAIKKGILQTVKVVDELVKVMGRHKPENIVIEMARENQTTQKGQKNSRERMKRIEEGIKELGSQILKEHPVENTQLQNEKLYLYYLQNGRDMYVDQELDINRLSDYDVDHIVPQSFLKDDSIDNKVLTRSDKARGKSDNVPSEEVVKKMKNYWRQLLNAKLITQRKFDNLTKAERGGLSELDKAGFIKRQLVETRQITKHVAQILDSRMNTKYDENDKLIREVKVITLKSKLVSDFRKDFQFYKVREINNYHHAHDAYLNAVVGTALIKKYPKLESEFVYGDYKVYDVRKMIAKSEQEIGKATAKYFFYSNIMNFFKTEITLANGEIRKRPLIETNGETGEIVWDKGRDFATVRKVLSMPQVNIVKKTEVQTGGFSKESILPKRNSDKLIARKKDWDPKKYGGFDSPTVAYSVLVVAKVEKGKSKKLKSVKELLGITIMERSSFEKNPIDFLEAKGYKEVKKDLIIKLPKYSLFELENGRKRMLASAGELQKGNELALPSKYVNFLYLASHYEKLKGSPEDNEQKQLFVEQHKHYLDEIIEQISEFSKRVILADANLDKVLSAYNKHRDKPIREQAENIIHLFTLTNLGAPAAFKYFDTTIDRKRYTSTKEVLDATLIHQSITGLYETRIDLSQLGGDGGPAPGGSGGGGGTLNIEDEYRLHETSKEPDVSLGSTWLSDFPQAWAETGGMGLAVRQAPLIIPLKATSTPVSIKQYPMSQEARLGIKPHIQRLLDQGILVPCQSPWNTPLLPVKKPGTNDYRPVQDLREVNKRVEDIHPTVPNPYNLLSGLPPSHQWYTVLDLKDAFFCLRLHPTSQPLFAFEWRDPEMGISGQLTWTRLPQGFKNSPTLFNEALHRDLAGFRIQHPDLILLQYVDDLLLAATSELDCQQGTRALLQTLGDLGYRASAKKAQICQKQVKYLGYLLKEGQRWLTEARKETVMGQPIPKTPRQLREFLGKAGFCRLFIPGFAEMAAPLYPLTKPGTLFNWGPDQQKAFQEIKQALLTAPALGLPDLTKPFELFVDEKQGYAKGVLTQKLGPWRRPVAYLSKKLDPVAAGWPPCLRMVAAIAVLTKDAGKLTMGQPLVILAPHAVEALVKQPPDRWLSNARMTHYQALLLDTDRVQFGPVVALNPATLLPLPEEGLQHDCLDILAEAHGTRSDLMDQPLPDADHTWYTDGSSFLQEGQRKAGAAVTTETEVIWARALPAGTSAQRAELIALTQALKMAEGKKLNVYTDSRYAFATAHIHGEIYRRRGWLTSEGKEIKNKDEILALLKALFLPKRLSIIHCPGHQKGNSAEARGNRMADQAAREVATRETPETSTLLAGKRTADGSEFEKRTADGSEFESPKKKAKVE

SEQ ID NO: 2404 - protein, 2096 aa, synthetic construct
MPAAKRVKLDGGDKKYSIGLDIGTNSVGWAVITDEYKVPSKKFKVLGNTDRHSIKKNLIGALLFDSGETAEATRLKRTARRRYTRRKNRICYLQEIFSNEMAKVDDSFFHRLEESFLVEEDKKHERHPIFGNIVDEVAYHEKYPTIYHLRKKLVDSTDKADLRLIYLALAHMIKFRGHFLIEGDLNPDNSDVDKLFIQLVQTYNQLFEENPINASGVDAKAILSARLSKSRRLENLIAQLPGEKKNGLFGNLIALSLGLTPNFKSNFDLAEDAKLQLSKDTYDDDLDNLLAQIGDQYADLFLAAKNLSDAILLSDILRVNTEITKAPLSASMIKRYDEHHQDLTLLKALVRQQLPEKYKEIFFDQSKNGYAGYIDGGASQEEFYKFIKPILEKMDGTEELLVKLNREDLLRKQRTFDNGSIPHQIHLGELHAILRRQEDFYPFLKDNREKIEKILTFRIPYYVGPLARGNSRFAWMTRKSEETITPWNFEEVVDKGASAQSFIERMTNFDKNLPNEKVLPKHSLLYEYFTVYNELTKVKYVTEGMRKPAFLSGEQKKAIVDLLFKTNRKVTVKQLKEDYFKKIECFDSVEISGVEDRFNASLGTYHDLLKIIKDKDFLDNEENEDILEDIVLTLTLFEDREMIEERLKTYAHLFDDKVMKQLKRRRYTGWGRLSRKLINGIRDKQSGKTILDFLKSDGFANRNFMQLIHDDSLTFKEDIQKAQVSGQGDSLHEHIANLAGSPAIKKGILQTVKVVDELVKVMGRHKPENIVIEMARENQTTQKGQKNSRERMKRIEEGIKELGSQILKEHPVENTQLQNEKLYLYYLQNGRDMYVDQELDINRLSDYDVDHIVPQSFLKDDSIDNKVLTRSDKARGKSDNVPSEEVVKKMKNYWRQLLNAKLITQRKFDNLTKAERGGLSELDKAGFIKRQLVETRQITKHVAQILDSRMNTKYDENDKLIREVKVITLKSKLVSDFRKDFQFYKVREINNYHHAHDAYLNAVVGTALIKKYPKLESEFVYGDYKVYDVRKMIAKSEQEIGKATAKYFFYSNIMNFFKTEITLANGEIRKRPLIETNGETGEIVWDKGRDFATVRKVLSMPQVNIVKKTEVQTGGFSKESILPKRNSDKLIARKKDWDPKKYGGFDSPTVAYSVLVVAKVEKGKSKKLKSVKELLGITIMERSSFEKNPIDFLEAKGYKEVKKDLIIKLPKYSLFELENGRKRMLASAGELQKGNELALPSKYVNFLYLASHYEKLKGSPEDNEQKQLFVEQHKHYLDEIIEQISEFSKRVILADANLDKVLSAYNKHRDKPIREQAENIIHLFTLTNLGAPAAFKYFDTTIDRKRYTSTKEVLDATLIHQSITGLYETRIDLSQLGGDGGGGSGSSEAAAKGGTLNIEDEYRLHETSKEPDVSLGSTWLSDFPQAWAETGGMGLAVRQAPLIIPLKATSTPVSIKQYPMSQEARLGIKPHIQRLLDQGILVPCQSPWNTPLLPVKKPGTNDYRPVQDLREVNKRVEDIHPTVPNPYNLLSGLPPSHQWYTVLDLKDAFFCLRLHPTSQPLFAFEWRDPEMGISGQLTWTRLPQGFKNSPTLFNEALHRDLAGFRIQHPDLILLQYVDDLLLAATSELDCQQGTRALLQTLGDLGYRASAKKAQICQKQVKYLGYLLKEGQRWLTEARKETVMGQPIPKTPRQLREFLGKAGFCRLFIPGFAEMAAPLYPLTKPGTLFNWGPDQQKAFQEIKQALLTAPALGLPDLTKPFELFVDEKQGYAKGVLTQKLGPWRRPVAYLSKKLDPVAAGWPPCLRMVAAIAVLTKDAGKLTMGQPLVILAPHAVEALVKQPPDRWLSNARMTHYQALLLDTDRVQFGPVVALNPATLLPLPEEGLQHDCLDILAEAHGTRSDLMDQPLPDADHTWYTDGSSFLQEGQRKAGAAVTTETEVIWARALPAGTSAQRAELIALTQALKMAEGKKLNVYTDSRYAFATAHIHGEIYRRRGWLTSEGKEIKNKDEILALLKALFLPKRLSIIHCPGHQKGNSAEARGNRMADQAAREVATRETPETSTLLAGKRTADGSEFEKRTADGSEFESPKKKAKVE

SEQ ID NO: 2405 - protein, 2100 aa, synthetic construct
MPAAKRVKLDGGDKKYSIGLDIGTNSVGWAVITDEYKVPSKKFKVLGNTDRHSIKKNLIGALLFDSGETAEATRLKRTARRRYTRRKNRICYLQEIFSNEMAKVDDSFFHRLEESFLVEEDKKHERHPIFGNIVDEVAYHEKYPTIYHLRKKLVDSTDKADLRLIYLALAHMIKFRGHFLIEGDLNPDNSDVDKLFIQLVQTYNQLFEENPINASGVDAKAILSARLSKSRRLENLIAQLPGEKKNGLFGNLIALSLGLTPNFKSNFDLAEDAKLQLSKDTYDDDLDNLLAQIGDQYADLFLAAKNLSDAILLSDILRVNTEITKAPLSASMIKRYDEHHQDLTLLKALVRQQLPEKYKEIFFDQSKNGYAGYIDGGASQEEFYKFIKPILEKMDGTEELLVKLNREDLLRKQRTFDNGSIPHQIHLGELHAILRRQEDFYPFLKDNREKIEKILTFRIPYYVGPLARGNSRFAWMTRKSEETITPWNFEEVVDKGASAQSFIERMTNFDKNLPNEKVLPKHSLLYEYFTVYNELTKVKYVTEGMRKPAFLSGEQKKAIVDLLFKTNRKVTVKQLKEDYFKKIECFDSVEISGVEDRFNASLGTYHDLLKIIKDKDFLDNEENEDILEDIVLTLTLFEDREMIEERLKTYAHLFDDKVMKQLKRRRYTGWGRLSRKLINGIRDKQSGKTILDFLKSDGFANRNFMQLIHDDSLTFKEDIQKAQVSGQGDSLHEHIANLAGSPAIKKGILQTVKVVDELVKVMGRHKPENIVIEMARENQTTQKGQKNSRERMKRIEEGIKELGSQILKEHPVENTQLQNEKLYLYYLQNGRDMYVDQELDINRLSDYDVDHIVPQSFLKDDSIDNKVLTRSDKARGKSDNVPSEEVVKKMKNYWRQLLNAKLITQRKFDNLTKAERGGLSELDKAGFIKRQLVETRQITKHVAQILDSRMNTKYDENDKLIREVKVITLKSKLVSDFRKDFQFYKVREINNYHHAHDAYLNAVVGTALIKKYPKLESEFVYGDYKVYDVRKMIAKSEQEIGKATAKYFFYSNIMNFFKTEITLANGEIRKRPLIETNGETGEIVWDKGRDFATVRKVLSMPQVNIVKKTEVQTGGFSKESILPKRNSDKLIARKKDWDPKKYGGFDSPTVAYSVLVVAKVEKGKSKKLKSVKELLGITIMERSSFEKNPIDFLEAKGYKEVKKDLIIKLPKYSLFELENGRKRMLASAGELQKGNELALPSKYVNFLYLASHYEKLKGSPEDNEQKQLFVEQHKHYLDEIIEQISEFSKRVILADANLDKVLSAYNKHRDKPIREQAENIIHLFTLTNLGAPAAFKYFDTTIDRKRYTSTKEVLDATLIHQSITGLYETRIDLSQLGGDGGGSSGSSGSSGSSGSSGGTLNIEDEYRLHETSKEPDVSLGSTWLSDFPQAWAETGGMGLAVRQAPLIIPLKATSTPVSIKQYPMSQEARLGIKPHIQRLLDQGILVPCQSPWNTPLLPVKKPGTNDYRPVQDLREVNKRVEDIHPTVPNPYNLLSGLPPSHQWYTVLDLKDAFFCLRLHPTSQPLFAFEWRDPEMGISGQLTWTRLPQGFKNSPTLFNEALHRDLAGFRIQHPDLILLQYVDDLLLAATSELDCQQGTRALLQTLGDLGYRASAKKAQICQKQVKYLGYLLKEGQRWLTEARKETVMGQPIPKTPRQLREFLGKAGFCRLFIPGFAEMAAPLYPLTKPGTLFNWGPDQQKAFQEIKQALLTAPALGLPDLTKPFELFVDEKQGYAKGVLTQKLGPWRRPVAYLSKKLDPVAAGWPPCLRMVAAIAVLTKDAGKLTMGQPLVILAPHAVEALVKQPPDRWLSNARMTHYQALLLDTDRVQFGPVVALNPATLLPLPEEGLQHDCLDILAEAHGTRSDLMDQPLPDADHTWYTDGSSFLQEGQRKAGAAVTTETEVIWARALPAGTSAQRAELIALTQALKMAEGKKLNVYTDSRYAFATAHIHGEIYRRRGWLTSEGKEIKNKDEILALLKALFLPKRLSIIHCPGHQKGNSAEARGNRMADQAAREVATRETPETSTLLAGKRTADGSEFEKRTADGSEFESPKKKAKVE

SEQ ID NO: 2406 - protein, 2091 aa, synthetic construct
MPAAKRVKLDGGDKKYSIGLDIGTNSVGWAVITDEYKVPSKKFKVLGNTDRHSIKKNLIGALLFDSGETAEATRLKRTARRRYTRRKNRICYLQEIFSNEMAKVDDSFFHRLEESFLVEEDKKHERHPIFGNIVDEVAYHEKYPTIYHLRKKLVDSTDKADLRLIYLALAHMIKFRGHFLIEGDLNPDNSDVDKLFIQLVQTYNQLFEENPINASGVDAKAILSARLSKSRRLENLIAQLPGEKKNGLFGNLIALSLGLTPNFKSNFDLAEDAKLQLSKDTYDDDLDNLLAQIGDQYADLFLAAKNLSDAILLSDILRVNTEITKAPLSASMIKRYDEHHQDLTLLKALVRQQLPEKYKEIFFDQSKNGYAGYIDGGASQEEFYKFIKPILEKMDGTEELLVKLNREDLLRKQRTFDNGSIPHQIHLGELHAILRRQEDFYPFLKDNREKIEKILTFRIPYYVGPLARGNSRFAWMTRKSEETITPWNFEEVVDKGASAQSFIERMTNFDKNLPNEKVLPKHSLLYEYFTVYNELTKVKYVTEGMRKPAFLSGEQKKAIVDLLFKTNRKVTVKQLKEDYFKKIECFDSVEISGVEDRFNASLGTYHDLLKIIKDKDFLDNEENEDILEDIVLTLTLFEDREMIEERLKTYAHLFDDKVMKQLKRRRYTGWGRLSRKLINGIRDKQSGKTILDFLKSDGFANRNFMQLIHDDSLTFKEDIQKAQVSGQGDSLHEHIANLAGSPAIKKGILQTVKVVDELVKVMGRHKPENIVIEMARENQTTQKGQKNSRERMKRIEEGIKELGSQILKEHPVENTQLQNEKLYLYYLQNGRDMYVDQELDINRLSDYDVDHIVPQSFLKDDSIDNKVLTRSDKARGKSDNVPSEEVVKKMKNYWRQLLNAKLITQRKFDNLTKAERGGLSELDKAGFIKRQLVETRQITKHVAQILDSRMNTKYDENDKLIREVKVITLKSKLVSDFRKDFQFYKVREINNYHHAHDAYLNAVVGTALIKKYPKLESEFVYGDYKVYDVRKMIAKSEQEIGKATAKYFFYSNIMNFFKTEITLANGEIRKRPLIETNGETGEIVWDKGRDFATVRKVLSMPQVNIVKKTEVQTGGFSKESILPKRNSDKLIARKKDWDPKKYGGFDSPTVAYSVLVVAKVEKGKSKKLKSVKELLGITIMERSSFEKNPIDFLEAKGYKEVKKDLIIKLPKYSLFELENGRKRMLASAGELQKGNELALPSKYVNFLYLASHYEKLKGSPEDNEQKQLFVEQHKHYLDEIIEQISEFSKRVILADANLDKVLSAYNKHRDKPIREQAENIIHLFTLTNLGAPAAFKYFDTTIDRKRYTSTKEVLDATLIHQSITGLYETRIDLSQLGGDGGGSSGGSGGTLNIEDEYRLHETSKEPDVSLGSTWLSDFPQAWAETGGMGLAVRQAPLIIPLKATSTPVSIKQYPMSQEARLGIKPHIQRLLDQGILVPCQSPWNTPLLPVKKPGTNDYRPVQDLREVNKRVEDIHPTVPNPYNLLSGLPPSHQWYTVLDLKDAFFCLRLHPTSQPLFAFEWRDPEMGISGQLTWTRLPQGFKNSPTLFNEALHRDLAGFRIQHPDLILLQYVDDLLLAATSELDCQQGTRALLQTLGDLGYRASAKKAQICQKQVKYLGYLLKEGQRWLTEARKETVMGQPIPKTPRQLREFLGKAGFCRLFIPGFAEMAAPLYPLTKPGTLFNWGPDQQKAFQEIKQALLTAPALGLPDLTKPFELFVDEKQGYAKGVLTQKLGPWRRPVAYLSKKLDPVAAGWPPCLRMVAAIAVLTKDAGKLTMGQPLVILAPHAVEALVKQPPDRWLSNARMTHYQALLLDTDRVQFGPVVALNPATLLPLPEEGLQHDCLDILAEAHGTRSDLMDQPLPDADHTWYTDGSSFLQEGQRKAGAAVTTETEVIWARALPAGTSAQRAELIALTQALKMAEGKKLNVYTDSRYAFATAHIHGEIYRRRGWLTSEGKEIKNKDEILALLKALFLPKRLSIIHCPGHQKGNSAEARGNRMADQAAREVATRETPETSTLLAGKRTADGSEFEKRTADGSEFESPKKKAKVE

SEQ ID NO: 2407 - protein, 2094 aa, synthetic construct
MPAAKRVKLDGGDKKYSIGLDIGTNSVGWAVITDEYKVPSKKFKVLGNTDRHSIKKNLIGALLFDSGETAEATRLKRTARRRYTRRKNRICYLQEIFSNEMAKVDDSFFHRLEESFLVEEDKKHERHPIFGNIVDEVAYHEKYPTIYHLRKKLVDSTDKADLRLIYLALAHMIKFRGHFLIEGDLNPDNSDVDKLFIQLVQTYNQLFEENPINASGVDAKAILSARLSKSRRLENLIAQLPGEKKNGLFGNLIALSLGLTPNFKSNFDLAEDAKLQLSKDTYDDDLDNLLAQIGDQYADLFLAAKNLSDAILLSDILRVNTEITKAPLSASMIKRYDEHHQDLTLLKALVRQQLPEKYKEIFFDQSKNGYAGYIDGGASQEEFYKFIKPILEKMDGTEELLVKLNREDLLRKQRTFDNGSIPHQIHLGELHAILRRQEDFYPFLKDNREKIEKILTFRIPYYVGPLARGNSRFAWMTRKSEETITPWNFEEVVDKGASAQSFIERMTNFDKNLPNEKVLPKHSLLYEYFTVYNELTKVKYVTEGMRKPAFLSGEQKKAIVDLLFKTNRKVTVKQLKEDYFKKIECFDSVEISGVEDRFNASLGTYHDLLKIIKDKDFLDNEENEDILEDIVLTLTLFEDREMIEERLKTYAHLFDDKVMKQLKRRRYTGWGRLSRKLINGIRDKQSGKTILDFLKSDGFANRNFMQLIHDDSLTFKEDIQKAQVSGQGDSLHEHIANLAGSPAIKKGILQTVKVVDELVKVMGRHKPENIVIEMARENQTTQKGQKNSRERMKRIEEGIKELGSQILKEHPVENTQLQNEKLYLYYLQNGRDMYVDQELDINRLSDYDVDHIVPQSFLKDDSIDNKVLTRSDKARGKSDNVPSEEVVKKMKNYWRQLLNAKLITQRKFDNLTKAERGGLSELDKAGFIKRQLVETRQITKHVAQILDSRMNTKYDENDKLIREVKVITLKSKLVSDFRKDFQFYKVREINNYHHAHDAYLNAVVGTALIKKYPKLESEFVYGDYKVYDVRKMIAKSEQEIGKATAKYFFYSNIMNFFKTEITLANGEIRKRPLIETNGETGEIVWDKGRDFATVRKVLSMPQVNIVKKTEVQTGGFSKESILPKRNSDKLIARKKDWDPKKYGGFDSPTVAYSVLVVAKVEKGKSKKLKSVKELLGITIMERSSFEKNPIDFLEAKGYKEVKKDLIIKLPKYSLFELENGRKRMLASAGELQKGNELALPSKYVNFLYLASHYEKLKGSPEDNEQKQLFVEQHKHYLDEIIEQISEFSKRVILADANLDKVLSAYNKHRDKPIREQAENIIHLFTLTNLGAPAAFKYFDTTIDRKRYTSTKEVLDATLIHQSITGLYETRIDLSQLGGDGGGSSPAPGGSGGTLNIEDEYRLHETSKEPDVSLGSTWLSDFPQAWAETGGMGLAVRQAPLIIPLKATSTPVSIKQYPMSQEARLGIKPHIQRLLDQGILVPCQSPWNTPLLPVKKPGTNDYRPVQDLREVNKRVEDIHPTVPNPYNLLSGLPPSHQWYTVLDLKDAFFCLRLHPTSQPLFAFEWRDPEMGISGQLTWTRLPQGFKNSPTLFNEALHRDLAGFRIQHPDLILLQYVDDLLLAATSELDCQQGTRALLQTLGDLGYRASAKKAQICQKQVKYLGYLLKEGQRWLTEARKETVMGQPIPKTPRQLREFLGKAGFCRLFIPGFAEMAAPLYPLTKPGTLFNWGPDQQKAFQEIKQALLTAPALGLPDLTKPFELFVDEKQGYAKGVLTQKLGPWRRPVAYLSKKLDPVAAGWPPCLRMVAAIAVLTKDAGKLTMGQPLVILAPHAVEALVKQPPDRWLSNARMTHYQALLLDTDRVQFGPVVALNPATLLPLPEEGLQHDCLDILAEAHGTRSDLMDQPLPDADHTWYTDGSSFLQEGQRKAGAAVTTETEVIWARALPAGTSAQRAELIALTQALKMAEGKKLNVYTDSRYAFATAHIHGEIYRRRGWLTSEGKEIKNKDEILALLKALFLPKRLSIIHCPGHQKGNSAEARGNRMADQAAREVATRETPETSTLLAGKRTADGSEFEKRTADGSEFESPKKKAKVE

SEQ ID NO: 2408 - protein, 2096 aa, synthetic construct
MPAAKRVKLDGGDKKYSIGLDIGTNSVGWAVITDEYKVPSKKFKVLGNTDRHSIKKNLIGALLFDSGETAEATRLKRTARRRYTRRKNRICYLQEIFSNEMAKVDDSFFHRLEESFLVEEDKKHERHPIFGNIVDEVAYHEKYPTIYHLRKKLVDSTDKADLRLIYLALAHMIKFRGHFLIEGDLNPDNSDVDKLFIQLVQTYNQLFEENPINASGVDAKAILSARLSKSRRLENLIAQLPGEKKNGLFGNLIALSLGLTPNFKSNFDLAEDAKLQLSKDTYDDDLDNLLAQIGDQYADLFLAAKNLSDAILLSDILRVNTEITKAPLSASMIKRYDEHHQDLTLLKALVRQQLPEKYKEIFFDQSKNGYAGYIDGGASQEEFYKFIKPILEKMDGTEELLVKLNREDLLRKQRTFDNGSIPHQIHLGELHAILRRQEDFYPFLKDNREKIEKILTFRIPYYVGPLARGNSRFAWMTRKSEETITPWNFEEVVDKGASAQSFIERMTNFDKNLPNEKVLPKHSLLYEYFTVYNELTKVKYVTEGMRKPAFLSGEQKKAIVDLLFKTNRKVTVKQLKEDYFKKIECFDSVEISGVEDRFNASLGTYHDLLKIIKDKDFLDNEENEDILEDIVLTLTLFEDREMIEERLKTYAHLFDDKVMKQLKRRRYTGWGRLSRKLINGIRDKQSGKTILDFLKSDGFANRNFMQLIHDDSLTFKEDIQKAQVSGQGDSLHEHIANLAGSPAIKKGILQTVKVVDELVKVMGRHKPENIVIEMARENQTTQKGQKNSRERMKRIEEGIKELGSQILKEHPVENTQLQNEKLYLYYLQNGRDMYVDQELDINRLSDYDVDHIVPQSFLKDDSIDNKVLTRSDKARGKSDNVPSEEVVKKMKNYWRQLLNAKLITQRKFDNLTKAERGGLSELDKAGFIKRQLVETRQITKHVAQILDSRMNTKYDENDKLIREVKVITLKSKLVSDFRKDFQFYKVREINNYHHAHDAYLNAVVGTALIKKYPKLESEFVYGDYKVYDVRKMIAKSEQEIGKATAKYFFYSNIMNFFKTEITLANGEIRKRPLIETNGETGEIVWDKGRDFATVRKVLSMPQVNIVKKTEVQTGGFSKESILPKRNSDKLIARKKDWDPKKYGGFDSPTVAYSVLVVAKVEKGKSKKLKSVKELLGITIMERSSFEKNPIDFLEAKGYKEVKKDLIIKLPKYSLFELENGRKRMLASAGELQKGNELALPSKYVNFLYLASHYEKLKGSPEDNEQKQLFVEQHKHYLDEIIEQISEFSKRVILADANLDKVLSAYNKHRDKPIREQAENIIHLFTLTNLGAPAAFKYFDTTIDRKRYTSTKEVLDATLIHQSITGLYETRIDLSQLGGDGGGGSEAAAKGSSGGTLNIEDEYRLHETSKEPDVSLGSTWLSDFPQAWAETGGMGLAVRQAPLIIPLKATSTPVSIKQYPMSQEARLGIKPHIQRLLDQGILVPCQSPWNTPLLPVKKPGTNDYRPVQDLREVNKRVEDIHPTVPNPYNLLSGLPPSHQWYTVLDLKDAFFCLRLHPTSQPLFAFEWRDPEMGISGQLTWTRLPQGFKNSPTLFNEALHRDLAGFRIQHPDLILLQYVDDLLLAATSELDCQQGTRALLQTLGDLGYRASAKKAQICQKQVKYLGYLLKEGQRWLTEARKETVMGQPIPKTPRQLREFLGKAGFCRLFIPGFAEMAAPLYPLTKPGTLFNWGPDQQKAFQEIKQALLTAPALGLPDLTKPFELFVDEKQGYAKGVLTQKLGPWRRPVAYLSKKLDPVAAGWPPCLRMVAAIAVLTKDAGKLTMGQPLVILAPHAVEALVKQPPDRWLSNARMTHYQALLLDTDRVQFGPVVALNPATLLPLPEEGLQHDCLDILAEAHGTRSDLMDQPLPDADHTWYTDGSSFLQEGQRKAGAAVTTETEVIWARALPAGTSAQRAELIALTQALKMAEGKKLNVYTDSRYAFATAHIHGEIYRRRGWLTSEGKEIKNKDEILALLKALFLPKRLSIIHCPGHQKGNSAEARGNRMADQAAREVATRETPETSTLLAGKRTADGSEFEKRTADGSEFESPKKKAKVE

SEQ ID NO: 2409 - protein, 2094 aa, synthetic construct
MPAAKRVKLDGGDKKYSIGLDIGTNSVGWAVITDEYKVPSKKFKVLGNTDRHSIKKNLIGALLFDSGETAEATRLKRTARRRYTRRKNRICYLQEIFSNEMAKVDDSFFHRLEESFLVEEDKKHERHPIFGNIVDEVAYHEKYPTIYHLRKKLVDSTDKADLRLIYLALAHMIKFRGHFLIEGDLNPDNSDVDKLFIQLVQTYNQLFEENPINASGVDAKAILSARLSKSRRLENLIAQLPGEKKNGLFGNLIALSLGLTPNFKSNFDLAEDAKLQLSKDTYDDDLDNLLAQIGDQYADLFLAAKNLSDAILLSDILRVNTEITKAPLSASMIKRYDEHHQDLTLLKALVRQQLPEKYKEIFFDQSKNGYAGYIDGGASQEEFYKFIKPILEKMDGTEELLVKLNREDLLRKQRTFDNGSIPHQIHLGELHAILRRQEDFYPFLKDNREKIEKILTFRIPYYVGPLARGNSRFAWMTRKSEETITPWNFEEVVDKGASAQSFIERMTNFDKNLPNEKVLPKHSLLYEYFTVYNELTKVKYVTEGMRKPAFLSGEQKKAIVDLLFKTNRKVTVKQLKEDYFKKIECFDSVEISGVEDRFNASLGTYHDLLKIIKDKDFLDNEENEDILEDIVLTLTLFEDREMIEERLKTYAHLFDDKVMKQLKRRRYTGWGRLSRKLINGIRDKQSGKTILDFLKSDGFANRNFMQLIHDDSLTFKEDIQKAQVSGQGDSLHEHIANLAGSPAIKKGILQTVKVVDELVKVMGRHKPENIVIEMARENQTTQKGQKNSRERMKRIEEGIKELGSQILKEHPVENTQLQNEKLYLYYLQNGRDMYVDQELDINRLSDYDVDHIVPQSFLKDDSIDNKVLTRSDKARGKSDNVPSEEVVKKMKNYWRQLLNAKLITQRKFDNLTKAERGGLSELDKAGFIKRQLVETRQITKHVAQILDSRMNTKYDENDKLIREVKVITLKSKLVSDFRKDFQFYKVREINNYHHAHDAYLNAVVGTALIKKYPKLESEFVYGDYKVYDVRKMIAKSEQEIGKATAKYFFYSNIMNFFKTEITLANGEIRKRPLIETNGETGEIVWDKGRDFATVRKVLSMPQVNIVKKTEVQTGGFSKESILPKRNSDKLIARKKDWDPKKYGGFDSPTVAYSVLVVAKVEKGKSKKLKSVKELLGITIMERSSFEKNPIDFLEAKGYKEVKKDLIIKLPKYSLFELENGRKRMLASAGELQKGNELALPSKYVNFLYLASHYEKLKGSPEDNEQKQLFVEQHKHYLDEIIEQISEFSKRVILADANLDKVLSAYNKHRDKPIREQAENIIHLFTLTNLGAPAAFKYFDTTIDRKRYTSTKEVLDATLIHQSITGLYETRIDLSQLGGDGGGGGGSSGGSGGTLNIEDEYRLHETSKEPDVSLGSTWLSDFPQAWAETGGMGLAVRQAPLIIPLKATSTPVSIKQYPMSQEARLGIKPHIQRLLDQGILVPCQSPWNTPLLPVKKPGTNDYRPVQDLREVNKRVEDIHPTVPNPYNLLSGLPPSHQWYTVLDLKDAFFCLRLHPTSQPLFAFEWRDPEMGISGQLTWTRLPQGFKNSPTLFNEALHRDLAGFRIQHPDLILLQYVDDLLLAATSELDCQQGTRALLQTLGDLGYRASAKKAQICQKQVKYLGYLLKEGQRWLTEARKETVMGQPIPKTPRQLREFLGKAGFCRLFIPGFAEMAAPLYPLTKPGTLFNWGPDQQKAFQEIKQALLTAPALGLPDLTKPFELFVDEKQGYAKGVLTQKLGPWRRPVAYLSKKLDPVAAGWPPCLRMVAAIAVLTKDAGKLTMGQPLVILAPHAVEALVKQPPDRWLSNARMTHYQALLLDTDRVQFGPVVALNPATLLPLPEEGLQHDCLDILAEAHGTRSDLMDQPLPDADHTWYTDGSSFLQEGQRKAGAAVTTETEVIWARALPAGTSAQRAELIALTQALKMAEGKKLNVYTDSRYAFATAHIHGEIYRRRGWLTSEGKEIKNKDEILALLKALFLPKRLSIIHCPGHQKGNSAEARGNRMADQAAREVATRETPETSTLLAGKRTADGSEFEKRTADGSEFESPKKKAKVE

SEQ ID NO: 2410 - protein, 2110 aa, synthetic construct
MPAAKRVKLDGGDKKYSIGLDIGTNSVGWAVITDEYKVPSKKFKVLGNTDRHSIKKNLIGALLFDSGETAEATRLKRTARRRYTRRKNRICYLQEIFSNEMAKVDDSFFHRLEESFLVEEDKKHERHPIFGNIVDEVAYHEKYPTIYHLRKKLVDSTDKADLRLIYLALAHMIKFRGHFLIEGDLNPDNSDVDKLFIQLVQTYNQLFEENPINASGVDAKAILSARLSKSRRLENLIAQLPGEKKNGLFGNLIALSLGLTPNFKSNFDLAEDAKLQLSKDTYDDDLDNLLAQIGDQYADLFLAAKNLSDAILLSDILRVNTEITKAPLSASMIKRYDEHHQDLTLLKALVRQQLPEKYKEIFFDQSKNGYAGYIDGGASQEEFYKFIKPILEKMDGTEELLVKLNREDLLRKQRTFDNGSIPHQIHLGELHAILRRQEDFYPFLKDNREKIEKILTFRIPYYVGPLARGNSRFAWMTRKSEETITPWNFEEVVDKGASAQSFIERMTNFDKNLPNEKVLPKHSLLYEYFTVYNELTKVKYVTEGMRKPAFLSGEQKKAIVDLLFKTNRKVTVKQLKEDYFKKIECFDSVEISGVEDRFNASLGTYHDLLKIIKDKDFLDNEENEDILEDIVLTLTLFEDREMIEERLKTYAHLFDDKVMKQLKRRRYTGWGRLSRKLINGIRDKQSGKTILDFLKSDGFANRNFMQLIHDDSLTFKEDIQKAQVSGQGDSLHEHIANLAGSPAIKKGILQTVKVVDELVKVMGRHKPENIVIEMARENQTTQKGQKNSRERMKRIEEGIKELGSQILKEHPVENTQLQNEKLYLYYLQNGRDMYVDQELDINRLSDYDVDHIVPQSFLKDDSIDNKVLTRSDKARGKSDNVPSEEVVKKMKNYWRQLLNAKLITQRKFDNLTKAERGGLSELDKAGFIKRQLVETRQITKHVAQILDSRMNTKYDENDKLIREVKVITLKSKLVSDFRKDFQFYKVREINNYHHAHDAYLNAVVGTALIKKYPKLESEFVYGDYKVYDVRKMIAKSEQEIGKATAKYFFYSNIMNFFKTEITLANGEIRKRPLIETNGETGEIVWDKGRDFATVRKVLSMPQVNIVKKTEVQTGGFSKESILPKRNSDKLIARKKDWDPKKYGGFDSPTVAYSVLVVAKVEKGKSKKLKSVKELLGITIMERSSFEKNPIDFLEAKGYKEVKKDLIIKLPKYSLFELENGRKRMLASAGELQKGNELALPSKYVNFLYLASHYEKLKGSPEDNEQKQLFVEQHKHYLDEIIEQISEFSKRVILADANLDKVLSAYNKHRDKPIREQAENIIHLFTLTNLGAPAAFKYFDTTIDRKRYTSTKEVLDATLIHQSITGLYETRIDLSQLGGDGGGGGGSGGGGSGGGGSGGGGSGGGGSGGTLNIEDEYRLHETSKEPDVSLGSTWLSDFPQAWAETGGMGLAVRQAPLIIPLKATSTPVSIKQYPMSQEARLGIKPHIQRLLDQGILVPCQSPWNTPLLPVKKPGTNDYRPVQDLREVNKRVEDIHPTVPNPYNLLSGLPPSHQWYTVLDLKDAFFCLRLHPTSQPLFAFEWRDPEMGISGQLTWTRLPQGFKNSPTLFNEALHRDLAGFRIQHPDLILLQYVDDLLLAATSELDCQQGTRALLQTLGDLGYRASAKKAQICQKQVKYLGYLLKEGQRWLTEARKETVMGQPIPKTPRQLREFLGKAGFCRLFIPGFAEMAAPLYPLTKPGTLFNWGPDQQKAFQEIKQALLTAPALGLPDLTKPFELFVDEKQGYAKGVLTQKLGPWRRPVAYLSKKLDPVAAGWPPCLRMVAAIAVLTKDAGKLTMGQPLVILAPHAVEALVKQPPDRWLSNARMTHYQALLLDTDRVQFGPVVALNPATLLPLPEEGLQHDCLDILAEAHGTRSDLMDQPLPDADHTWYTDGSSFLQEGQRKAGAAVTTETEVIWARALPAGTSAQRAELIALTQALKMAEGKKLNVYTDSRYAFATAHIHGEIYRRRGWLTSEGKEIKNKDEILALLKALFLPKRLSIIHCPGHQKGNSAEARGNRMADQAAREVATRETPETSTLLAGKRTADGSEFEKRTADGSEFESPKKKAKVE

SEQ ID NO: 2411 - protein, 2091 aa, synthetic construct
MPAAKRVKLDGGDKKYSIGLDIGTNSVGWAVITDEYKVPSKKFKVLGNTDRHSIKKNLIGALLFDSGETAEATRLKRTARRRYTRRKNRICYLQEIFSNEMAKVDDSFFHRLEESFLVEEDKKHERHPIFGNIVDEVAYHEKYPTIYHLRKKLVDSTDKADLRLIYLALAHMIKFRGHFLIEGDLNPDNSDVDKLFIQLVQTYNQLFEENPINASGVDAKAILSARLSKSRRLENLIAQLPGEKKNGLFGNLIALSLGLTPNFKSNFDLAEDAKLQLSKDTYDDDLDNLLAQIGDQYADLFLAAKNLSDAILLSDILRVNTEITKAPLSASMIKRYDEHHQDLTLLKALVRQQLPEKYKEIFFDQSKNGYAGYIDGGASQEEFYKFIKPILEKMDGTEELLVKLNREDLLRKQRTFDNGSIPHQIHLGELHAILRRQEDFYPFLKDNREKIEKILTFRIPYYVGPLARGNSRFAWMTRKSEETITPWNFEEVVDKGASAQSFIERMTNFDKNLPNEKVLPKHSLLYEYFTVYNELTKVKYVTEGMRKPAFLSGEQKKAIVDLLFKTNRKVTVKQLKEDYFKKIECFDSVEISGVEDRFNASLGTYHDLLKIIKDKDFLDNEENEDILEDIVLTLTLFEDREMIEERLKTYAHLFDDKVMKQLKRRRYTGWGRLSRKLINGIRDKQSGKTILDFLKSDGFANRNFMQLIHDDSLTFKEDIQKAQVSGQGDSLHEHIANLAGSPAIKKGILQTVKVVDELVKVMGRHKPENIVIEMARENQTTQKGQKNSRERMKRIEEGIKELGSQILKEHPVENTQLQNEKLYLYYLQNGRDMYVDQELDINRLSDYDVDHIVPQSFLKDDSIDNKVLTRSDKARGKSDNVPSEEVVKKMKNYWRQLLNAKLITQRKFDNLTKAERGGLSELDKAGFIKRQLVETRQITKHVAQILDSRMNTKYDENDKLIREVKVITLKSKLVSDFRKDFQFYKVREINNYHHAHDAYLNAVVGTALIKKYPKLESEFVYGDYKVYDVRKMIAKSEQEIGKATAKYFFYSNIMNFFKTEITLANGEIRKRPLIETNGETGEIVWDKGRDFATVRKVLSMPQVNIVKKTEVQTGGFSKESILPKRNSDKLIARKKDWDPKKYGGFDSPTVAYSVLVVAKVEKGKSKKLKSVKELLGITIMERSSFEKNPIDFLEAKGYKEVKKDLIIKLPKYSLFELENGRKRMLASAGELQKGNELALPSKYVNFLYLASHYEKLKGSPEDNEQKQLFVEQHKHYLDEIIEQISEFSKRVILADANLDKVLSAYNKHRDKPIREQAENIIHLFTLTNLGAPAAFKYFDTTIDRKRYTSTKEVLDATLIHQSITGLYETRIDLSQLGGDGGGSSGSSGGTLNIEDEYRLHETSKEPDVSLGSTWLSDFPQAWAETGGMGLAVRQAPLIIPLKATSTPVSIKQYPMSQEARLGIKPHIQRLLDQGILVPCQSPWNTPLLPVKKPGTNDYRPVQDLREVNKRVEDIHPTVPNPYNLLSGLPPSHQWYTVLDLKDAFFCLRLHPTSQPLFAFEWRDPEMGISGQLTWTRLPQGFKNSPTLFNEALHRDLAGFRIQHPDLILLQYVDDLLLAATSELDCQQGTRALLQTLGDLGYRASAKKAQICQKQVKYLGYLLKEGQRWLTEARKETVMGQPIPKTPRQLREFLGKAGFCRLFIPGFAEMAAPLYPLTKPGTLFNWGPDQQKAFQEIKQALLTAPALGLPDLTKPFELFVDEKQGYAKGVLTQKLGPWRRPVAYLSKKLDPVAAGWPPCLRMVAAIAVLTKDAGKLTMGQPLVILAPHAVEALVKQPPDRWLSNARMTHYQALLLDTDRVQFGPVVALNPATLLPLPEEGLQHDCLDILAEAHGTRSDLMDQPLPDADHTWYTDGSSFLQEGQRKAGAAVTTETEVIWARALPAGTSAQRAELIALTQALKMAEGKKLNVYTDSRYAFATAHIHGEIYRRRGWLTSEGKEIKNKDEILALLKALFLPKRLSIIHCPGHQKGNSAEARGNRMADQAAREVATRETPETSTLLAGKRTADGSEFEKRTADGSEFESPKKKAKVE

SEQ ID NO: 2412 - protein, 2096 aa, synthetic construct
MPAAKRVKLDGGDKKYSIGLDIGTNSVGWAVITDEYKVPSKKFKVLGNTDRHSIKKNLIGALLFDSGETAEATRLKRTARRRYTRRKNRICYLQEIFSNEMAKVDDSFFHRLEESFLVEEDKKHERHPIFGNIVDEVAYHEKYPTIYHLRKKLVDSTDKADLRLIYLALAHMIKFRGHFLIEGDLNPDNSDVDKLFIQLVQTYNQLFEENPINASGVDAKAILSARLSKSRRLENLIAQLPGEKKNGLFGNLIALSLGLTPNFKSNFDLAEDAKLQLSKDTYDDDLDNLLAQIGDQYADLFLAAKNLSDAILLSDILRVNTEITKAPLSASMIKRYDEHHQDLTLLKALVRQQLPEKYKEIFFDQSKNGYAGYIDGGASQEEFYKFIKPILEKMDGTEELLVKLNREDLLRKQRTFDNGSIPHQIHLGELHAILRRQEDFYPFLKDNREKIEKILTFRIPYYVGPLARGNSRFAWMTRKSEETITPWNFEEVVDKGASAQSFIERMTNFDKNLPNEKVLPKHSLLYEYFTVYNELTKVKYVTEGMRKPAFLSGEQKKAIVDLLFKTNRKVTVKQLKEDYFKKIECFDSVEISGVEDRFNASLGTYHDLLKIIKDKDFLDNEENEDILEDIVLTLTLFEDREMIEERLKTYAHLFDDKVMKQLKRRRYTGWGRLSRKLINGIRDKQSGKTILDFLKSDGFANRNFMQLIHDDSLTFKEDIQKAQVSGQGDSLHEHIANLAGSPAIKKGILQTVKVVDELVKVMGRHKPENIVIEMARENQTTQKGQKNSRERMKRIEEGIKELGSQILKEHPVENTQLQNEKLYLYYLQNGRDMYVDQELDINRLSDYDVDHIVPQSFLKDDSIDNKVLTRSDKARGKSDNVPSEEVVKKMKNYWRQLLNAKLITQRKFDNLTKAERGGLSELDKAGFIKRQLVETRQITKHVAQILDSRMNTKYDENDKLIREVKVITLKSKLVSDFRKDFQFYKVREINNYHHAHDAYLNAVVGTALIKKYPKLESEFVYGDYKVYDVRKMIAKSEQEIGKATAKYFFYSNIMNFFKTEITLANGEIRKRPLIETNGETGEIVWDKGRDFATVRKVLSMPQVNIVKKTEVQTGGFSKESILPKRNSDKLIARKKDWDPKKYGGFDSPTVAYSVLVVAKVEKGKSKKLKSVKELLGITIMERSSFEKNPIDFLEAKGYKEVKKDLIIKLPKYSLFELENGRKRMLASAGELQKGNELALPSKYVNFLYLASHYEKLKGSPEDNEQKQLFVEQHKHYLDEIIEQISEFSKRVILADANLDKVLSAYNKHRDKPIREQAENIIHLFTLTNLGAPAAFKYFDTTIDRKRYTSTKEVLDATLIHQSITGLYETRIDLSQLGGDGGEAAAKGGGGSSGGTLNIEDEYRLHETSKEPDVSLGSTWLSDFPQAWAETGGMGLAVRQAPLIIPLKATSTPVSIKQYPMSQEARLGIKPHIQRLLDQGILVPCQSPWNTPLLPVKKPGTNDYRPVQDLREVNKRVEDIHPTVPNPYNLLSGLPPSHQWYTVLDLKDAFFCLRLHPTSQPLFAFEWRDPEMGISGQLTWTRLPQGFKNSPTLFNEALHRDLAGFRIQHPDLILLQYVDDLLLAATSELDCQQGTRALLQTLGDLGYRASAKKAQICQKQVKYLGYLLKEGQRWLTEARKETVMGQPIPKTPRQLREFLGKAGFCRLFIPGFAEMAAPLYPLTKPGTLFNWGPDQQKAFQEIKQALLTAPALGLPDLTKPFELFVDEKQGYAKGVLTQKLGPWRRPVAYLSKKLDPVAAGWPPCLRMVAAIAVLTKDAGKLTMGQPLVILAPHAVEALVKQPPDRWLSNARMTHYQALLLDTDRVQFGPVVALNPATLLPLPEEGLQHDCLDILAEAHGTRSDLMDQPLPDADHTWYTDGSSFLQEGQRKAGAAVTTETEVIWARALPAGTSAQRAELIALTQALKMAEGKKLNVYTDSRYAFATAHIHGEIYRRRGWLTSEGKEIKNKDEILALLKALFLPKRLSIIHCPGHQKGNSAEARGNRMADQAAREVATRETPETSTLLAGKRTADGSEFEKRTADGSEFESPKKKAKVE

SEQ ID NO: 2413 - protein, 2096 aa, synthetic construct
MPAAKRVKLDGGDKKYSIGLDIGTNSVGWAVITDEYKVPSKKFKVLGNTDRHSIKKNLIGALLFDSGETAEATRLKRTARRRYTRRKNRICYLQEIFSNEMAKVDDSFFHRLEESFLVEEDKKHERHPIFGNIVDEVAYHEKYPTIYHLRKKLVDSTDKADLRLIYLALAHMIKFRGHFLIEGDLNPDNSDVDKLFIQLVQTYNQLFEENPINASGVDAKAILSARLSKSRRLENLIAQLPGEKKNGLFGNLIALSLGLTPNFKSNFDLAEDAKLQLSKDTYDDDLDNLLAQIGDQYADLFLAAKNLSDAILLSDILRVNTEITKAPLSASMIKRYDEHHQDLTLLKALVRQQLPEKYKEIFFDQSKNGYAGYIDGGASQEEFYKFIKPILEKMDGTEELLVKLNREDLLRKQRTFDNGSIPHQIHLGELHAILRRQEDFYPFLKDNREKIEKILTFRIPYYVGPLARGNSRFAWMTRKSEETITPWNFEEVVDKGASAQSFIERMTNFDKNLPNEKVLPKHSLLYEYFTVYNELTKVKYVTEGMRKPAFLSGEQKKAIVDLLFKTNRKVTVKQLKEDYFKKIECFDSVEISGVEDRFNASLGTYHDLLKIIKDKDFLDNEENEDILEDIVLTLTLFEDREMIEERLKTYAHLFDDKVMKQLKRRRYTGWGRLSRKLINGIRDKQSGKTILDFLKSDGFANRNFMQLIHDDSLTFKEDIQKAQVSGQGDSLHEHIANLAGSPAIKKGILQTVKVVDELVKVMGRHKPENIVIEMARENQTTQKGQKNSRERMKRIEEGIKELGSQILKEHPVENTQLQNEKLYLYYLQNGRDMYVDQELDINRLSDYDVDHIVPQSFLKDDSIDNKVLTRSDKARGKSDNVPSEEVVKKMKNYWRQLLNAKLITQRKFDNLTKAERGGLSELDKAGFIKRQLVETRQITKHVAQILDSRMNTKYDENDKLIREVKVITLKSKLVSDFRKDFQFYKVREINNYHHAHDAYLNAVVGTALIKKYPKLESEFVYGDYKVYDVRKMIAKSEQEIGKATAKYFFYSNIMNFFKTEITLANGEIRKRPLIETNGETGEIVWDKGRDFATVRKVLSMPQVNIVKKTEVQTGGFSKESILPKRNSDKLIARKKDWDPKKYGGFDSPTVAYSVLVVAKVEKGKSKKLKSVKELLGITIMERSSFEKNPIDFLEAKGYKEVKKDLIIKLPKYSLFELENGRKRMLASAGELQKGNELALPSKYVNFLYLASHYEKLKGSPEDNEQKQLFVEQHKHYLDEIIEQISEFSKRVILADANLDKVLSAYNKHRDKPIREQAENIIHLFTLTNLGAPAAFKYFDTTIDRKRYTSTKEVLDATLIHQSITGLYETRIDLSQLGGDGGGGSGGGEAAAKGGTLNIEDEYRLHETSKEPDVSLGSTWLSDFPQAWAETGGMGLAVRQAPLIIPLKATSTPVSIKQYPMSQEARLGIKPHIQRLLDQGILVPCQSPWNTPLLPVKKPGTNDYRPVQDLREVNKRVEDIHPTVPNPYNLLSGLPPSHQWYTVLDLKDAFFCLRLHPTSQPLFAFEWRDPEMGISGQLTWTRLPQGFKNSPTLFNEALHRDLAGFRIQHPDLILLQYVDDLLLAATSELDCQQGTRALLQTLGDLGYRASAKKAQICQKQVKYLGYLLKEGQRWLTEARKETVMGQPIPKTPRQLREFLGKAGFCRLFIPGFAEMAAPLYPLTKPGTLFNWGPDQQKAFQEIKQALLTAPALGLPDLTKPFELFVDEKQGYAKGVLTQKLGPWRRPVAYLSKKLDPVAAGWPPCLRMVAAIAVLTKDAGKLTMGQPLVILAPHAVEALVKQPPDRWLSNARMTHYQALLLDTDRVQFGPVVALNPATLLPLPEEGLQHDCLDILAEAHGTRSDLMDQPLPDADHTWYTDGSSFLQEGQRKAGAAVTTETEVIWARALPAGTSAQRAELIALTQALKMAEGKKLNVYTDSRYAFATAHIHGEIYRRRGWLTSEGKEIKNKDEILALLKALFLPKRLSIIHCPGHQKGNSAEARGNRMADQAAREVATRETPETSTLLAGKRTADGSEFEKRTADGSEFESPKKKAKVE

SEQ ID NO: 2414 - protein, 2094 aa, synthetic construct
MPAAKRVKLDGGDKKYSIGLDIGTNSVGWAVITDEYKVPSKKFKVLGNTDRHSIKKNLIGALLFDSGETAEATRLKRTARRRYTRRKNRICYLQEIFSNEMAKVDDSFFHRLEESFLVEEDKKHERHPIFGNIVDEVAYHEKYPTIYHLRKKLVDSTDKADLRLIYLALAHMIKFRGHFLIEGDLNPDNSDVDKLFIQLVQTYNQLFEENPINASGVDAKAILSARLSKSRRLENLIAQLPGEKKNGLFGNLIALSLGLTPNFKSNFDLAEDAKLQLSKDTYDDDLDNLLAQIGDQYADLFLAAKNLSDAILLSDILRVNTEITKAPLSASMIKRYDEHHQDLTLLKALVRQQLPEKYKEIFFDQSKNGYAGYIDGGASQEEFYKFIKPILEKMDGTEELLVKLNREDLLRKQRTFDNGSIPHQIHLGELHAILRRQEDFYPFLKDNREKIEKILTFRIPYYVGPLARGNSRFAWMTRKSEETITPWNFEEVVDKGASAQSFIERMTNFDKNLPNEKVLPKHSLLYEYFTVYNELTKVKYVTEGMRKPAFLSGEQKKAIVDLLFKTNRKVTVKQLKEDYFKKIECFDSVEISGVEDRFNASLGTYHDLLKIIKDKDFLDNEENEDILEDIVLTLTLFEDREMIEERLKTYAHLFDDKVMKQLKRRRYTGWGRLSRKLINGIRDKQSGKTILDFLKSDGFANRNFMQLIHDDSLTFKEDIQKAQVSGQGDSLHEHIANLAGSPAIKKGILQTVKVVDELVKVMGRHKPENIVIEMARENQTTQKGQKNSRERMKRIEEGIKELGSQILKEHPVENTQLQNEKLYLYYLQNGRDMYVDQELDINRLSDYDVDHIVPQSFLKDDSIDNKVLTRSDKARGKSDNVPSEEVVKKMKNYWRQLLNAKLITQRKFDNLTKAERGGLSELDKAGFIKRQLVETRQITKHVAQILDSRMNTKYDENDKLIREVKVITLKSKLVSDFRKDFQFYKVREINNYHHAHDAYLNAVVGTALIKKYPKLESEFVYGDYKVYDVRKMIAKSEQEIGKATAKYFFYSNIMNFFKTEITLANGEIRKRPLIETNGETGEIVWDKGRDFATVRKVLSMPQVNIVKKTEVQTGGFSKESILPKRNSDKLIARKKDWDPKKYGGFDSPTVAYSVLVVAKVEKGKSKKLKSVKELLGITIMERSSFEKNPIDFLEAKGYKEVKKDLIIKLPKYSLFELENGRKRMLASAGELQKGNELALPSKYVNFLYLASHYEKLKGSPEDNEQKQLFVEQHKHYLDEIIEQISEFSKRVILADANLDKVLSAYNKHRDKPIREQAENIIHLFTLTNLGAPAAFKYFDTTIDRKRYTSTKEVLDATLIHQSITGLYETRIDLSQLGGDGGPAPGSSGGGGGTLNIEDEYRLHETSKEPDVSLGSTWLSDFPQAWAETGGMGLAVRQAPLIIPLKATSTPVSIKQYPMSQEARLGIKPHIQRLLDQGILVPCQSPWNTPLLPVKKPGTNDYRPVQDLREVNKRVEDIHPTVPNPYNLLSGLPPSHQWYTVLDLKDAFFCLRLHPTSQPLFAFEWRDPEMGISGQLTWTRLPQGFKNSPTLFNEALHRDLAGFRIQHPDLILLQYVDDLLLAATSELDCQQGTRALLQTLGDLGYRASAKKAQICQKQVKYLGYLLKEGQRWLTEARKETVMGQPIPKTPRQLREFLGKAGFCRLFIPGFAEMAAPLYPLTKPGTLFNWGPDQQKAFQEIKQALLTAPALGLPDLTKPFELFVDEKQGYAKGVLTQKLGPWRRPVAYLSKKLDPVAAGWPPCLRMVAAIAVLTKDAGKLTMGQPLVILAPHAVEALVKQPPDRWLSNARMTHYQALLLDTDRVQFGPVVALNPATLLPLPEEGLQHDCLDILAEAHGTRSDLMDQPLPDADHTWYTDGSSFLQEGQRKAGAAVTTETEVIWARALPAGTSAQRAELIALTQALKMAEGKKLNVYTDSRYAFATAHIHGEIYRRRGWLTSEGKEIKNKDEILALLKALFLPKRLSIIHCPGHQKGNSAEARGNRMADQAAREVATRETPETSTLLAGKRTADGSEFEKRTADGSEFESPKKKAKVE

SEQ ID NO: 2415 - protein, 2089 aa, synthetic construct
MPAAKRVKLDGGDKKYSIGLDIGTNSVGWAVITDEYKVPSKKFKVLGNTDRHSIKKNLIGALLFDSGETAEATRLKRTARRRYTRRKNRICYLQEIFSNEMAKVDDSFFHRLEESFLVEEDKKHERHPIFGNIVDEVAYHEKYPTIYHLRKKLVDSTDKADLRLIYLALAHMIKFRGHFLIEGDLNPDNSDVDKLFIQLVQTYNQLFEENPINASGVDAKAILSARLSKSRRLENLIAQLPGEKKNGLFGNLIALSLGLTPNFKSNFDLAEDAKLQLSKDTYDDDLDNLLAQIGDQYADLFLAAKNLSDAILLSDILRVNTEITKAPLSASMIKRYDEHHQDLTLLKALVRQQLPEKYKEIFFDQSKNGYAGYIDGGASQEEFYKFIKPILEKMDGTEELLVKLNREDLLRKQRTFDNGSIPHQIHLGELHAILRRQEDFYPFLKDNREKIEKILTFRIPYYVGPLARGNSRFAWMTRKSEETITPWNFEEVVDKGASAQSFIERMTNFDKNLPNEKVLPKHSLLYEYFTVYNELTKVKYVTEGMRKPAFLSGEQKKAIVDLLFKTNRKVTVKQLKEDYFKKIECFDSVEISGVEDRFNASLGTYHDLLKIIKDKDFLDNEENEDILEDIVLTLTLFEDREMIEERLKTYAHLFDDKVMKQLKRRRYTGWGRLSRKLINGIRDKQSGKTILDFLKSDGFANRNFMQLIHDDSLTFKEDIQKAQVSGQGDSLHEHIANLAGSPAIKKGILQTVKVVDELVKVMGRHKPENIVIEMARENQTTQKGQKNSRERMKRIEEGIKELGSQILKEHPVENTQLQNEKLYLYYLQNGRDMYVDQELDINRLSDYDVDHIVPQSFLKDDSIDNKVLTRSDKARGKSDNVPSEEVVKKMKNYWRQLLNAKLITQRKFDNLTKAERGGLSELDKAGFIKRQLVETRQITKHVAQILDSRMNTKYDENDKLIREVKVITLKSKLVSDFRKDFQFYKVREINNYHHAHDAYLNAVVGTALIKKYPKLESEFVYGDYKVYDVRKMIAKSEQEIGKATAKYFFYSNIMNFFKTEITLANGEIRKRPLIETNGETGEIVWDKGRDFATVRKVLSMPQVNIVKKTEVQTGGFSKESILPKRNSDKLIARKKDWDPKKYGGFDSPTVAYSVLVVAKVEKGKSKKLKSVKELLGITIMERSSFEKNPIDFLEAKGYKEVKKDLIIKLPKYSLFELENGRKRMLASAGELQKGNELALPSKYVNFLYLASHYEKLKGSPEDNEQKQLFVEQHKHYLDEIIEQISEFSKRVILADANLDKVLSAYNKHRDKPIREQAENIIHLFTLTNLGAPAAFKYFDTTIDRKRYTSTKEVLDATLIHQSITGLYETRIDLSQLGGDGGGGGGGGTLNIEDEYRLHETSKEPDVSLGSTWLSDFPQAWAETGGMGLAVRQAPLIIPLKATSTPVSIKQYPMSQEARLGIKPHIQRLLDQGILVPCQSPWNTPLLPVKKPGTNDYRPVQDLREVNKRVEDIHPTVPNPYNLLSGLPPSHQWYTVLDLKDAFFCLRLHPTSQPLFAFEWRDPEMGISGQLTWTRLPQGFKNSPTLFNEALHRDLAGFRIQHPDLILLQYVDDLLLAATSELDCQQGTRALLQTLGDLGYRASAKKAQICQKQVKYLGYLLKEGQRWLTEARKETVMGQPIPKTPRQLREFLGKAGFCRLFIPGFAEMAAPLYPLTKPGTLFNWGPDQQKAFQEIKQALLTAPALGLPDLTKPFELFVDEKQGYAKGVLTQKLGPWRRPVAYLSKKLDPVAAGWPPCLRMVAAIAVLTKDAGKLTMGQPLVILAPHAVEALVKQPPDRWLSNARMTHYQALLLDTDRVQFGPVVALNPATLLPLPEEGLQHDCLDILAEAHGTRSDLMDQPLPDADHTWYTDGSSFLQEGQRKAGAAVTTETEVIWARALPAGTSAQRAELIALTQALKMAEGKKLNVYTDSRYAFATAHIHGEIYRRRGWLTSEGKEIKNKDEILALLKALFLPKRLSIIHCPGHQKGNSAEARGNRMADQAAREVATRETPETSTLLAGKRTADGSEFEKRTADGSEFESPKKKAKVE

SEQ ID NO: 2416 - protein, 2094 aa, synthetic construct
MPAAKRVKLDGGDKKYSIGLDIGTNSVGWAVITDEYKVPSKKFKVLGNTDRHSIKKNLIGALLFDSGETAEATRLKRTARRRYTRRKNRICYLQEIFSNEMAKVDDSFFHRLEESFLVEEDKKHERHPIFGNIVDEVAYHEKYPTIYHLRKKLVDSTDKADLRLIYLALAHMIKFRGHFLIEGDLNPDNSDVDKLFIQLVQTYNQLFEENPINASGVDAKAILSARLSKSRRLENLIAQLPGEKKNGLFGNLIALSLGLTPNFKSNFDLAEDAKLQLSKDTYDDDLDNLLAQIGDQYADLFLAAKNLSDAILLSDILRVNTEITKAPLSASMIKRYDEHHQDLTLLKALVRQQLPEKYKEIFFDQSKNGYAGYIDGGASQEEFYKFIKPILEKMDGTEELLVKLNREDLLRKQRTFDNGSIPHQIHLGELHAILRRQEDFYPFLKDNREKIEKILTFRIPYYVGPLARGNSRFAWMTRKSEETITPWNFEEVVDKGASAQSFIERMTNFDKNLPNEKVLPKHSLLYEYFTVYNELTKVKYVTEGMRKPAFLSGEQKKAIVDLLFKTNRKVTVKQLKEDYFKKIECFDSVEISGVEDRFNASLGTYHDLLKIIKDKDFLDNEENEDILEDIVLTLTLFEDREMIEERLKTYAHLFDDKVMKQLKRRRYTGWGRLSRKLINGIRDKQSGKTILDFLKSDGFANRNFMQLIHDDSLTFKEDIQKAQVSGQGDSLHEHIANLAGSPAIKKGILQTVKVVDELVKVMGRHKPENIVIEMARENQTTQKGQKNSRERMKRIEEGIKELGSQILKEHPVENTQLQNEKLYLYYLQNGRDMYVDQELDINRLSDYDVDHIVPQSFLKDDSIDNKVLTRSDKARGKSDNVPSEEVVKKMKNYWRQLLNAKLITQRKFDNLTKAERGGLSELDKAGFIKRQLVETRQITKHVAQILDSRMNTKYDENDKLIREVKVITLKSKLVSDFRKDFQFYKVREINNYHHAHDAYLNAVVGTALIKKYPKLESEFVYGDYKVYDVRKMIAKSEQEIGKATAKYFFYSNIMNFFKTEITLANGEIRKRPLIETNGETGEIVWDKGRDFATVRKVLSMPQVNIVKKTEVQTGGFSKESILPKRNSDKLIARKKDWDPKKYGGFDSPTVAYSVLVVAKVEKGKSKKLKSVKELLGITIMERSSFEKNPIDFLEAKGYKEVKKDLIIKLPKYSLFELENGRKRMLASAGELQKGNELALPSKYVNFLYLASHYEKLKGSPEDNEQKQLFVEQHKHYLDEIIEQISEFSKRVILADANLDKVLSAYNKHRDKPIREQAENIIHLFTLTNLGAPAAFKYFDTTIDRKRYTSTKEVLDATLIHQSITGLYETRIDLSQLGGDGGGGGGGSPAPGGTLNIEDEYRLHETSKEPDVSLGSTWLSDFPQAWAETGGMGLAVRQAPLIIPLKATSTPVSIKQYPMSQEARLGIKPHIQRLLDQGILVPCQSPWNTPLLPVKKPGTNDYRPVQDLREVNKRVEDIHPTVPNPYNLLSGLPPSHQWYTVLDLKDAFFCLRLHPTSQPLFAFEWRDPEMGISGQLTWTRLPQGFKNSPTLFNEALHRDLAGFRIQHPDLILLQYVDDLLLAATSELDCQQGTRALLQTLGDLGYRASAKKAQICQKQVKYLGYLLKEGQRWLTEARKETVMGQPIPKTPRQLREFLGKAGFCRLFIPGFAEMAAPLYPLTKPGTLFNWGPDQQKAFQEIKQALLTAPALGLPDLTKPFELFVDEKQGYAKGVLTQKLGPWRRPVAYLSKKLDPVAAGWPPCLRMVAAIAVLTKDAGKLTMGQPLVILAPHAVEALVKQPPDRWLSNARMTHYQALLLDTDRVQFGPVVALNPATLLPLPEEGLQHDCLDILAEAHGTRSDLMDQPLPDADHTWYTDGSSFLQEGQRKAGAAVTTETEVIWARALPAGTSAQRAELIALTQALKMAEGKKLNVYTDSRYAFATAHIHGEIYRRRGWLTSEGKEIKNKDEILALLKALFLPKRLSIIHCPGHQKGNSAEARGNRMADQAAREVATRETPETSTLLAGKRTADGSEFEKRTADGSEFESPKKKAKVE

SEQ ID NO: 2417 - protein, 2100 aa, synthetic construct
MPAAKRVKLDGGDKKYSIGLDIGTNSVGWAVITDEYKVPSKKFKVLGNTDRHSIKKNLIGALLFDSGETAEATRLKRTARRRYTRRKNRICYLQEIFSNEMAKVDDSFFHRLEESFLVEEDKKHERHPIFGNIVDEVAYHEKYPTIYHLRKKLVDSTDKADLRLIYLALAHMIKFRGHFLIEGDLNPDNSDVDKLFIQLVQTYNQLFEENPINASGVDAKAILSARLSKSRRLENLIAQLPGEKKNGLFGNLIALSLGLTPNFKSNFDLAEDAKLQLSKDTYDDDLDNLLAQIGDQYADLFLAAKNLSDAILLSDILRVNTEITKAPLSASMIKRYDEHHQDLTLLKALVRQQLPEKYKEIFFDQSKNGYAGYIDGGASQEEFYKFIKPILEKMDGTEELLVKLNREDLLRKQRTFDNGSIPHQIHLGELHAILRRQEDFYPFLKDNREKIEKILTFRIPYYVGPLARGNSRFAWMTRKSEETITPWNFEEVVDKGASAQSFIERMTNFDKNLPNEKVLPKHSLLYEYFTVYNELTKVKYVTEGMRKPAFLSGEQKKAIVDLLFKTNRKVTVKQLKEDYFKKIECFDSVEISGVEDRFNASLGTYHDLLKIIKDKDFLDNEENEDILEDIVLTLTLFEDREMIEERLKTYAHLFDDKVMKQLKRRRYTGWGRLSRKLINGIRDKQSGKTILDFLKSDGFANRNFMQLIHDDSLTFKEDIQKAQVSGQGDSLHEHIANLAGSPAIKKGILQTVKVVDELVKVMGRHKPENIVIEMARENQTTQKGQKNSRERMKRIEEGIKELGSQILKEHPVENTQLQNEKLYLYYLQNGRDMYVDQELDINRLSDYDVDHIVPQSFLKDDSIDNKVLTRSDKARGKSDNVPSEEVVKKMKNYWRQLLNAKLITQRKFDNLTKAERGGLSELDKAGFIKRQLVETRQITKHVAQILDSRMNTKYDENDKLIREVKVITLKSKLVSDFRKDFQFYKVREINNYHHAHDAYLNAVVGTALIKKYPKLESEFVYGDYKVYDVRKMIAKSEQEIGKATAKYFFYSNIMNFFKTEITLANGEIRKRPLIETNGETGEIVWDKGRDFATVRKVLSMPQVNIVKKTEVQTGGFSKESILPKRNSDKLIARKKDWDPKKYGGFDSPTVAYSVLVVAKVEKGKSKKLKSVKELLGITIMERSSFEKNPIDFLEAKGYKEVKKDLIIKLPKYSLFELENGRKRMLASAGELQKGNELALPSKYVNFLYLASHYEKLKGSPEDNEQKQLFVEQHKHYLDEIIEQISEFSKRVILADANLDKVLSAYNKHRDKPIREQAENIIHLFTLTNLGAPAAFKYFDTTIDRKRYTSTKEVLDATLIHQSITGLYETRIDLSQLGGDGGGGSGGSGGSGGSGGSGGTLNIEDEYRLHETSKGPDVPLGSTWLSDFPQAWAETGGMGLAFRQAPLIISLKATSTPVSIKQYPMSQEARLGIKPHIQRLLDQGILVPCQSPWNTPLLPVKKPGTNDYRPVQDLREVNKRVEDIHPTVPNPYNLLSGLPPSHQWYTVLDLKDAFFCLRLHPTSQSLFAFEWKDPEMGISGQLTWTRLPQGFKNSPTLFDEALHRDLADFRIQHPDLILLQYVDDLLLAATSELDCQQGTRALLQTLGDLGYRASAKKAQICQKQVKYLGYLLKEGQRWLTEARKETVMGQPTPKTPRQLREFLGTAGLCRLWIPGFAEMAAPLYPLTKTGTLFKWGPDQQKAYQEIKQALLTAPALGLPDLTKPFELFVDEKQGYAKGVLTQKLGPWRRPVAYLSKKLDPVAAGWPPCLRMVAAIAVLTKDVGKLTMGQPLVILAPHAVEALVKQPPDRWLSNARMTHYQALLLDTDRVQFGPIVALNPATLLPLPEEGLQHDCLDILAEAHGTRPDLTDQPLPDADHTWYTDGSSFLQEGQRRAGAAVTTETEVIWAKALPAGTSAQRAELIALTQALKMAAGKKLNVYTDSRYAFATAHIHGEIYRRRGLLTSEGKEIKNKDEILALLKALFLPKRLSIIHCPGHQKGNHAEARGNRMADQAAREVATRETPETSTLLAGKRTADGSEFEKRTADGSEFESPKKKAKVE

SEQ ID NO: 2418 - protein, 2096 aa, synthetic construct
MPAAKRVKLDGGDKKYSIGLDIGTNSVGWAVITDEYKVPSKKFKVLGNTDRHSIKKNLIGALLFDSGETAEATRLKRTARRRYTRRKNRICYLQEIFSNEMAKVDDSFFHRLEESFLVEEDKKHERHPIFGNIVDEVAYHEKYPTIYHLRKKLVDSTDKADLRLIYLALAHMIKFRGHFLIEGDLNPDNSDVDKLFIQLVQTYNQLFEENPINASGVDAKAILSARLSKSRRLENLIAQLPGEKKNGLFGNLIALSLGLTPNFKSNFDLAEDAKLQLSKDTYDDDLDNLLAQIGDQYADLFLAAKNLSDAILLSDILRVNTEITKAPLSASMIKRYDEHHQDLTLLKALVRQQLPEKYKEIFFDQSKNGYAGYIDGGASQEEFYKFIKPILEKMDGTEELLVKLNREDLLRKQRTFDNGSIPHQIHLGELHAILRRQEDFYPFLKDNREKIEKILTFRIPYYVGPLARGNSRFAWMTRKSEETITPWNFEEVVDKGASAQSFIERMTNFDKNLPNEKVLPKHSLLYEYFTVYNELTKVKYVTEGMRKPAFLSGEQKKAIVDLLFKTNRKVTVKQLKEDYFKKIECFDSVEISGVEDRFNASLGTYHDLLKIIKDKDFLDNEENEDILEDIVLTLTLFEDREMIEERLKTYAHLFDDKVMKQLKRRRYTGWGRLSRKLINGIRDKQSGKTILDFLKSDGFANRNFMQLIHDDSLTFKEDIQKAQVSGQGDSLHEHIANLAGSPAIKKGILQTVKVVDELVKVMGRHKPENIVIEMARENQTTQKGQKNSRERMKRIEEGIKELGSQILKEHPVENTQLQNEKLYLYYLQNGRDMYVDQELDINRLSDYDVDHIVPQSFLKDDSIDNKVLTRSDKARGKSDNVPSEEVVKKMKNYWRQLLNAKLITQRKFDNLTKAERGGLSELDKAGFIKRQLVETRQITKHVAQILDSRMNTKYDENDKLIREVKVITLKSKLVSDFRKDFQFYKVREINNYHHAHDAYLNAVVGTALIKKYPKLESEFVYGDYKVYDVRKMIAKSEQEIGKATAKYFFYSNIMNFFKTEITLANGEIRKRPLIETNGETGEIVWDKGRDFATVRKVLSMPQVNIVKKTEVQTGGFSKESILPKRNSDKLIARKKDWDPKKYGGFDSPTVAYSVLVVAKVEKGKSKKLKSVKELLGITIMERSSFEKNPIDFLEAKGYKEVKKDLIIKLPKYSLFELENGRKRMLASAGELQKGNELALPSKYVNFLYLASHYEKLKGSPEDNEQKQLFVEQHKHYLDEIIEQISEFSKRVILADANLDKVLSAYNKHRDKPIREQAENIIHLFTLTNLGAPAAFKYFDTTIDRKRYTSTKEVLDATLIHQSITGLYETRIDLSQLGGDGGEAAAKGGGPAPGGTLNIEDEYRLHETSKGPDVPLGSTWLSDFPQAWAETGGMGLAFRQAPLIISLKATSTPVSIKQYPMSQEARLGIKPHIQRLLDQGILVPCQSPWNTPLLPVKKPGTNDYRPVQDLREVNKRVEDIHPTVPNPYNLLSGLPPSHQWYTVLDLKDAFFCLRLHPTSQSLFAFEWKDPEMGISGQLTWTRLPQGFKNSPTLFDEALHRDLADFRIQHPDLILLQYVDDLLLAATSELDCQQGTRALLQTLGDLGYRASAKKAQICQKQVKYLGYLLKEGQRWLTEARKETVMGQPTPKTPRQLREFLGTAGLCRLWIPGFAEMAAPLYPLTKTGTLFKWGPDQQKAYQEIKQALLTAPALGLPDLTKPFELFVDEKQGYAKGVLTQKLGPWRRPVAYLSKKLDPVAAGWPPCLRMVAAIAVLTKDVGKLTMGQPLVILAPHAVEALVKQPPDRWLSNARMTHYQALLLDTDRVQFGPIVALNPATLLPLPEEGLQHDCLDILAEAHGTRPDLTDQPLPDADHTWYTDGSSFLQEGQRRAGAAVTTETEVIWAKALPAGTSAQRAELIALTQALKMAAGKKLNVYTDSRYAFATAHIHGEIYRRRGLLTSEGKEIKNKDEILALLKALFLPKRLSIIHCPGHQKGNHAEARGNRMADQAAREVATRETPETSTLLAGKRTADGSEFEKRTADGSEFESPKKKAKVE

SEQ ID NO: 2419 - protein, 2094 aa, synthetic construct
MPAAKRVKLDGGDKKYSIGLDIGTNSVGWAVITDEYKVPSKKFKVLGNTDRHSIKKNLIGALLFDSGETAEATRLKRTARRRYTRRKNRICYLQEIFSNEMAKVDDSFFHRLEESFLVEEDKKHERHPIFGNIVDEVAYHEKYPTIYHLRKKLVDSTDKADLRLIYLALAHMIKFRGHFLIEGDLNPDNSDVDKLFIQLVQTYNQLFEENPINASGVDAKAILSARLSKSRRLENLIAQLPGEKKNGLFGNLIALSLGLTPNFKSNFDLAEDAKLQLSKDTYDDDLDNLLAQIGDQYADLFLAAKNLSDAILLSDILRVNTEITKAPLSASMIKRYDEHHQDLTLLKALVRQQLPEKYKEIFFDQSKNGYAGYIDGGASQEEFYKFIKPILEKMDGTEELLVKLNREDLLRKQRTFDNGSIPHQIHLGELHAILRRQEDFYPFLKDNREKIEKILTFRIPYYVGPLARGNSRFAWMTRKSEETITPWNFEEVVDKGASAQSFIERMTNFDKNLPNEKVLPKHSLLYEYFTVYNELTKVKYVTEGMRKPAFLSGEQKKAIVDLLFKTNRKVTVKQLKEDYFKKIECFDSVEISGVEDRFNASLGTYHDLLKIIKDKDFLDNEENEDILEDIVLTLTLFEDREMIEERLKTYAHLFDDKVMKQLKRRRYTGWGRLSRKLINGIRDKQSGKTILDFLKSDGFANRNFMQLIHDDSLTFKEDIQKAQVSGQGDSLHEHIANLAGSPAIKKGILQTVKVVDELVKVMGRHKPENIVIEMARENQTTQKGQKNSRERMKRIEEGIKELGSQILKEHPVENTQLQNEKLYLYYLQNGRDMYVDQELDINRLSDYDVDHIVPQSFLKDDSIDNKVLTRSDKARGKSDNVPSEEVVKKMKNYWRQLLNAKLITQRKFDNLTKAERGGLSELDKAGFIKRQLVETRQITKHVAQILDSRMNTKYDENDKLIREVKVITLKSKLVSDFRKDFQFYKVREINNYHHAHDAYLNAVVGTALIKKYPKLESEFVYGDYKVYDVRKMIAKSEQEIGKATAKYFFYSNIMNFFKTEITLANGEIRKRPLIETNGETGEIVWDKGRDFATVRKVLSMPQVNIVKKTEVQTGGFSKESILPKRNSDKLIARKKDWDPKKYGGFDSPTVAYSVLVVAKVEKGKSKKLKSVKELLGITIMERSSFEKNPIDFLEAKGYKEVKKDLIIKLPKYSLFELENGRKRMLASAGELQKGNELALPSKYVNFLYLASHYEKLKGSPEDNEQKQLFVEQHKHYLDEIIEQISEFSKRVILADANLDKVLSAYNKHRDKPIREQAENIIHLFTLTNLGAPAAFKYFDTTIDRKRYTSTKEVLDATLIHQSITGLYETRIDLSQLGGDGGGSSGGSGGGGGTLNIEDEYRLHETSKGPDVPLGSTWLSDFPQAWAETGGMGLAFRQAPLIISLKATSTPVSIKQYPMSQEARLGIKPHIQRLLDQGILVPCQSPWNTPLLPVKKPGTNDYRPVQDLREVNKRVEDIHPTVPNPYNLLSGLPPSHQWYTVLDLKDAFFCLRLHPTSQSLFAFEWKDPEMGISGQLTWTRLPQGFKNSPTLFDEALHRDLADFRIQHPDLILLQYVDDLLLAATSELDCQQGTRALLQTLGDLGYRASAKKAQICQKQVKYLGYLLKEGQRWLTEARKETVMGQPTPKTPRQLREFLGTAGLCRLWIPGFAEMAAPLYPLTKTGTLFKWGPDQQKAYQEIKQALLTAPALGLPDLTKPFELFVDEKQGYAKGVLTQKLGPWRRPVAYLSKKLDPVAAGWPPCLRMVAAIAVLTKDVGKLTMGQPLVILAPHAVEALVKQPPDRWLSNARMTHYQALLLDTDRVQFGPIVALNPATLLPLPEEGLQHDCLDILAEAHGTRPDLTDQPLPDADHTWYTDGSSFLQEGQRRAGAAVTTETEVIWAKALPAGTSAQRAELIALTQALKMAAGKKLNVYTDSRYAFATAHIHGEIYRRRGLLTSEGKEIKNKDEILALLKALFLPKRLSIIHCPGHQKGNHAEARGNRMADQAAREVATRETPETSTLLAGKRTADGSEFEKRTADGSEFESPKKKAKVE

SEQ ID NO: 2420 - protein, 2096 aa, synthetic construct
MPAAKRVKLDGGDKKYSIGLDIGTNSVGWAVITDEYKVPSKKFKVLGNTDRHSIKKNLIGALLFDSGETAEATRLKRTARRRYTRRKNRICYLQEIFSNEMAKVDDSFFHRLEESFLVEEDKKHERHPIFGNIVDEVAYHEKYPTIYHLRKKLVDSTDKADLRLIYLALAHMIKFRGHFLIEGDLNPDNSDVDKLFIQLVQTYNQLFEENPINASGVDAKAILSARLSKSRRLENLIAQLPGEKKNGLFGNLIALSLGLTPNFKSNFDLAEDAKLQLSKDTYDDDLDNLLAQIGDQYADLFLAAKNLSDAILLSDILRVNTEITKAPLSASMIKRYDEHHQDLTLLKALVRQQLPEKYKEIFFDQSKNGYAGYIDGGASQEEFYKFIKPILEKMDGTEELLVKLNREDLLRKQRTFDNGSIPHQIHLGELHAILRRQEDFYPFLKDNREKIEKILTFRIPYYVGPLARGNSRFAWMTRKSEETITPWNFEEVVDKGASAQSFIERMTNFDKNLPNEKVLPKHSLLYEYFTVYNELTKVKYVTEGMRKPAFLSGEQKKAIVDLLFKTNRKVTVKQLKEDYFKKIECFDSVEISGVEDRFNASLGTYHDLLKIIKDKDFLDNEENEDILEDIVLTLTLFEDREMIEERLKTYAHLFDDKVMKQLKRRRYTGWGRLSRKLINGIRDKQSGKTILDFLKSDGFANRNFMQLIHDDSLTFKEDIQKAQVSGQGDSLHEHIANLAGSPAIKKGILQTVKVVDELVKVMGRHKPENIVIEMARENQTTQKGQKNSRERMKRIEEGIKELGSQILKEHPVENTQLQNEKLYLYYLQNGRDMYVDQELDINRLSDYDVDHIVPQSFLKDDSIDNKVLTRSDKARGKSDNVPSEEVVKKMKNYWRQLLNAKLITQRKFDNLTKAERGGLSELDKAGFIKRQLVETRQITKHVAQILDSRMNTKYDENDKLIREVKVITLKSKLVSDFRKDFQFYKVREINNYHHAHDAYLNAVVGTALIKKYPKLESEFVYGDYKVYDVRKMIAKSEQEIGKATAKYFFYSNIMNFFKTEITLANGEIRKRPLIETNGETGEIVWDKGRDFATVRKVLSMPQVNIVKKTEVQTGGFSKESILPKRNSDKLIARKKDWDPKKYGGFDSPTVAYSVLVVAKVEKGKSKKLKSVKELLGITIMERSSFEKNPIDFLEAKGYKEVKKDLIIKLPKYSLFELENGRKRMLASAGELQKGNELALPSKYVNFLYLASHYEKLKGSPEDNEQKQLFVEQHKHYLDEIIEQISEFSKRVILADANLDKVLSAYNKHRDKPIREQAENIIHLFTLTNLGAPAAFKYFDTTIDRKRYTSTKEVLDATLIHQSITGLYETRIDLSQLGGDGGPAPEAAAKGGGGGTLNIEDEYRLHETSKGPDVPLGSTWLSDFPQAWAETGGMGLAFRQAPLIISLKATSTPVSIKQYPMSQEARLGIKPHIQRLLDQGILVPCQSPWNTPLLPVKKPGTNDYRPVQDLREVNKRVEDIHPTVPNPYNLLSGLPPSHQWYTVLDLKDAFFCLRLHPTSQSLFAFEWKDPEMGISGQLTWTRLPQGFKNSPTLFDEALHRDLADFRIQHPDLILLQYVDDLLLAATSELDCQQGTRALLQTLGDLGYRASAKKAQICQKQVKYLGYLLKEGQRWLTEARKETVMGQPTPKTPRQLREFLGTAGLCRLWIPGFAEMAAPLYPLTKTGTLFKWGPDQQKAYQEIKQALLTAPALGLPDLTKPFELFVDEKQGYAKGVLTQKLGPWRRPVAYLSKKLDPVAAGWPPCLRMVAAIAVLTKDVGKLTMGQPLVILAPHAVEALVKQPPDRWLSNARMTHYQALLLDTDRVQFGPIVALNPATLLPLPEEGLQHDCLDILAEAHGTRPDLTDQPLPDADHTWYTDGSSFLQEGQRRAGAAVTTETEVIWAKALPAGTSAQRAELIALTQALKMAAGKKLNVYTDSRYAFATAHIHGEIYRRRGLLTSEGKEIKNKDEILALLKALFLPKRLSIIHCPGHQKGNHAEARGNRMADQAAREVATRETPETSTLLAGKRTADGSEFEKRTADGSEFESPKKKAKVE

SEQ ID NO: 2421 - protein, 2008 aa, synthetic construct
MPAAKRVKLDGGDKKYSIGLDIGTNSVGWAVITDEYKVPSKKFKVLGNTDRHSIKKNLIGALLFDSGETAEATRLKRTARRRYTRRKNRICYLQEIFSNEMAKVDDSFFHRLEESFLVEEDKKHERHPIFGNIVDEVAYHEKYPTIYHLRKKLVDSTDKADLRLIYLALAHMIKFRGHFLIEGDLNPDNSDVDKLFIQLVQTYNQLFEENPINASGVDAKAILSARLSKSRRLENLIAQLPGEKKNGLFGNLIALSLGLTPNFKSNFDLAEDAKLQLSKDTYDDDLDNLLAQIGDQYADLFLAAKNLSDAILLSDILRVNTEITKAPLSASMIKRYDEHHQDLTLLKALVRQQLPEKYKEIFFDQSKNGYAGYIDGGASQEEFYKFIKPILEKMDGTEELLVKLNREDLLRKQRTFDNGSIPHQIHLGELHAILRRQEDFYPFLKDNREKIEKILTFRIPYYVGPLARGNSRFAWMTRKSEETITPWNFEEVVDKGASAQSFIERMTNFDKNLPNEKVLPKHSLLYEYFTVYNELTKVKYVTEGMRKPAFLSGEQKKAIVDLLFKTNRKVTVKQLKEDYFKKIECFDSVEISGVEDRFNASLGTYHDLLKIIKDKDFLDNEENEDILEDIVLTLTLFEDREMIEERLKTYAHLFDDKVMKQLKRRRYTGWGRLSRKLINGIRDKQSGKTILDFLKSDGFANRNFMQLIHDDSLTFKEDIQKAQVSGQGDSLHEHIANLAGSPAIKKGILQTVKVVDELVKVMGRHKPENIVIEMARENQTTQKGQKNSRERMKRIEEGIKELGSQILKEHPVENTQLQNEKLYLYYLQNGRDMYVDQELDINRLSDYDVDHIVPQSFLKDDSIDNKVLTRSDKARGKSDNVPSEEVVKKMKNYWRQLLNAKLITQRKFDNLTKAERGGLSELDKAGFIKRQLVETRQITKHVAQILDSRMNTKYDENDKLIREVKVITLKSKLVSDFRKDFQFYKVREINNYHHAHDAYLNAVVGTALIKKYPKLESEFVYGDYKVYDVRKMIAKSEQEIGKATAKYFFYSNIMNFFKTEITLANGEIRKRPLIETNGETGEIVWDKGRDFATVRKVLSMPQVNIVKKTEVQTGGFSKESILPKRNSDKLIARKKDWDPKKYGGFDSPTVAYSVLVVAKVEKGKSKKLKSVKELLGITIMERSSFEKNPIDFLEAKGYKEVKKDLIIKLPKYSLFELENGRKRMLASAGELQKGNELALPSKYVNFLYLASHYEKLKGSPEDNEQKQLFVEQHKHYLDEIIEQISEFSKRVILADANLDKVLSAYNKHRDKPIREQAENIIHLFTLTNLGAPAAFKYFDTTIDRKRYTSTKEVLDATLIHQSITGLYETRIDLSQLGGDGGGGSGGSGGSGGSGGSGGSGGGVLDAPPSHIGLEHLPPPPEVPQFPLNLERLQALQDLVHRSLEAGYISPWDGPGNNPVFPVRKPNGAWRFVHDLRVTNALTKPIPALSPGPPDLTAIPTHLPHIICLDLKDAFFQIPVEDRFRSYFAFTLPTPGGLQPHRRFAWRVLPQGFINSPALFERALQEPLRQVSAAFSQSLLVSYMDDILYVSPTEEQRLQCYQTMAAHLRDLGFQVASEKTRQTPSPVPFLGQMVHERMVTYQSLPTLQISSPISLHQLQTVLGDLQWVSRGTPTTRRPLQLLYSSLKGIDDPRAIIHLSPEQQQGIAELRQALSHNARSRYNEQEPLLAYVHLTRAGSTLVLFQKGAQFPLAYFQTPLTDNQASPWGLLLLLGCQYLQAQALSSYAKTILKYYHNLPKTSLDNWIQSSEDPRVQELLQLWPQISSQGIQPPGPWKTLVTRAEVFLTPQFSPEPIPAALCLFSDGAARRGAYCLWKDHLLDFQAVPAPESAQKGELAGLLAGLAAAPPEPLNIWVDSKYLYSLLRTLVLGAWLQPDPVPSYALLYKSLLRHPAIFVGHVRSHSSASHPIASLNNYVDQLAGKRTADGSEFEKRTADGSEFESPKKKAKVE

SEQ ID NO: 2422 - protein, 2093 aa, synthetic construct
MPAAKRVKLDGGDKKYSIGLDIGTNSVGWAVITDEYKVPSKKFKVLGNTDRHSIKKNLIGALLFDSGETAEATRLKRTARRRYTRRKNRICYLQEIFSNEMAKVDDSFFHRLEESFLVEEDKKHERHPIFGNIVDEVAYHEKYPTIYHLRKKLVDSTDKADLRLIYLALAHMIKFRGHFLIEGDLNPDNSDVDKLFIQLVQTYNQLFEENPINASGVDAKAILSARLSKSRRLENLIAQLPGEKKNGLFGNLIALSLGLTPNFKSNFDLAEDAKLQLSKDTYDDDLDNLLAQIGDQYADLFLAAKNLSDAILLSDILRVNTEITKAPLSASMIKRYDEHHQDLTLLKALVRQQLPEKYKEIFFDQSKNGYAGYIDGGASQEEFYKFIKPILEKMDGTEELLVKLNREDLLRKQRTFDNGSIPHQIHLGELHAILRRQEDFYPFLKDNREKIEKILTFRIPYYVGPLARGNSRFAWMTRKSEETITPWNFEEVVDKGASAQSFIERMTNFDKNLPNEKVLPKHSLLYEYFTVYNELTKVKYVTEGMRKPAFLSGEQKKAIVDLLFKTNRKVTVKQLKEDYFKKIECFDSVEISGVEDRFNASLGTYHDLLKIIKDKDFLDNEENEDILEDIVLTLTLFEDREMIEERLKTYAHLFDDKVMKQLKRRRYTGWGRLSRKLINGIRDKQSGKTILDFLKSDGFANRNFMQLIHDDSLTFKEDIQKAQVSGQGDSLHEHIANLAGSPAIKKGILQTVKVVDELVKVMGRHKPENIVIEMARENQTTQKGQKNSRERMKRIEEGIKELGSQILKEHPVENTQLQNEKLYLYYLQNGRDMYVDQELDINRLSDYDVDHIVPQSFLKDDSIDNKVLTRSDKARGKSDNVPSEEVVKKMKNYWRQLLNAKLITQRKFDNLTKAERGGLSELDKAGFIKRQLVETRQITKHVAQILDSRMNTKYDENDKLIREVKVITLKSKLVSDFRKDFQFYKVREINNYHHAHDAYLNAVVGTALIKKYPKLESEFVYGDYKVYDVRKMIAKSEQEIGKATAKYFFYSNIMNFFKTEITLANGEIRKRPLIETNGETGEIVWDKGRDFATVRKVLSMPQVNIVKKTEVQTGGFSKESILPKRNSDKLIARKKDWDPKKYGGFDSPTVAYSVLVVAKVEKGKSKKLKSVKELLGITIMERSSFEKNPIDFLEAKGYKEVKKDLIIKLPKYSLFELENGRKRMLASAGELQKGNELALPSKYVNFLYLASHYEKLKGSPEDNEQKQLFVEQHKHYLDEIIEQISEFSKRVILADANLDKVLSAYNKHRDKPIREQAENIIHLFTLTNLGAPAAFKYFDTTIDRKRYTSTKEVLDATLIHQSITGLYETRIDLSQLGGDGGEAAAKPAPGGTLNIEDEYRLHETSKGPDVPLGSTWLSDFPQAWAETGGMGLAFRQAPLIISLKATSTPVSIKQYPMSQEARLGIKPHIQRLLDQGILVPCQSPWNTPLLPVKKPGTNDYRPVQDLREVNKRVEDIHPTVPNPYNLLSGLPPSHQWYTVLDLKDAFFCLRLHPTSQSLFAFEWKDPEMGISGQLTWTRLPQGFKNSPTLFNEALHRDLADFRIQHPDLILLQYVDDLLLAATSELDCQQGTRALLQTLGDLGYRASAKKAQICQKQVKYLGYLLKEGQRWLTEARKETVMGQPTPKTPRQLREFLGTAGLCRLWIPGFAEMAAPLYPLTKPGTLFKWGPDQQKAYQEIKQALLTAPALGLPDLTKPFELFVDEKQGYAKGVLTQKLGPWRRPVAYLSKKLDPVAAGWPPCLRMVAAIAVLTKDVGKLTMGQPLVILAPHAVEALVKQPPDRWLSNARMTHYQALLLDTDRVQFGPIVALNPATLLPLPEEGLQHDCLDILAEAHGTRPDLTDQPLPDADHTWYTDGSSFLQEGQRRAGAAVTTETEVIWAKALPAGTSAQRAELIALTQALKMAAGKKLNVYTDSRYAFATAHIHGEIYRRRGWLTSEGKEIKNKDEILALLKALFLPKRLSIIHCPGHQKGNHAEARGNRMADQAAREVATRETPETSTLLAGKRTADGSEFEKRTADGSEFESPKKKAKVE

SEQ ID NO: 2423 - protein, 2096 aa, synthetic construct
MPAAKRVKLDGGDKKYSIGLDIGTNSVGWAVITDEYKVPSKKFKVLGNTDRHSIKKNLIGALLFDSGETAEATRLKRTARRRYTRRKNRICYLQEIFSNEMAKVDDSFFHRLEESFLVEEDKKHERHPIFGNIVDEVAYHEKYPTIYHLRKKLVDSTDKADLRLIYLALAHMIKFRGHFLIEGDLNPDNSDVDKLFIQLVQTYNQLFEENPINASGVDAKAILSARLSKSRRLENLIAQLPGEKKNGLFGNLIALSLGLTPNFKSNFDLAEDAKLQLSKDTYDDDLDNLLAQIGDQYADLFLAAKNLSDAILLSDILRVNTEITKAPLSASMIKRYDEHHQDLTLLKALVRQQLPEKYKEIFFDQSKNGYAGYIDGGASQEEFYKFIKPILEKMDGTEELLVKLNREDLLRKQRTFDNGSIPHQIHLGELHAILRRQEDFYPFLKDNREKIEKILTFRIPYYVGPLARGNSRFAWMTRKSEETITPWNFEEVVDKGASAQSFIERMTNFDKNLPNEKVLPKHSLLYEYFTVYNELTKVKYVTEGMRKPAFLSGEQKKAIVDLLFKTNRKVTVKQLKEDYFKKIECFDSVEISGVEDRFNASLGTYHDLLKIIKDKDFLDNEENEDILEDIVLTLTLFEDREMIEERLKTYAHLFDDKVMKQLKRRRYTGWGRLSRKLINGIRDKQSGKTILDFLKSDGFANRNFMQLIHDDSLTFKEDIQKAQVSGQGDSLHEHIANLAGSPAIKKGILQTVKVVDELVKVMGRHKPENIVIEMARENQTTQKGQKNSRERMKRIEEGIKELGSQILKEHPVENTQLQNEKLYLYYLQNGRDMYVDQELDINRLSDYDVDHIVPQSFLKDDSIDNKVLTRSDKARGKSDNVPSEEVVKKMKNYWRQLLNAKLITQRKFDNLTKAERGGLSELDKAGFIKRQLVETRQITKHVAQILDSRMNTKYDENDKLIREVKVITLKSKLVSDFRKDFQFYKVREINNYHHAHDAYLNAVVGTALIKKYPKLESEFVYGDYKVYDVRKMIAKSEQEIGKATAKYFFYSNIMNFFKTEITLANGEIRKRPLIETNGETGEIVWDKGRDFATVRKVLSMPQVNIVKKTEVQTGGFSKESILPKRNSDKLIARKKDWDPKKYGGFDSPTVAYSVLVVAKVEKGKSKKLKSVKELLGITIMERSSFEKNPIDFLEAKGYKEVKKDLIIKLPKYSLFELENGRKRMLASAGELQKGNELALPSKYVNFLYLASHYEKLKGSPEDNEQKQLFVEQHKHYLDEIIEQISEFSKRVILADANLDKVLSAYNKHRDKPIREQAENIIHLFTLTNLGAPAAFKYFDTTIDRKRYTSTKEVLDATLIHQSITGLYETRIDLSQLGGDGGPAPAPAPAPAPGGTLNIEDEYRLHETSKGPDVPLGSTWLSDFPQAWAETGGMGLAFRQAPLIISLKATSTPVSIKQYPMSQEARLGIKPHIQRLLDQGILVPCQSPWNTPLLPVKKPGTNDYRPVQDLREVNKRVEDIHPTVPNPYNLLSGLPPSHQWYTVLDLKDAFFCLRLHPTSQSLFAFEWKDPEMGISGQLTWTRLPQGFKNSPTLFNEALHRDLADFRIQHPDLILLQYVDDLLLAATSELDCQQGTRALLQTLGDLGYRASAKKAQICQKQVKYLGYLLKEGQRWLTEARKETVMGQPTPKTPRQLREFLGTAGLCRLWIPGFAEMAAPLYPLTKPGTLFKWGPDQQKAYQEIKQALLTAPALGLPDLTKPFELFVDEKQGYAKGVLTQKLGPWRRPVAYLSKKLDPVAAGWPPCLRMVAAIAVLTKDVGKLTMGQPLVILAPHAVEALVKQPPDRWLSNARMTHYQALLLDTDRVQFGPIVALNPATLLPLPEEGLQHDCLDILAEAHGTRPDLTDQPLPDADHTWYTDGSSFLQEGQRRAGAAVTTETEVIWAKALPAGTSAQRAELIALTQALKMAAGKKLNVYTDSRYAFATAHIHGEIYRRRGWLTSEGKEIKNKDEILALLKALFLPKRLSIIHCPGHQKGNHAEARGNRMADQAAREVATRETPETSTLLAGKRTADGSEFEKRTADGSEFESPKKKAKVE

SEQ ID NO: 2424 - protein, 2089 aa, synthetic construct
MPAAKRVKLDGGDKKYSIGLDIGTNSVGWAVITDEYKVPSKKFKVLGNTDRHSIKKNLIGALLFDSGETAEATRLKRTARRRYTRRKNRICYLQEIFSNEMAKVDDSFFHRLEESFLVEEDKKHERHPIFGNIVDEVAYHEKYPTIYHLRKKLVDSTDKADLRLIYLALAHMIKFRGHFLIEGDLNPDNSDVDKLFIQLVQTYNQLFEENPINASGVDAKAILSARLSKSRRLENLIAQLPGEKKNGLFGNLIALSLGLTPNFKSNFDLAEDAKLQLSKDTYDDDLDNLLAQIGDQYADLFLAAKNLSDAILLSDILRVNTEITKAPLSASMIKRYDEHHQDLTLLKALVRQQLPEKYKEIFFDQSKNGYAGYIDGGASQEEFYKFIKPILEKMDGTEELLVKLNREDLLRKQRTFDNGSIPHQIHLGELHAILRRQEDFYPFLKDNREKIEKILTFRIPYYVGPLARGNSRFAWMTRKSEETITPWNFEEVVDKGASAQSFIERMTNFDKNLPNEKVLPKHSLLYEYFTVYNELTKVKYVTEGMRKPAFLSGEQKKAIVDLLFKTNRKVTVKQLKEDYFKKIECFDSVEISGVEDRFNASLGTYHDLLKIIKDKDFLDNEENEDILEDIVLTLTLFEDREMIEERLKTYAHLFDDKVMKQLKRRRYTGWGRLSRKLINGIRDKQSGKTILDFLKSDGFANRNFMQLIHDDSLTFKEDIQKAQVSGQGDSLHEHIANLAGSPAIKKGILQTVKVVDELVKVMGRHKPENIVIEMARENQTTQKGQKNSRERMKRIEEGIKELGSQILKEHPVENTQLQNEKLYLYYLQNGRDMYVDQELDINRLSDYDVDHIVPQSFLKDDSIDNKVLTRSDKARGKSDNVPSEEVVKKMKNYWRQLLNAKLITQRKFDNLTKAERGGLSELDKAGFIKRQLVETRQITKHVAQILDSRMNTKYDENDKLIREVKVITLKSKLVSDFRKDFQFYKVREINNYHHAHDAYLNAVVGTALIKKYPKLESEFVYGDYKVYDVRKMIAKSEQEIGKATAKYFFYSNIMNFFKTEITLANGEIRKRPLIETNGETGEIVWDKGRDFATVRKVLSMPQVNIVKKTEVQTGGFSKESILPKRNSDKLIARKKDWDPKKYGGFDSPTVAYSVLVVAKVEKGKSKKLKSVKELLGITIMERSSFEKNPIDFLEAKGYKEVKKDLIIKLPKYSLFELENGRKRMLASAGELQKGNELALPSKYVNFLYLASHYEKLKGSPEDNEQKQLFVEQHKHYLDEIIEQISEFSKRVILADANLDKVLSAYNKHRDKPIREQAENIIHLFTLTNLGAPAAFKYFDTTIDRKRYTSTKEVLDATLIHQSITGLYETRIDLSQLGGDGGGGGGGGTLNIEDEYRLHETSKGPDVPLGSTWLSDFPQAWAETGGMGLAFRQAPLIISLKATSTPVSIKQYPMSQEARLGIKPHIQRLLDQGILVPCQSPWNTPLLPVKKPGTNDYRPVQDLREVNKRVEDIHPTVPNPYNLLSGLPPSHQWYTVLDLKDAFFCLRLHPTSQSLFAFEWKDPEMGISGQLTWTRLPQGFKNSPTLFNEALHRDLADFRIQHPDLILLQYVDDLLLAATSELDCQQGTRALLQTLGDLGYRASAKKAQICQKQVKYLGYLLKEGQRWLTEARKETVMGQPTPKTPRQLREFLGTAGLCRLWIPGFAEMAAPLYPLTKPGTLFKWGPDQQKAYQEIKQALLTAPALGLPDLTKPFELFVDEKQGYAKGVLTQKLGPWRRPVAYLSKKLDPVAAGWPPCLRMVAAIAVLTKDVGKLTMGQPLVILAPHAVEALVKQPPDRWLSNARMTHYQALLLDTDRVQFGPIVALNPATLLPLPEEGLQHDCLDILAEAHGTRPDLTDQPLPDADHTWYTDGSSFLQEGQRRAGAAVTTETEVIWAKALPAGTSAQRAELIALTQALKMAAGKKLNVYTDSRYAFATAHIHGEIYRRRGWLTSEGKEIKNKDEILALLKALFLPKRLSIIHCPGHQKGNHAEARGNRMADQAAREVATRETPETSTLLAGKRTADGSEFEKRTADGSEFESPKKKAKVE

SEQ ID NO: 2425 - protein, 2094 aa, synthetic construct
MPAAKRVKLDGGDKKYSIGLDIGTNSVGWAVITDEYKVPSKKFKVLGNTDRHSIKKNLIGALLFDSGETAEATRLKRTARRRYTRRKNRICYLQEIFSNEMAKVDDSFFHRLEESFLVEEDKKHERHPIFGNIVDEVAYHEKYPTIYHLRKKLVDSTDKADLRLIYLALAHMIKFRGHFLIEGDLNPDNSDVDKLFIQLVQTYNQLFEENPINASGVDAKAILSARLSKSRRLENLIAQLPGEKKNGLFGNLIALSLGLTPNFKSNFDLAEDAKLQLSKDTYDDDLDNLLAQIGDQYADLFLAAKNLSDAILLSDILRVNTEITKAPLSASMIKRYDEHHQDLTLLKALVRQQLPEKYKEIFFDQSKNGYAGYIDGGASQEEFYKFIKPILEKMDGTEELLVKLNREDLLRKQRTFDNGSIPHQIHLGELHAILRRQEDFYPFLKDNREKIEKILTFRIPYYVGPLARGNSRFAWMTRKSEETITPWNFEEVVDKGASAQSFIERMTNFDKNLPNEKVLPKHSLLYEYFTVYNELTKVKYVTEGMRKPAFLSGEQKKAIVDLLFKTNRKVTVKQLKEDYFKKIECFDSVEISGVEDRFNASLGTYHDLLKIIKDKDFLDNEENEDILEDIVLTLTLFEDREMIEERLKTYAHLFDDKVMKQLKRRRYTGWGRLSRKLINGIRDKQSGKTILDFLKSDGFANRNFMQLIHDDSLTFKEDIQKAQVSGQGDSLHEHIANLAGSPAIKKGILQTVKVVDELVKVMGRHKPENIVIEMARENQTTQKGQKNSRERMKRIEEGIKELGSQILKEHPVENTQLQNEKLYLYYLQNGRDMYVDQELDINRLSDYDVDHIVPQSFLKDDSIDNKVLTRSDKARGKSDNVPSEEVVKKMKNYWRQLLNAKLITQRKFDNLTKAERGGLSELDKAGFIKRQLVETRQITKHVAQILDSRMNTKYDENDKLIREVKVITLKSKLVSDFRKDFQFYKVREINNYHHAHDAYLNAVVGTALIKKYPKLESEFVYGDYKVYDVRKMIAKSEQEIGKATAKYFFYSNIMNFFKTEITLANGEIRKRPLIETNGETGEIVWDKGRDFATVRKVLSMPQVNIVKKTEVQTGGFSKESILPKRNSDKLIARKKDWDPKKYGGFDSPTVAYSVLVVAKVEKGKSKKLKSVKELLGITIMERSSFEKNPIDFLEAKGYKEVKKDLIIKLPKYSLFELENGRKRMLASAGELQKGNELALPSKYVNFLYLASHYEKLKGSPEDNEQKQLFVEQHKHYLDEIIEQISEFSKRVILADANLDKVLSAYNKHRDKPIREQAENIIHLFTLTNLGAPAAFKYFDTTIDRKRYTSTKEVLDATLIHQSITGLYETRIDLSQLGGDGGGSSGGGGGSGGTLNIEDEYRLHETSKGPDVPLGSTWLSDFPQAWAETGGMGLAFRQAPLIISLKATSTPVSIKQYPMSQEARLGIKPHIQRLLDQGILVPCQSPWNTPLLPVKKPGTNDYRPVQDLREVNKRVEDIHPTVPNPYNLLSGLPPSHQWYTVLDLKDAFFCLRLHPTSQSLFAFEWKDPEMGISGQLTWTRLPQGFKNSPTLFNEALHRDLADFRIQHPDLILLQYVDDLLLAATSELDCQQGTRALLQTLGDLGYRASAKKAQICQKQVKYLGYLLKEGQRWLTEARKETVMGQPTPKTPRQLREFLGTAGLCRLWIPGFAEMAAPLYPLTKPGTLFKWGPDQQKAYQEIKQALLTAPALGLPDLTKPFELFVDEKQGYAKGVLTQKLGPWRRPVAYLSKKLDPVAAGWPPCLRMVAAIAVLTKDVGKLTMGQPLVILAPHAVEALVKQPPDRWLSNARMTHYQALLLDTDRVQFGPIVALNPATLLPLPEEGLQHDCLDILAEAHGTRPDLTDQPLPDADHTWYTDGSSFLQEGQRRAGAAVTTETEVIWAKALPAGTSAQRAELIALTQALKMAAGKKLNVYTDSRYAFATAHIHGEIYRRRGWLTSEGKEIKNKDEILALLKALFLPKRLSIIHCPGHQKGNHAEARGNRMADQAAREVATRETPETSTLLAGKRTADGSEFEKRTADGSEFESPKKKAKVE

SEQ ID NO: 2426 - protein, 2093 aa, synthetic construct
MPAAKRVKLDGGDKKYSIGLDIGTNSVGWAVITDEYKVPSKKFKVLGNTDRHSIKKNLIGALLFDSGETAEATRLKRTARRRYTRRKNRICYLQEIFSNEMAKVDDSFFHRLEESFLVEEDKKHERHPIFGNIVDEVAYHEKYPTIYHLRKKLVDSTDKADLRLIYLALAHMIKFRGHFLIEGDLNPDNSDVDKLFIQLVQTYNQLFEENPINASGVDAKAILSARLSKSRRLENLIAQLPGEKKNGLFGNLIALSLGLTPNFKSNFDLAEDAKLQLSKDTYDDDLDNLLAQIGDQYADLFLAAKNLSDAILLSDILRVNTEITKAPLSASMIKRYDEHHQDLTLLKALVRQQLPEKYKEIFFDQSKNGYAGYIDGGASQEEFYKFIKPILEKMDGTEELLVKLNREDLLRKQRTFDNGSIPHQIHLGELHAILRRQEDFYPFLKDNREKIEKILTFRIPYYVGPLARGNSRFAWMTRKSEETITPWNFEEVVDKGASAQSFIERMTNFDKNLPNEKVLPKHSLLYEYFTVYNELTKVKYVTEGMRKPAFLSGEQKKAIVDLLFKTNRKVTVKQLKEDYFKKIECFDSVEISGVEDRFNASLGTYHDLLKIIKDKDFLDNEENEDILEDIVLTLTLFEDREMIEERLKTYAHLFDDKVMKQLKRRRYTGWGRLSRKLINGIRDKQSGKTILDFLKSDGFANRNFMQLIHDDSLTFKEDIQKAQVSGQGDSLHEHIANLAGSPAIKKGILQTVKVVDELVKVMGRHKPENIVIEMARENQTTQKGQKNSRERMKRIEEGIKELGSQILKEHPVENTQLQNEKLYLYYLQNGRDMYVDQELDINRLSDYDVDHIVPQSFLKDDSIDNKVLTRSDKARGKSDNVPSEEVVKKMKNYWRQLLNAKLITQRKFDNLTKAERGGLSELDKAGFIKRQLVETRQITKHVAQILDSRMNTKYDENDKLIREVKVITLKSKLVSDFRKDFQFYKVREINNYHHAHDAYLNAVVGTALIKKYPKLESEFVYGDYKVYDVRKMIAKSEQEIGKATAKYFFYSNIMNFFKTEITLANGEIRKRPLIETNGETGEIVWDKGRDFATVRKVLSMPQVNIVKKTEVQTGGFSKESILPKRNSDKLIARKKDWDPKKYGGFDSPTVAYSVLVVAKVEKGKSKKLKSVKELLGITIMERSSFEKNPIDFLEAKGYKEVKKDLIIKLPKYSLFELENGRKRMLASAGELQKGNELALPSKYVNFLYLASHYEKLKGSPEDNEQKQLFVEQHKHYLDEIIEQISEFSKRVILADANLDKVLSAYNKHRDKPIREQAENIIHLFTLTNLGAPAAFKYFDTTIDRKRYTSTKEVLDATLIHQSITGLYETRIDLSQLGGDGGEAAAKGGSGGTLNIEDEYRLHETSKGPDVPLGSTWLSDFPQAWAETGGMGLAFRQAPLIISLKATSTPVSIKQYPMSQEARLGIKPHIQRLLDQGILVPCQSPWNTPLLPVKKPGTNDYRPVQDLREVNKRVEDIHPTVPNPYNLLSGLPPSHQWYTVLDLKDAFFCLRLHPTSQSLFAFEWKDPEMGISGQLTWTRLPQGFKNSPTLFNEALHRDLADFRIQHPDLILLQYVDDLLLAATSELDCQQGTRALLQTLGDLGYRASAKKAQICQKQVKYLGYLLKEGQRWLTEARKETVMGQPTPKTPRQLREFLGTAGLCRLWIPGFAEMAAPLYPLTKPGTLFKWGPDQQKAYQEIKQALLTAPALGLPDLTKPFELFVDEKQGYAKGVLTQKLGPWRRPVAYLSKKLDPVAAGWPPCLRMVAAIAVLTKDVGKLTMGQPLVILAPHAVEALVKQPPDRWLSNARMTHYQALLLDTDRVQFGPIVALNPATLLPLPEEGLQHDCLDILAEAHGTRPDLTDQPLPDADHTWYTDGSSFLQEGQRRAGAAVTTETEVIWAKALPAGTSAQRAELIALTQALKMAAGKKLNVYTDSRYAFATAHIHGEIYRRRGWLTSEGKEIKNKDEILALLKALFLPKRLSIIHCPGHQKGNHAEARGNRMADQAAREVATRETPETSTLLAGKRTADGSEFEKRTADGSEFESPKKKAKVE

SEQ ID NO: 2427 - protein, 2088 aa, synthetic construct
MPAAKRVKLDGGDKKYSIGLDIGTNSVGWAVITDEYKVPSKKFKVLGNTDRHSIKKNLIGALLFDSGETAEATRLKRTARRRYTRRKNRICYLQEIFSNEMAKVDDSFFHRLEESFLVEEDKKHERHPIFGNIVDEVAYHEKYPTIYHLRKKLVDSTDKADLRLIYLALAHMIKFRGHFLIEGDLNPDNSDVDKLFIQLVQTYNQLFEENPINASGVDAKAILSARLSKSRRLENLIAQLPGEKKNGLFGNLIALSLGLTPNFKSNFDLAEDAKLQLSKDTYDDDLDNLLAQIGDQYADLFLAAKNLSDAILLSDILRVNTEITKAPLSASMIKRYDEHHQDLTLLKALVRQQLPEKYKEIFFDQSKNGYAGYIDGGASQEEFYKFIKPILEKMDGTEELLVKLNREDLLRKQRTFDNGSIPHQIHLGELHAILRRQEDFYPFLKDNREKIEKILTFRIPYYVGPLARGNSRFAWMTRKSEETITPWNFEEVVDKGASAQSFIERMTNFDKNLPNEKVLPKHSLLYEYFTVYNELTKVKYVTEGMRKPAFLSGEQKKAIVDLLFKTNRKVTVKQLKEDYFKKIECFDSVEISGVEDRFNASLGTYHDLLKIIKDKDFLDNEENEDILEDIVLTLTLFEDREMIEERLKTYAHLFDDKVMKQLKRRRYTGWGRLSRKLINGIRDKQSGKTILDFLKSDGFANRNFMQLIHDDSLTFKEDIQKAQVSGQGDSLHEHIANLAGSPAIKKGILQTVKVVDELVKVMGRHKPENIVIEMARENQTTQKGQKNSRERMKRIEEGIKELGSQILKEHPVENTQLQNEKLYLYYLQNGRDMYVDQELDINRLSDYDVDHIVPQSFLKDDSIDNKVLTRSDKARGKSDNVPSEEVVKKMKNYWRQLLNAKLITQRKFDNLTKAERGGLSELDKAGFIKRQLVETRQITKHVAQILDSRMNTKYDENDKLIREVKVITLKSKLVSDFRKDFQFYKVREINNYHHAHDAYLNAVVGTALIKKYPKLESEFVYGDYKVYDVRKMIAKSEQEIGKATAKYFFYSNIMNFFKTEITLANGEIRKRPLIETNGETGEIVWDKGRDFATVRKVLSMPQVNIVKKTEVQTGGFSKESILPKRNSDKLIARKKDWDPKKYGGFDSPTVAYSVLVVAKVEKGKSKKLKSVKELLGITIMERSSFEKNPIDFLEAKGYKEVKKDLIIKLPKYSLFELENGRKRMLASAGELQKGNELALPSKYVNFLYLASHYEKLKGSPEDNEQKQLFVEQHKHYLDEIIEQISEFSKRVILADANLDKVLSAYNKHRDKPIREQAENIIHLFTLTNLGAPAAFKYFDTTIDRKRYTSTKEVLDATLIHQSITGLYETRIDLSQLGGDGGPAPGGTLNIEDEYRLHETSKGPDVPLGSTWLSDFPQAWAETGGMGLAFRQAPLIISLKATSTPVSIKQYPMSQEARLGIKPHIQRLLDQGILVPCQSPWNTPLLPVKKPGTNDYRPVQDLREVNKRVEDIHPTVPNPYNLLSGLPPSHQWYTVLDLKDAFFCLRLHPTSQSLFAFEWKDPEMGISGQLTWTRLPQGFKNSPTLFNEALHRDLADFRIQHPDLILLQYVDDLLLAATSELDCQQGTRALLQTLGDLGYRASAKKAQICQKQVKYLGYLLKEGQRWLTEARKETVMGQPTPKTPRQLREFLGTAGLCRLWIPGFAEMAAPLYPLTKPGTLFKWGPDQQKAYQEIKQALLTAPALGLPDLTKPFELFVDEKQGYAKGVLTQKLGPWRRPVAYLSKKLDPVAAGWPPCLRMVAAIAVLTKDVGKLTMGQPLVILAPHAVEALVKQPPDRWLSNARMTHYQALLLDTDRVQFGPIVALNPATLLPLPEEGLQHDCLDILAEAHGTRPDLTDQPLPDADHTWYTDGSSFLQEGQRRAGAAVTTETEVIWAKALPAGTSAQRAELIALTQALKMAAGKKLNVYTDSRYAFATAHIHGEIYRRRGWLTSEGKEIKNKDEILALLKALFLPKRLSIIHCPGHQKGNHAEARGNRMADQAAREVATRETPETSTLLAGKRTADGSEFEKRTADGSEFESPKKKAKVE

SEQ ID NO: 2428 - protein, 2096 aa, synthetic construct
MPAAKRVKLDGGDKKYSIGLDIGTNSVGWAVITDEYKVPSKKFKVLGNTDRHSIKKNLIGALLFDSGETAEATRLKRTARRRYTRRKNRICYLQEIFSNEMAKVDDSFFHRLEESFLVEEDKKHERHPIFGNIVDEVAYHEKYPTIYHLRKKLVDSTDKADLRLIYLALAHMIKFRGHFLIEGDLNPDNSDVDKLFIQLVQTYNQLFEENPINASGVDAKAILSARLSKSRRLENLIAQLPGEKKNGLFGNLIALSLGLTPNFKSNFDLAEDAKLQLSKDTYDDDLDNLLAQIGDQYADLFLAAKNLSDAILLSDILRVNTEITKAPLSASMIKRYDEHHQDLTLLKALVRQQLPEKYKEIFFDQSKNGYAGYIDGGASQEEFYKFIKPILEKMDGTEELLVKLNREDLLRKQRTFDNGSIPHQIHLGELHAILRRQEDFYPFLKDNREKIEKILTFRIPYYVGPLARGNSRFAWMTRKSEETITPWNFEEVVDKGASAQSFIERMTNFDKNLPNEKVLPKHSLLYEYFTVYNELTKVKYVTEGMRKPAFLSGEQKKAIVDLLFKTNRKVTVKQLKEDYFKKIECFDSVEISGVEDRFNASLGTYHDLLKIIKDKDFLDNEENEDILEDIVLTLTLFEDREMIEERLKTYAHLFDDKVMKQLKRRRYTGWGRLSRKLINGIRDKQSGKTILDFLKSDGFANRNFMQLIHDDSLTFKEDIQKAQVSGQGDSLHEHIANLAGSPAIKKGILQTVKVVDELVKVMGRHKPENIVIEMARENQTTQKGQKNSRERMKRIEEGIKELGSQILKEHPVENTQLQNEKLYLYYLQNGRDMYVDQELDINRLSDYDVDHIVPQSFLKDDSIDNKVLTRSDKARGKSDNVPSEEVVKKMKNYWRQLLNAKLITQRKFDNLTKAERGGLSELDKAGFIKRQLVETRQITKHVAQILDSRMNTKYDENDKLIREVKVITLKSKLVSDFRKDFQFYKVREINNYHHAHDAYLNAVVGTALIKKYPKLESEFVYGDYKVYDVRKMIAKSEQEIGKATAKYFFYSNIMNFFKTEITLANGEIRKRPLIETNGETGEIVWDKGRDFATVRKVLSMPQVNIVKKTEVQTGGFSKESILPKRNSDKLIARKKDWDPKKYGGFDSPTVAYSVLVVAKVEKGKSKKLKSVKELLGITIMERSSFEKNPIDFLEAKGYKEVKKDLIIKLPKYSLFELENGRKRMLASAGELQKGNELALPSKYVNFLYLASHYEKLKGSPEDNEQKQLFVEQHKHYLDEIIEQISEFSKRVILADANLDKVLSAYNKHRDKPIREQAENIIHLFTLTNLGAPAAFKYFDTTIDRKRYTSTKEVLDATLIHQSITGLYETRIDLSQLGGDGGPAPGSSEAAAKGGTLNIEDEYRLHETSKGPDVPLGSTWLSDFPQAWAETGGMGLAFRQAPLIISLKATSTPVSIKQYPMSQEARLGIKPHIQRLLDQGILVPCQSPWNTPLLPVKKPGTNDYRPVQDLREVNKRVEDIHPTVPNPYNLLSGLPPSHQWYTVLDLKDAFFCLRLHPTSQSLFAFEWKDPEMGISGQLTWTRLPQGFKNSPTLFNEALHRDLADFRIQHPDLILLQYVDDLLLAATSELDCQQGTRALLQTLGDLGYRASAKKAQICQKQVKYLGYLLKEGQRWLTEARKETVMGQPTPKTPRQLREFLGTAGLCRLWIPGFAEMAAPLYPLTKPGTLFKWGPDQQKAYQEIKQALLTAPALGLPDLTKPFELFVDEKQGYAKGVLTQKLGPWRRPVAYLSKKLDPVAAGWPPCLRMVAAIAVLTKDVGKLTMGQPLVILAPHAVEALVKQPPDRWLSNARMTHYQALLLDTDRVQFGPIVALNPATLLPLPEEGLQHDCLDILAEAHGTRPDLTDQPLPDADHTWYTDGSSFLQEGQRRAGAAVTTETEVIWAKALPAGTSAQRAELIALTQALKMAAGKKLNVYTDSRYAFATAHIHGEIYRRRGWLTSEGKEIKNKDEILALLKALFLPKRLSIIHCPGHQKGNHAEARGNRMADQAAREVATRETPETSTLLAGKRTADGSEFEKRTADGSEFESPKKKAKVE

SEQ ID NO: 2429 - protein, 2115 aa, synthetic construct
MPAAKRVKLDGGDKKYSIGLDIGTNSVGWAVITDEYKVPSKKFKVLGNTDRHSIKKNLIGALLFDSGETAEATRLKRTARRRYTRRKNRICYLQEIFSNEMAKVDDSFFHRLEESFLVEEDKKHERHPIFGNIVDEVAYHEKYPTIYHLRKKLVDSTDKADLRLIYLALAHMIKFRGHFLIEGDLNPDNSDVDKLFIQLVQTYNQLFEENPINASGVDAKAILSARLSKSRRLENLIAQLPGEKKNGLFGNLIALSLGLTPNFKSNFDLAEDAKLQLSKDTYDDDLDNLLAQIGDQYADLFLAAKNLSDAILLSDILRVNTEITKAPLSASMIKRYDEHHQDLTLLKALVRQQLPEKYKEIFFDQSKNGYAGYIDGGASQEEFYKFIKPILEKMDGTEELLVKLNREDLLRKQRTFDNGSIPHQIHLGELHAILRRQEDFYPFLKDNREKIEKILTFRIPYYVGPLARGNSRFAWMTRKSEETITPWNFEEVVDKGASAQSFIERMTNFDKNLPNEKVLPKHSLLYEYFTVYNELTKVKYVTEGMRKPAFLSGEQKKAIVDLLFKTNRKVTVKQLKEDYFKKIECFDSVEISGVEDRFNASLGTYHDLLKIIKDKDFLDNEENEDILEDIVLTLTLFEDREMIEERLKTYAHLFDDKVMKQLKRRRYTGWGRLSRKLINGIRDKQSGKTILDFLKSDGFANRNFMQLIHDDSLTFKEDIQKAQVSGQGDSLHEHIANLAGSPAIKKGILQTVKVVDELVKVMGRHKPENIVIEMARENQTTQKGQKNSRERMKRIEEGIKELGSQILKEHPVENTQLQNEKLYLYYLQNGRDMYVDQELDINRLSDYDVDHIVPQSFLKDDSIDNKVLTRSDKARGKSDNVPSEEVVKKMKNYWRQLLNAKLITQRKFDNLTKAERGGLSELDKAGFIKRQLVETRQITKHVAQILDSRMNTKYDENDKLIREVKVITLKSKLVSDFRKDFQFYKVREINNYHHAHDAYLNAVVGTALIKKYPKLESEFVYGDYKVYDVRKMIAKSEQEIGKATAKYFFYSNIMNFFKTEITLANGEIRKRPLIETNGETGEIVWDKGRDFATVRKVLSMPQVNIVKKTEVQTGGFSKESILPKRNSDKLIARKKDWDPKKYGGFDSPTVAYSVLVVAKVEKGKSKKLKSVKELLGITIMERSSFEKNPIDFLEAKGYKEVKKDLIIKLPKYSLFELENGRKRMLASAGELQKGNELALPSKYVNFLYLASHYEKLKGSPEDNEQKQLFVEQHKHYLDEIIEQISEFSKRVILADANLDKVLSAYNKHRDKPIREQAENIIHLFTLTNLGAPAAFKYFDTTIDRKRYTSTKEVLDATLIHQSITGLYETRIDLSQLGGDGGGGGGSGGGGSGGGGSGGGGSGGGGSGGGGSGGTLNIEDEYRLHETSKGPDVPLGSTWLSDFPQAWAETGGMGLAFRQAPLIISLKATSTPVSIKQYPMSQEARLGIKPHIQRLLDQGILVPCQSPWNTPLLPVKKPGTNDYRPVQDLREVNKRVEDIHPTVPNPYNLLSGLPPSHQWYTVLDLKDAFFCLRLHPTSQSLFAFEWKDPEMGISGQLTWTRLPQGFKNSPTLFNEALHRDLADFRIQHPDLILLQYVDDLLLAATSELDCQQGTRALLQTLGDLGYRASAKKAQICQKQVKYLGYLLKEGQRWLTEARKETVMGQPTPKTPRQLREFLGTAGLCRLWIPGFAEMAAPLYPLTKPGTLFKWGPDQQKAYQEIKQALLTAPALGLPDLTKPFELFVDEKQGYAKGVLTQKLGPWRRPVAYLSKKLDPVAAGWPPCLRMVAAIAVLTKDVGKLTMGQPLVILAPHAVEALVKQPPDRWLSNARMTHYQALLLDTDRVQFGPIVALNPATLLPLPEEGLQHDCLDILAEAHGTRPDLTDQPLPDADHTWYTDGSSFLQEGQRRAGAAVTTETEVIWAKALPAGTSAQRAELIALTQALKMAAGKKLNVYTDSRYAFATAHIHGEIYRRRGWLTSEGKEIKNKDEILALLKALFLPKRLSIIHCPGHQKGNHAEARGNRMADQAAREVATRETPETSTLLAGKRTADGSEFEKRTADGSEFESPKKKAKVE

SEQ ID NO: 2430 - protein, 2098 aa, synthetic construct
MPAAKRVKLDGGDKKYSIGLDIGTNSVGWAVITDEYKVPSKKFKVLGNTDRHSIKKNLIGALLFDSGETAEATRLKRTARRRYTRRKNRICYLQEIFSNEMAKVDDSFFHRLEESFLVEEDKKHERHPIFGNIVDEVAYHEKYPTIYHLRKKLVDSTDKADLRLIYLALAHMIKFRGHFLIEGDLNPDNSDVDKLFIQLVQTYNQLFEENPINASGVDAKAILSARLSKSRRLENLIAQLPGEKKNGLFGNLIALSLGLTPNFKSNFDLAEDAKLQLSKDTYDDDLDNLLAQIGDQYADLFLAAKNLSDAILLSDILRVNTEITKAPLSASMIKRYDEHHQDLTLLKALVRQQLPEKYKEIFFDQSKNGYAGYIDGGASQEEFYKFIKPILEKMDGTEELLVKLNREDLLRKQRTFDNGSIPHQIHLGELHAILRRQEDFYPFLKDNREKIEKILTFRIPYYVGPLARGNSRFAWMTRKSEETITPWNFEEVVDKGASAQSFIERMTNFDKNLPNEKVLPKHSLLYEYFTVYNELTKVKYVTEGMRKPAFLSGEQKKAIVDLLFKTNRKVTVKQLKEDYFKKIECFDSVEISGVEDRFNASLGTYHDLLKIIKDKDFLDNEENEDILEDIVLTLTLFEDREMIEERLKTYAHLFDDKVMKQLKRRRYTGWGRLSRKLINGIRDKQSGKTILDFLKSDGFANRNFMQLIHDDSLTFKEDIQKAQVSGQGDSLHEHIANLAGSPAIKKGILQTVKVVDELVKVMGRHKPENIVIEMARENQTTQKGQKNSRERMKRIEEGIKELGSQILKEHPVENTQLQNEKLYLYYLQNGRDMYVDQELDINRLSDYDVDHIVPQSFLKDDSIDNKVLTRSDKARGKSDNVPSEEVVKKMKNYWRQLLNAKLITQRKFDNLTKAERGGLSELDKAGFIKRQLVETRQITKHVAQILDSRMNTKYDENDKLIREVKVITLKSKLVSDFRKDFQFYKVREINNYHHAHDAYLNAVVGTALIKKYPKLESEFVYGDYKVYDVRKMIAKSEQEIGKATAKYFFYSNIMNFFKTEITLANGEIRKRPLIETNGETGEIVWDKGRDFATVRKVLSMPQVNIVKKTEVQTGGFSKESILPKRNSDKLIARKKDWDPKKYGGFDSPTVAYSVLVVAKVEKGKSKKLKSVKELLGITIMERSSFEKNPIDFLEAKGYKEVKKDLIIKLPKYSLFELENGRKRMLASAGELQKGNELALPSKYVNFLYLASHYEKLKGSPEDNEQKQLFVEQHKHYLDEIIEQISEFSKRVILADANLDKVLSAYNKHRDKPIREQAENIIHLFTLTNLGAPAAFKYFDTTIDRKRYTSTKEVLDATLIHQSITGLYETRIDLSQLGGDGGPAPAPAPAPAPAPGGTLNIEDEYRLHETSKGPDVPLGSTWLSDFPQAWAETGGMGLAFRQAPLIISLKATSTPVSIKQYPMSQEARLGIKPHIQRLLDQGILVPCQSPWNTPLLPVKKPGTNDYRPVQDLREVNKRVEDIHPTVPNPYNLLSGLPPSHQWYTVLDLKDAFFCLRLHPTSQSLFAFEWKDPEMGISGQLTWTRLPQGFKNSPTLFNEALHRDLADFRIQHPDLILLQYVDDLLLAATSELDCQQGTRALLQTLGDLGYRASAKKAQICQKQVKYLGYLLKEGQRWLTEARKETVMGQPTPKTPRQLREFLGKAGLCRLFIPGFAEMAAPLYPLTKPGTLFKWGPDQQKAYQEIKQALLTAPALGLPDLTKPFELFVDEKQGYAKGVLTQKLGPWRRPVAYLSKKLDPVAAGWPPCLRMVAAIAVLTKDVGKLTMGQPLVILAPHAVEALVKQPPDRWLSNARMTHYQALLLDTDRVQFGPIVALNPATLLPLPEEGLQHDCLDILAEAHGTRPDLTDQPLPDADHTWYTDGSSFLQEGQRRAGAAVTTETEVIWAKALPAGTSAQRAELIALTQALKMAAGKKLNVYTDSRYAFATAHIHGEIYRRRGWLTSEGKEIKNKDEILALLKALFLPKRLSIIHCPGHQKGNHAEARGNRMADQAAREVATRETPETSTLLAGKRTADGSEFEKRTADGSEFESPKKKAKVE
